United States Patent Application Publication US 2011/0183924 A1 - sequence listing, part 179

SEQ ID NO: 441312 - DNA, 9040 bp, Homo sapiens
acgcgggggagtgcagctggcaccatgggtgtgctccagagcaacttctgcttgctctgagccccctgccctgcctcccctttcaccatgtttcctctgacaagattttaagtacagcaattcaagaagatttctcctcctaaacgacatttatctgaagtctattgcctcttgattgctggaaaagaatcttaaaatcatttcaaaagtaacttataaacaaacttattaaaagtgatgaaaggagcattgaaattaattagcactaatttttcactgtgccaaagtgtgcagtgtccttcagaggaaacaataacagatctggtgagtgtgccatgccagtggggagaattgaatgtccctcatctccctctttccctagggacattagtcatgagtgccgagtgtgcggggtcacagaagtgggtctttctgcatatgcaaagcacatttctggccagttgcacaaagataacgttgatgcccaggaaagagaagatgatggaaaaggagaggaagaggaagaagattattttgacaaggaactcattcagttaataaaacaaaggaaagaacaaagtcgacaagatgaaccttccaatagcaaccaagaaataaactctgatgacagacgaccccaatggagacgagaagaccgaattccttaccaagacagagagagttacagtcagcctgcatggcatcatcgtggacctccacagcgggattggaaatgggaaaaagatggctttaataatactaggaaaaacagctttccacattctttgaggaatggtggtggaccaagaggacgttccgggtggcataagggtgttgcaggaggctcctcgacttggtttcacaaccatagtaattctggaggtggttggctttcaaatagtggagcagtagattggaatcataatggtacaggaaggaattccagttggctttctgaaggaacaggtggcttttccagttggcatatgaacaacagtaacggaaactggaaatccagtgtacgtagtacaaataattggaattacagtggccctggagacaaatttcaaccaggcagaaacagaaattctaactgtcaaatggaagacatgactatgctatggaacaagaaatctaataagtcaaacaaatacagtcacgacagatataattggcagcggcaagaaaatgacaaacttggtacagttgccacatatagaggtccttctgaaggatttacaagtgataaatttccttcagaaggcttactcgacttcaattttgagcagctggaaagccaaaccactaaacaagcagacactgctacttccaaagttagtggaaagaatggcagtgcggcaagggaaaagcctcgtcgctggacgccttacccttctcagaagactctggatttacagtcgggattgaaagacatcactggtaacaagtcagaaatgatagagaaacctctctttgattttagcttgataactacaggaatacaggagccccaaactgatgaaacacgtaattccccaacacagaaaacacaaaaagaaatacatactggatctcttaatcacaaggcctcttctgattccgctgcttccttcgaggtggtgagacagtgccccactgcagaaaaacctgaacaagagcatacaccaaataaaatgccatcattgaaatccccactccttccatgtccagccactaaatcattgtctcaaaagcaagatccaaagaatatctcaaaaaacaccaaaacaaattttttttcccctggagaacactcaaatccctcgaacaagcccactgtggaagataaccatggtccttacatatccaaactgcgtagttcatgtcctcatgttttaaaagggaataaaagtacatttggctctcaaaagcaatctggtgataatttaaatgatactttacgaaaggccaaagaggtgctacagtgtcatgagtcattgcaaaatccacttcttagcacttctaaaagtaccaggaactatgcaaaagcaagtagaaatgtagaagaatctgaaaaagggtctttgaaaattgagtttcaagtgcacgcactagaagatgaaagtgatggagagacatctgacacggaaaagcatggaacaaaaattggaaccctaggttctgcaactacagaattgttatctggcagcactcgaactgctgatgagaaagaggaggatgaccgcatcctgaagacttctagagagctatccacttccccatgtaatcccatagttcgccagaaagaatctgaattacaaatgacatctgcagccagtccacaccctggcttattgctagacttgaaaacctctctagaagatgcacaggttgatgactctattaaatctcatgtatcttatgaaacagaaggctttgagagtgctagcttggatgcagagcttcaaaaaagtgacatcagtcagccctcgggccctctcctgcctgaactaagtaagcttggctttcctgcctcacttcagagggatctaacccggcacattagtttgaagagcaaaactggagtacaccttcctgagccaaacctcaatagtgcccgccgcattcgcaatattagcggtcaccgaaagagtgagacagagaaggagtctgggctcaagccaaccctacggcagattctaaatgcatctcggagaaatgtcaactgggaacaggtcattcagcaagtaaccaagaaaaagcaagagctgggcaaaggcttacccaggtttggcatagaaatggtaccccttgttcaaaatgaacaagaagccttagatttggatggggaacctgatctgtccagtctagaaggattccagtgggaaggtgtttccatttcctcgtcccctggcttggcaagaaagcgaagcctttctgagagcagcgtgatcatggacagagctccttctgtgtatagcttcttcagtgaggaaggtacaggcaaagaaaatgagccccagcagatggtttcacctagtaactcattgagggctggacagagccagaaagcaaccatgcacctcaaacaagaagtgacacctcgggctgcctccctccgaacaggtgaaagggctgaaaatgttgctacccaaaggcgacatagtgcacaattatcctctgaccatataatacctttgatgcatttggcaaaagacttgaacagccaggagaggtctataccaccgtcagagaatcagaattcccaggagagtaatggagagggaaactgtctgtcatcaagcgcatcctcagcccttgcgatctccagtttagcggatgcagccacagatagtagctgtacctctggtgctgaacaaaatgatggccaaagtattagaaagaaacgaagagccactggagatggatcttctcctgaactcccaagtcttgagagaaaaaataaaagaaggaaaattaaaggaaaaaaagaacgttctcaggttgaccagctgctgaatatttctttaagggaggaagaacttagtaagtcattgcagtgcatggataacaatcttctgcaagcccgtgcagcccttcagacagcttatgtggaagttcagaggctacttatgctcaagcagcagataactatggagatgagtgcactgaggacccatagaatacagattctacagggattacaagaaacatatgaaccttctgagcacccagaccaggttccctgtagcctcacacgagaacgaaggaacagtagatctcaaacatccattgatgccgcactgctgcccactccctttttcccactttttctggagcctccatcttcccatgtgtctccatcacccaccggagcctctcttcaaataaccacgtctcctactttccaaacccatggcagtgtccctgctccagactcatcagttcagattaaacaagagcccatgtctcctgaacaagatgagaatgtgaatgctgtgccaccaagctctgcctgcaatgtgtccaaggaattactggaagctaatagagagatcagtgacagttgtccagtttatccagtcatcactgctagattgtccttaccagagtcaacagaaagtttccatgagcctagccaagaactgaagttttctgtggagcaaagaaataccagaaacagagaaaactctccctcttcccaatcagctggtctttctagcataaataaagaaggggaagagccaaccaaaggcaatagtgggtctgaagcctgtaccagttcttttctaagattgtcttttgcttcagaaacccctttggagaaggaaccccactctccagctgaccagcctgaacaacaggcagaatccactttgacatcagctgagactaggggaagcaagaaaaagaagaaactccggaagaagaaaagtctacgggctgcccatgttcctgagaatagtgacactgaacaggatgttttgactgttaaacctgtaaggaaagtaaaagctggaaagttaattaaaggggggaaagtaacaacctccacttgggaagacagcaggactggtcgggagcaggagagtgtcagagatgagccagatagtgactcgtctctggaagtcctagaaattcctaatcctcagttagaagtagtagccattgattcttcagaatcaggagaagagaaaccagacagcccatctaaaaaggatatttggaactctacagagcaaaacccactagaaacgtctcgttctgggtgtgatgaagttagctctaccagtgaaattggcactcgctataaagatggcatccctgtaagtgtggcagaaactcagactgtgatctcctccataaaaggatcaaagaattcttcagaaatatcttcagagccaggagatgatgatgaacccacagaaggaagctttgagggacaccaagctgccgtaaatgcaattcagatatttgggaacttgctatatacctgttcagcagataaaactgttcgggtttataatctggtgagtcggaaatgtattggtgtctttgagggtcatacctccaaagttaactgcctcctggttactcagacctccgggaagaatgctgccctttacaccgggtccagtgaccataccatccgctgctataatgttaagagccgagagtgtgtggagcagttacagctggaagaccgggtcctctgcctccacagtagatggcgaatcctctatgcgggactggcaaatggcactgtggtcaccttcaacataaagaacaacaaacgacttgagatctttgaatgccatggccctcgggcagtcagctgtcttgctacagctcaggaaggtgcccgaaaactgctggtcgtggggtcttatgactgcacaattagtgtacgcgatgcccggaatggactgctcctcagaactctggagggccatagcaaaaccattctttgcatgaaggtggtgaatgatctcgtgttcagtggctccagtgatcagtcagtccatgctcacaacattcacactggtgagctcgtgcggatctataaaggtcacaatcatgcagtgactgtggtgaatatcctaggaaaagtgatggtgactgcttgcctggataaatttgttcgtgtctatgaattacagtctcatgatcgattacaagtttatggaggacacaaagacatgattatgtgtatgaccatccataaaagcatgatttacactggctgttatgatggcagtattcaggccgtgaggcttaatctgatgcagaattaccgctgttggtggcatggttgctctctgatatttggcgttgtagatcatttaaaacaacacttgctgaccgaccacactaatcccaacttccagactctgaaatgtcgctggaagaactgcgatgcttttttcactgctaggaaaggatccaaacaggatgctgcaggacatattgaacgacatgctgaagatgacagcaaaattgattcatgaagttttttgcctcccacgttgggaagtcattagttgaactattttcacattggccccccacacaggccactctcttccctttcttggtgaagtaaggaaggagaaagtggttactagccaggcatacccctagcataagtctgggcagctctatgggatgataaattacacttttaagttcttgctggaggttttaaatagatttagacaaatgttaaggaaccatacttctctgggacagcatggcatatagtgatatatgctatttgcgttctccagatgtttattgaagatacagatcctaattggttacccagtttgaccctaatcatatgtatattttattgatttcagtttgcaatttttaatttatgttcttatgatggtttaaacctatagtcaggcttttaagtacaagtttgtttaagtgccagactttgaggatcagttttaatttctccatttgtaatagctgggtatttaaactggaagcaaatagttttctttcttaacaattatgtgcagtgtgtgtcactgttttcttgctttatagatagagctggctttaagtgctaaaggacacagtagatttttgacaaacagtggctgctctgctgactatcttttaggaattcaggaagcaaatcacatagtgacaagtccttacagacaccacttctagtaaatctctgtaaatgtggatagaaagctcagtgtgaggcagtgcgtagacctaacgtctacctttacatctgctgttgaacctgggcactacctgttacagatcctgtcaggctgttgaactggaggtgtacctttatcttcctttctagtgtctgaccctgcaagcctaatgttggtttgaacccttttggtttgttcagttgccagcctccatctctcccactgtatggccgtgcctagaccgatggcagccatcgaatattcctctgggctcacggggtgttttccacccccctgcagcaactaagatggtgggggagagggggttagaataaagcatctgaatacagttttcaggacctcaagcagacttcctagagacttgtttctgagacagttctttgccttcacttccctgctagctgggaaagaagagtggagcagagactctgcctggccactgagaacagccaaattcacaaaccctcagtggggctttgtttttggattttctccggactcatcagtaaacctgtagaagtgtcgctttccagccttttgtttctggatcctcaaaactcagaacgtggccgggcgtggtggctcacgcctgtaatcccagcactttgggaggctgaggcaggcagatcacctgaggctaggagttgcagaccagcctggccaacatggcaaaaccccgtctctactaaaaatacaaaaagccgggcgtggtgggcgcctgtaatcccagctgctcaggaggctgaggcaggagaatcgcttgaacccgggaggcagagattgcagtaagctgagatcgtgccactgcactccagcctggtgacagagtgagactccgtctcaaaaaaaaaaaaaaaaactcagcttcttcagagagataaaattgggggaggagcccagggccacataccaagctttgggacatggtgcctcatgctctctgggattgcagaccatccaggtctgtcttcgcccctgttagtgcacatatatccactcacatgtcttccctcaggctatcgggcagggggacttcaccagggggtttatggataggcttcaagagggtctgtgagcccccagaaattgtgtgtgagactgagtatgtgttcttttttccaggaaaggctccagtggttcttacttgatccaaaaaatgtcaagaattaatctaggaggccgggcctggtggctcacacctgtaatcccagctctttgggaggccgaggcgggtggatcactcaaggtcaggcatttgagaccagcctggccaacatagtgaaaccccgtctctattaaaaatacaaaaattagctgggtgtggtggtatgtgcctgtagtctcagctactcaggaggctgagacaggagaatcacttgaaccctggaggtagaagttgcagtgagccaagatcatactactgcactccagcctgggcgacaagagtgaaactccacctcaaaaaaaaaaaaaaaagagttaatctaggagataatgaatggcctagtactagataatatatggccccacaagctcttgacttctgtccttggggaaagccattttgttaaccacactagtgagatttacatgatgcttaatggagaacagagaagatcttgttgcaaaaggtgtattaaatatttgtgctgtttctgtatgagattgagaagcttttcccacctctcacccctatttcctataaggatatccagagaagccaaactgttctgtgggtttgggaatggtcatttcccgggaaaatgcatctggatcgatgactaaacctggcccttttctctgggctgtagtgaagccgcattttcacgctggctggcagtgtgctgagagcctcgaatgctctgcggcgtagtgcccttctgccctgcctgacgatgtatcgaaaagatgagagtgaaggagactttgtgcagcaggaaacgggtaggtgaggtgttgggcagttgtgggaacttctgagagtattacagagtggtagaatcggtaagaactctgatttggacttcgctttggtggaactgtgtgcctatacctgcctgtgtgtgtgcaagtgtgcaggttcctttgtatgtatgtgtacgtgtgggaacctgtgtttgtcatatttttcttcatttcacaaaggctttttttgaagcagtggcagtatgcctttgtttcaagaacacatgaaattcttttaacaccagattagtgtgttaccccaaatgaacggttctagccctctattaagaaaagaaggcaaagttctgtataattttcaagactcttgtaagtagtaacacacagccataagcagccaaaatgctgatggtccctttatttct

SEQ ID NO: 441313 - DNA, 2095 bp, Homo sapiens
cacagaacagtttggcttctctggatatccttataggaaataggggtgagaggtgggtttgggaatggtcatttcccgggaaaatgcatctggatcgatgactaaacctggcccttttctctgggctgtagtgaagccgcattttcacgctggctggcagtgtgctgagagcctcgaatgctctgcggcgtagtgcccttctgccctgcctgacgatgtatcgaaaagatgagagtgaaggagactttgtgcagcaggaaacgggtaggtgaggtgttgggcagttgtgggaacttctgagagtattacagagtggtagaatcggtaagaactctgatttggacttcgctttggtggaactgtgtgcctatacctgcctgtgtgtgtgcaagtgtgcaggttcctttgtatgtatgtgtacgtgtgggaacctgtgtttgtcatatttttcttcatttcacaaaggctttttttgaagcagtggcagtatgcctttgtttcaagaacacatgaaattcttttaacaccagattagtgtgttaccccaaatgaacggttctagccctctattaagaaataaagggaccataagcattttggctgcttatggctgtgtgttactacttacaagagtcttgaaaattatacagaactttgccttctttttttaatgtcttccacaatgttgtgactgattataaccctgtttcccctcagagaagagctatggctcagggatctgtgttgactctggcatttagtggctttgtgaaggaaagaaaccattaaatgacctgacaaaaactgactcatgtctttaaagtagttgaagccacttttagaatgttactctcggttgcttttgtctaattctaatggcttaaagccaagaaaaccatagtataaatctttttgtgtacctatgctagtgtttaaatggcagttcgttgtgataaagtatcagtcacttcaagttttctgtgaaagtttttaattaggttaaaaataattttggcatacgtctctactcagtttataaagcagttccacaccatgcaaacaaaactctaacagcaaaggttatcttgacctgatgttacttgaatctgagagaaagtcattacttactactgcactcctgcttttgtgggaaaaattttcttcttccccagaagagttaacagttgagtgttcagctcctgacttacctttaatttagaggcaatattattactgtttaagtgattatttgcttaacacaggttttattttgtctttttgctggtagattatacaagggacaactttagtgatgaggcatgtggatgatttggtgggagtaggtatatacttagtggaatggtttattttatggaagagaattcattggaggtgagattgaagtatattgtgaagtgggatttgaacagcacatatgctctggtttgctcaaataactgcagtttatgcttacatctaaattttgtttctgttacctaaacgggagcttctagaattacgaaggccatacctgccacatttataaaataatggttttatccctgcccccaaatcatcaggttcctcgggtttaagagaagtggtctaatagacaggaatagaagttgtggtggaggtgatttgggatagactaggtttccttatgcaagtggatatgagctcctcatagaaaccagacctactgtattagacagtaacctctaacctcacctccaagcccaagtatatggccctgctgggttacctggtgactacatttcccagattcactctaaattcaaggtagtgacccaaataaattgggaaaggagggggtcaaggaggaaaagctgttgaaaatctttctcctatttaagagaaatatatgccctagagctgctccagcacccttggtttctgatttttttaatattgaatatggattagaagaatgaaatcagatgacacctgactgcaaaaatgtttataagcaaatagccttcttacattttggtataaagctgtgaacttcgtaactttgtaaagcaagatataaagcaaatacaagaggaaaataaagtacttttactaattg

SEQ ID NO: 441314 - DNA, 5542 bp, Homo sapiens
acgcgggggagtgcagctggcaccatgggtgtgctccagagcaacttctgcttgctctgagccccctgccctgcctcccctttcaccatgtttcctctgacaagattttaagtacagcaattcaagaagatttctcctcctaaacgacatttatctgaagtctattgcctcttgattgctggaaaagaatcttaaaatcatttcaaaagtaacttataaacaaacttattaaaagtgatgaaaggagcattgaaattaattagcactaatttttcactgtgccaaagtgtgcagtgtccttcagaggaaacaataacagatctggtgagtgtgccatgccagtggggagaattgaatgtccctcatctccctctttccctagggacattagtcatgagtgccgagtgtgcggggtcacagaagtgggtctttctgcatatgcaaagcacatttctggccagttgcacaaagataacgttgatgcccaggaaagagaagatgatggaaaaggagaggaagaggaagaagattattttgacaaggaactcattcagttaataaaacaaaggaaagaacaaagtcgacaagatgaaccttccaatagcaaccaagaaataaactctgatgacagacgaccccaatggagacgagaagaccgaattccttaccaagacagagagagttacagtcagcctgcatggcatcatcgtggacctccacagcgggattggaaatgggaaaaagatggctttaataatactaggaaaaacagctttccacattctttgaggaatggtggtggaccaagaggacgttccgggtggcataagggtgttgcaggaggctcctcgacttggtttcacaaccatagtaattctggaggtggttggctttcaaatagtggagcagtagattggaatcataatggtacaggaaggaattccagttggctttctgaaggaacaggtggcttttccagttggcatatgaacaacagtaacggaaactggaaatccagtgtacgtagtacaaataattggaattacagtggccctggagacaaatttcaaccaggcagaaacagaaattctaactgtcaaatggaagacatgactatgctatggaacaagaaatctaataagtcaaacaaatacagtcacgacagatataattggcagcggcaagaaaatgacaaacttggtacagttgccacatatagaggtccttctgaaggatttacaagtgataaatttccttcagaaggcttactcgacttcaattttgagcagctggaaagccaaaccactaaacaagcagacactgctacttccaaagttagtggaaagaatggcagtgcggcaagggaaaagcctcgtcgctggacgccttacccttctcagaagactctggatttacagtcgggattgaaagacatcactggtaacaagtcagaaatgatagagaaacctctctttgattttagcttgataactacaggaatacaggagccccaaactgatgaaacacgtaattccccaacacagaaaacacaaaaagaaatacatactggatctcttaatcacaaggcctcttctgattccgctgcttccttcgaggtggtgagacagtgccccactgcagaaaaacctgaacaagagcatacaccaaataaaatgccatcattgaaatccccactccttccatgtccagccactaaatcattgtctcaaaagcaagatccaaagaatatctcaaaaaacaccaaaacaaattttttttcccctggagaacactcaaatccctcgaacaagcccactgtggaagataaccatggtccttacatatccaaactgcgtagttcatgtcctcatgttttaaaagggaataaaagtacatttggctctcaaaagcaatctggtgataatttaaatgatactttacgaaaggccaaagaggtgctacagtgtcatgagtcattgcaaaatccacttcttagcacttctaaaagtaccaggaactatgcaaaagcaagtagaaatgtagaagaatctgaaaaagggtctttgaaaattgagtttcaagtgcacgcactagaagatgaaagtgatggagagacatctgacacggaaaagcatggaacaaaaattggaaccctaggttctgcaactacagaattgttatctggcagcactcgaactgctgatgagaaagaggaggatgaccgcatcctgaagacttctagagagctatccacttccccatgtaatcccatagttcgccagaaagaatctgaattacaaatgacatctgcagccagtccacaccctggcttattgctagacttgaaaacctctctagaagatgcacaggttgatgactctattaaatctcatgtatcttatgaaacagaaggctttgagagtgctagcttggatgcagagcttcaaaaaagtgacatcagtcagccctcgggccctctcctgcctgaactaagtaagcttggctttcctgcctcacttcagagggatctaacccggcacattagtttgaagagcaaaactggagtacaccttcctgagccaaacctcaatagtgcccgccgcattcgcaatattagcggtcaccgaaagagtgagacagagaaggagtctgggctcaagccaaccctacggcagattctaaatgcatctcggagaaatgtcaactgggaacaggtcattcagcaagtaaccaagaaaaagcaagagctgggcaaaggcttacccaggtttggcatagaaatggtaccccttgttcaaaatgaacaagaagccttagatttggatggggaacctgatctgtccagtctagaaggattccagtgggaaggtgtttccatttcctcgtcccctggcttggcaagaaagcgaagcctttctgagagcagcgtgatcatggacagagctccttctgtgtatagcttcttcagtgaggaaggtacaggcaaagaaaatgagccccagcagatggtttcacctagtaactcattgagggctggacagagccagaaagcaaccatgcacctcaaacaagaagtgacacctcgggctgcctccctccgaacaggtgaaagggctgaaaatgttgctacccaaaggcgacatagtgcacaattatcctctgaccatataatacctttgatgcatttggcaaaagacttgaacagccaggagaggtctataccaccgtcagagaatcagaattcccaggagagtaatggagagggaaactgtctgtcatcaagcgcatcctcagcccttgcgatctccagtttagcggatgcagccacagatagtagctgtacctctggtgctgaacaaaatgatggccaaagtattagaaagaaacgaagagccactggagatggatcttctcctgaactcccaagtcttgagagaaaaaataaaagaaggaaaattaaaggaaaaaaagaacgttctcaggttgaccagctgctgaatatttctttaagggaggaagaacttagtaagtcattgcagtgcatggataacaatcttctgcaagcccgtgcagcccttcagacagcttatgtggaagttcagaggctacttatgctcaagcagcagataactatggagatgagtgcactgaggacccatagaatacagattctacagggattacaagaaacatatgaaccttctgagcacccagaccaggttccctgtagcctcacacgagaacgaaggaacagtagatctcaaacatccattgatgccgcactgctgcccactccctttttcccactttttctggagcctccatcttcccatgtgtctccatcacccaccggagcctctcttcaaataaccacgtctcctactttccaaacccatggcagtgtccctgctccagactcatcagttcagattaaacaagagcccatgtctcctgaacaagatgagaatgtgaatgctgtgccaccaagctctgcctgcaatgtgtccaaggaattactggaagctaatagagagatcagtgacagttgtccagtttatccagtcatcactgctagattgtccttaccagagtcaacagaaagtttccatgagcctagccaagaactgaagttttctgtggagcaaagaaataccagaaacagagaaaactctccctcttcccaatcagctggtctttctagcataaataaagaaggggaagagccaaccaaaggcaatagtgggtctgaagcctgtaccagttcttttctaagattgtcttttgcttcagaaacccctttggagaaggaaccccactctccagctgaccagcctgaacaacaggcagaatccactttgacatcagctgagactaggggaagcaagaaaaagaagaaactccggaagaagaaaagtctacgggctgcccatgttcctgagaatagtgacactgaacaggatgttttgactgttaaacctgtaaggaaagtaaaagctggaaagttaattaaaggggggaaagtaacaacctccacttgggaagacagcaggactggtcgggagcaggagagtgtcagagatgagccagatagtgactcgtctctggaagtcctagaaattcctaatcctcagttagaagtagtagccattgattcttcagaatcaggagaagagaaaccagacagcccatctaaaaaggatatttggaactctacagagcaaaacccactagaaacgtctcgttctgggtgtgatgaagttagctctaccagtgaaattggcactcgctataaagatggcatccctgtaagtgtggcagaaactcagactgtgatctcctccataaaaggatcaaagaattcttcagaaatatcttcagagccaggagatgatgatgaacccacagaaggaagctttgagggacaccaagctgccgtaaatgcaattcagatatttgggaacttgctatatacctgttcagcagataaaactgttcgggtttataatctggtgagtcggaaatgtattggtgtctttgagggtcatacctccaaagttaactgcctcctggttactcagacctccgggaagaatgctgccctttacaccgggtccagtgaccataccatccgctgctataatgttaaggtaggtgggtccagagaaatccaaagtggttcatattgagtcgcctttgtatttactgtgtggagtggagacactgtggcagacgcttcattctacccaccatctcctttttgcttctaaacaatgtttagcacattgttgtagccctaggtagatatgagacttacacataaaccatattttctgtctctctccaccagtattttttcacttcctactattaataatataccttccttggtctttgccataaatgttatgcatatcatatgtcaaaactaatcctagatagaataaagagaaaaatgtaggccgggctcagtggctcacgcctctaatcccagcactttgggaggcagaggcgggtggattcacctgaggttgggagtttgaga

SEQ ID NO: 441315 - DNA, 4367 bp, Homo sapiens
acgcgggggagtgcagctggcaccatgggtgtgctccagagcaacttctgcttgctctgagccccctgccctgcctcccctttcaccatgtttcctctgacaagattttaagtacagcaattcaagaagatttctcctcctaaacgacatttatctgaagtctattgcctcttgattgctggaaaagaatcttaaaatcatttcaaaagtaacttataaacaaacttattaaaagtgatgaaaggagcattgaaattaattagcactaatttttcactgtgccaaagtgtgcagtgtccttcagaggaaacaataacagatctggtgagtgtgccatgccagtggggagaattgaatgtccctcatctccctctttccctagggacattagtcatgagtgccgagtgtgcggggtcacagaagtgggtctttctgcatatgcaaagcacatttctggccagttgcacaaagataacgttgatgcccaggaaagagaagatgatggaaaaggagaggaagaggaagaagattattttgacaaggaactcattcagttaataaaacaaaggaaagaacaaagtcgacaagatgaaccttccaatagcaaccaagaaataaactctgatgacagacgaccccaatggagacgagaagaccgaattccttaccaagacagagagagttacagtcagcctgcatggcatcatcgtggacctccacagcgggattggaaatgggaaaaagatggctttaataatactaggaaaaacagctttccacattctttgaggaatggtggtggaccaagaggacgttccgggtggcataagggtgttgcaggaggctcctcgacttggtttcacaaccatagtaattctggaggtggttggctttcaaatagtggagcagtagattggaatcataatggtacaggaaggaattccagttggctttctgaaggaacaggtggcttttccagttggcatatgaacaacagtaacggaaactggaaatccagtgtacgtagtacaaataattggaattacagtggccctggagacaaatttcaaccaggcagaaacagaaattctaactgtcaaatggaagacatgactatgctatggaacaagaaatctaataagtcaaacaaatacagtcacgacagatataattggcagcggcaagaaaatgacaaacttggtacagttgccacatatagaggtccttctgaaggatttacaagtgataaatttccttcagaaggcttactcgacttcaattttgagcagctggaaagccaaaccactaaacaagcagacactgctacttccaaagttagtggaaagaatggcagtgcggcaagggaaaagcctcgtcgctggacgccttacccttctcagaagactctggatttacagtcgggattgaaagacatcactggtaacaagtcagaaatgatagagaaacctctctttgattttagcttgataactacaggaatacaggagccccaaactgatgaaacacgtaattccccaacacagaaaacacaaaaagaaatacatactggatctcttaatcacaaggcctcttctgattccgctgcttccttcgaggtggtgagacagtgccccactgcagaaaaacctgaacaagagcatacaccaaataaaatgccatcattgaaatccccactccttccatgtccagccactaaatcattgtctcaaaagcaagatccaaagaatatctcaaaaaacaccaaaacaaattttttttcccctggagaacactcaaatccctcgaacaagcccactgtggaagataaccatggtccttacatatccaaactgcgtagttcatgtcctcatgttttaaaagggaataaaagtacatttggctctcaaaagcaatctggtgataatttaaatgatactttacgaaaggccaaagaggtgctacagtgtcatgagtcattgcaaaatccacttcttagcacttctaaaagtaccaggaactatgcaaaagcaagtagaaatgtagaagaatctgaaaaagggtctttgaaaattgagtttcaagtgcacgcactagaagatgaaagtgatggagagacatctgacacggaaaagcatggaacaaaaattggaaccctaggttctgcaactacagaattgttatctggcagcactcgaactgctgatgagaaagaggaggatgaccgcatcctgaagacttctagagagctatccacttccccatgtaatcccatagttcgccagaaagaatctgaattacaaatgacatctgcagccagtccacaccctggcttattgctagacttgaaaacctctctagaagatgcacaggttgatgactctattaaatctcatgtatcttatgaaacagaaggctttgagagtgctagcttggatgcagagcttcaaaaaagtgacatcagtcagccctcgggccctctcctgcctgaactaagtaagcttggctttcctgcctcacttcagagggatctaacccggcacattagtttgaagagcaaaactggagtacaccttcctgagccaaacctcaatagtgcccgccgcattcgcaatattagcggtcaccgaaagagtgagacagagaaggagtctgggctcaagccaaccctacggcagattctaaatgcatctcggagaaatgtcaactgggaacaggtcattcagcaagtaaccaagaaaaagcaagagctgggcaaaggcttacccaggtttggcatagaaatggtaccccttgttcaaaatgaacaagaagccttagatttggatggggaacctgatctgtccagtctagaaggattccagtgggaaggtgtttccatttcctcgtcccctggcttggcaagaaagcgaagcctttctgagagcagcgtgatcatggacagagctccttctgtgtatagcttcttcagtgaggaaggtacaggcaaagaaaatgagccccagcagatggtttcacctagtaactcattgagggctggacagagccagaaagcaaccatgcacctcaaacaagaagtgacacctcgggctgcctccctccgaacaggtgaaagggctgaaaatgttgctacccaaaggcgacatagtgcacaattatcctctgaccatataatacctttgatgcatttggcaaaagacttgaacagccaggagaggtctataccaccgtcagagaatcagaattcccaggagagtaatggagagggaaactgtctgtcatcaagcgcatcctcagcccttgcgatctccagtttagcggatgcagccacagatagtagctgtacctctggtgctgaacaaaatgatggccaaagtattagaaagaaacgaagagccactggagatggatcttctcctgaactcccaagtcttgagagaaaaaataaaagaaggaaaattaaaggaaaaaaagaacgttctcaggttgaccagctgctgaatatttctttaagggaggaagaacttagtaagtcattgcagtgcatggataacaatcttctgcaagcccgtgcagcccttcagacagcttatgtggaagttcagaggctacttatgctcaagcagcagataactatggagatgagtgcactgaggacccatagaatacagattctacagggattacaagaaacatatgaaccttctgagcacccagaccaggttccctgtagcctcacacgagaacgaaggaacagtagatctcaaacatccattgatgccgcactgctgcccactccctttttcccactttttctggagcctccatcttcccatgtgtctccatcacccaccggagcctctcttcaaataaccacgtctcctactttccaaacccatggcagtgtccctgctccagactcatcagttcagattaaacaagagcccatgtctcctgaacaagatgagaatgtgaatgctgtgccaccaagctctgcctgcaatgtgtccaaggaattactggaagctaatagtatgtaagcttttctctgggttaagggcatcccagtagtgagactggggcatttttatatgagtgatataagccatacttgctcattaaaactaaaatgagcaagtacaactaatttgtcactggaattctcttcatatatacaggaggattcttttaaaatattttagagaatgtaatttaaatatcagtcattttctttcatttcctctaatctagggttagagttgactttgtattagcacccacaaggttccatttattaggataagtacaaaatttgtttcgtgtgaaataaatggggttgaagttaattcagccaattttctgaataaggt

SEQ ID NO: 441316 - DNA, 873 bp, Homo sapiens
acgcgggggagtgcagctggcaccatgggtgtgctccagagcaacttctgcttgctctgagccccctgccctgcctcccctttcaccatgtttcctctgacaagattttaagtacagcaattcaagaagatttctcctcctaaacgacatttatctgaagtctattgcctcttgattgctggaaaagaatcttaaaatcatttcaaaagtaacttataaacaaacttattaaaagtgatgaaaggagcattgaaattaattagcactaatttttcactgtgccaaagtgtgcagtgtccttcagaggaaacaataacagatctggtgagtgtgccatgccagtggggagaattgaatgtccctcatctccctctttccctagggacattagtcatgagtgccgagtgtgcggggtcacagaagtgggtctttctgcatatgcaaagcacatttctggccagttgcacaaagataacgttgatgcccaggaaagagaagatgatggaaaaggagaggaagaggaagaagattattttgacaaggaactcattcagttaataaaacaaaggaaagaacaaagtcgacaagatgaaccttccaatagcaaccaagaaataaactctgatgacagacgaccccaatggagacgagaagaccgaattccttaccaagacagagagagttacagtcagcctgcatggcatcatcgtggacctccacagcgggattggaaatgggaaaaagatggcttttgagaaatgggcttttgagaaatgggcttttgagaaatgggcttttgagaaatgggcttttgagaaatgggcttttgagaaatgggcttttgagaaatgggcttttgagaaatgggctttg

SEQ ID NO: 441317 - DNA, 426 bp, Homo sapiens
agtgctgtgccctctcaaaatatcaaaagatttttccagtattttcaaggttcctcattatactgatattttggttgccttggctttgttgtcttttctagccaagaataaatttgaaataaggggctggctttttgcttccatagtgcttatgggatccagctgggggctgttctgattcacgttcactgcaccctttttcaccgagtctcctcattttctttctctccagtggcatggttgctctctgatatttggcgttgtagatcatttaaaacaacacttgctgaccgaccacactaatcccaacttccagactctgaaatgtcgctggaagaactgcgatgcttttttcactgctaggaaaggatccaaacaggtacattagtgggacttgaggtttgcctgggattcagtagactgctc

SEQ ID NO: 441318 - DNA, 447 bp, Homo sapiens
tctggctgtcttacagtgttgccataagtattttctggtatggctcaactaacatatactttcagatacctcattgcctgtgactgtttgctaggcacttggtgaacatacatttactgagcatcttttgtgtaccaggtgctgttttagacatgaggatacagcagtgaactgaatgttttagcatctttttgttgaggaaatatattatctaatcctcctatatctcataagtaataatctggtctgtgcttaaactttagagtcggaaatgtattggtgtctttgagggtcatacctccaaagttaactgcctcctggttactcagacctccgggaagaatgctgccctttacaccgggtccagtgaccataccatccgctgctataatgttaaggtaggtgggtccagagaaatccaaagtggttcatattgagtcgcctttg

SEQ ID NO: 441319 - DNA, 443 bp, Homo sapiens
aaaaagtgacatcagtcagccctcgggccctctcctgcctgaactaagtaagcttggctttcctgcctcacttcagagggatctaacccggcacattagtttgaagagcaaaactggagtacaccttcctgagccaaacctcaatagtgcccgccgcattcgcaatattagcggtcaccgaaagagtgagacagagaaggagtctgggctcaagccaaccctacggcagattctaaatgcatctcggagaaatgtcaactgggaacaggtcattcagcaagtaaccaagaaaaagcaagagctgggcaaaggcttacccaggtgtgtgctgcttttcggtgtcttttttttcctcactttcttttaaagtaaccctttgaccctgatcaagagaattctacgtgtttcatttaattaaatgtttgccaacaatatctgttgta

SEQ ID NO: 441320 - DNA, 10467 bp, Homo sapiens
acgcgggggagtgcagctggcaccatgggtgtgctccagagcaacttctgcttgctctgagccccctgccctgcctcccctttcaccatgtttcctctgacaagattttaagtacagcaattcaagaagatttctcctcctaaacgacatttatctgaagtctattgcctcttgattgctggaaaagaatcttaaaatcatttcaaaagtaacttataaacaaacttattaaaagtgatgaaaggagcattgaaattaattagcactaatttttcactgtgccaaagtgtgcagtgtccttcagaggaaacaataacagatctggtgagtgtgccatgccagtggggagaattgaatgtccctcatctccctctttccctagggacattagtcatgagtgccgagtgtgcggggtcacagaagtgggtctttctgcatatgcaaagcacatttctggccagttgcacaaagataacgttgatgcccaggaaagagaagatgatggaaaaggagaggaagaggaagaagattattttgacaaggaactcattcagttaataaaacaaaggaaagaacaaagtcgacaagatgaaccttccaatagcaaccaagaaataaactctgatgacagacgaccccaatggagacgagaagaccgaattccttaccaagacagagagagttacagtcagcctgcatggcatcatcgtggacctccacagcgggattggaaatgggaaaaagatggctttaataatactaggaaaaacagctttccacattctttgaggaatggtggtggaccaagaggacgttccgggtggcataagggtgttgcaggaggctcctcgacttggtttcacaaccatagtaattctggaggtggttggctttcaaatagtggagcagtagattggaatcataatggtacaggaaggaattccagttggctttctgaaggaacaggtggcttttccagttggcatatgaacaacagtaacggaaactggaaatccagtgtacgtagtacaaataattggaattacagtggccctggagacaaatttcaaccaggcagaaacagaaattctaactgtcaaatggaagacatgactatgctatggaacaagaaatctaataagtcaaacaaatacagtcacgacagatataattggcagcggcaagaaaatgacaaacttggtacagttgccacatatagaggtccttctgaaggatttacaagtgataaatttccttcagaaggcttactcgacttcaattttgagcagctggaaagccaaaccactaaacaagcagacactgctacttccaaagttagtggaaagaatggcagtgcggcaagggaaaagcctcgtcgctggacgccttacccttctcagaagactctggatttacagtcgggattgaaagacatcactggtaacaagtcagaaatgatagagaaacctctctttgattttagcttgataactacaggaatacaggagccccaaactgatgaaacacgtaattccccaacacagaaaacacaaaaagaaatacatactggatctcttaatcacaaggcctcttctgattccgctgcttccttcgaggtggtgagacagtgccccactgcagaaaaacctgaacaagagcatacaccaaataaaatgccatcattgaaatccccactccttccatgtccagccactaaatcattgtctcaaaagcaagatccaaagaatatctcaaaaaacaccaaaacaaattttttttcccctggagaacactcaaatccctcgaacaagcccactgtggaagataaccatggtccttacatatccaaactgcgtagttcatgtcctcatgttttaaaagggaataaaagtacatttggctctcaaaagcaatctggtgataatttaaatgatactttacgaaaggccaaagaggtgctacagtgtcatgagtcattgcaaaatccacttcttagcacttctaaaagtaccaggaactatgcaaaagcaagtagaaatgtagaagaatctgaaaaagggtctttgaaaattgagtttcaagtgcacgcactagaagatgaaagtgatggagagacatctgacacggaaaagcatggaacaaaaattggaaccctaggttctgcaactacagaattgttatctggcagcactcgaactgctgatgagaaagaggaggatgaccgcatcctgaagacttctagagagctatccacttccccatgtaatcccatagttcgccagaaagaatctgaattacaaatgacatctgcagccagtccacaccctggcttattgctagacttgaaaacctctctagaagatgcacaggttgatgactctattaaatctcatgtatcttatgaaacagaaggctttgagagtgctagcttggatgcagagcttcaaaaaagtgacatcagtcagccctcgggccctctcctgcctgaactaagtaagcttggctttcctgcctcacttcagagggatctaacccggcacattagtttgaagagcaaaactggagtacaccttcctgagccaaacctcaatagtgcccgccgcattcgcaatattagcggtcaccgaaagagtgagacagagaaggagtctgggctcaagccaaccctacggcagattctaaatgcatctcggagaaatgtcaactgggaacaggtcattcagcaagtaaccaagaaaaagcaagagctgggcaaaggcttacccaggtttggcatagaaatggtaccccttgttcaaaatgaacaagaagccttagatttggatggggaacctgatctgtccagtctagaaggattccagtgggaaggtgtttccatttcctcgtcccctggcttggcaagaaagcgaagcctttctgagagcagcgtgatcatggacagagctccttctgtgtatagcttcttcagtgaggaaggtacaggcaaagaaaatgagccccagcagatggtttcacctagtaactcattgagggctggacagagccagaaagcaaccatgcacctcaaacaagaagtgacacctcgggctgcctccctccgaacaggtgaaagggctgaaaatgttgctacccaaaggcgacatagtgcacaattatcctctgaccatataatacctttgatgcatttggcaaaagacttgaacagccaggagaggtctataccaccgtcagagaatcagaattcccaggagagtaatggagagggaaactgtctgtcatcaagcgcatcctcagcccttgcgatctccagtttagcggatgcagccacagatagtagctgtacctctggtgctgaacaaaatgatggccaaagtattagaaagaaacgaagagccactggagatggatcttctcctgaactcccaagtcttgagagaaaaaataaaagaaggaaaattaaaggaaaaaaagaacgttctcaggttgaccagctgctgaatatttctttaagggaggaagaacttagtaagtcattgcagtgcatggataacaatcttctgcaagcccgtgcagcccttcagacagcttatgtggaagttcagaggctacttatgctcaagcagcagataactatggagatgagtgcactgaggacccatagaatacagattctacagggattacaagaaacatatgaaccttctgagcacccagaccaggttccctgtagcctcacacgagaacgaaggaacagtagatctcaaacatccattgatgccgcactgctgcccactccctttttcccactttttctggagcctccatcttcccatgtgtctccatcacccaccggagcctctcttcaaataaccacgtctcctactttccaaacccatggcagtgtccctgctccagactcatcagttcagattaaacaagagcccatgtctcctgaacaagatgagaatgtgaatgctgtgccaccaagctctgcctgcaatgtgtccaaggaattactggaagctaatagagagatcagtgacagttgtccagtttatccagtcatcactgctagattgtccttaccagagtcaacagaaagtttccatgagcctagccaagaactgaagttttctgtggagcaaagaaataccagaaacagagaaaactctccctcttcccaatcagctggtctttctagcataaataaagaaggggaagagccaaccaaaggcaatagtgggtctgaagcctgtaccagttcttttctaagattgtcttttgcttcagaaacccctttggagaaggaaccccactctccagctgaccagcctgaacaacaggcagaatccactttgacatcagctgagactaggggaagcaagaaaaagaagaaactccggaagaagaaaagtctacgggctgcccatgttcctgagaatagtgacactgaacaggatgttttgactgttaaacctgtaaggaaagtaaaagctggaaagttaattaaaggggggaaagtaacaacctccacttgggaagacagcaggactggtcgggagcaggagagtgtcagagatgagccagatagtgactcgtctctggaagtcctagaaattcctaatcctcagttagaagtagtagccattgattcttcagaatcaggagaagagaaaccagacagcccatctaaaaaggatatttggaactctacagagcaaaacccactagaaacgtctcgttctgggtgtgatgaagttagctctaccagtgaaattggcactcgctataaagatggcatccctgtaagtgtggcagaaactcagactgtgatctcctccataaaaggatcaaagaattcttcagaaatatcttcagagccaggagatgatgatgaacccacagaaggaagctttgagggacaccaagctgccgtaaatgcaattcagatatttgggaacttgctatatacctgttcagcagataaaactgttcgggtttataatctggtgagtcggaaatgtattggtgtctttgagggtcatacctccaaagttaactgcctcctggttactcagacctccgggaagaatgctgccctttacaccgggtccagtgaccataccatccgctgctataatgttaagagccgagagtgtgtggagcagttacagctggaagaccgggtcctctgcctccacagtagatggcgaatcctctatgcgggactggcaaatggcactgtggtcaccttcaacataaagaacaacaaacgacttgagatctttgaatgccatggccctcgggcagtcagctgtcttgctacagctcaggaaggtgcccgaaaactgctggtcgtggggtcttatgactgcacaattagtgtacgcgatgcccggaatggactgctcctcagaactctggagggccatagcaaaaccattctttgcatgaaggtggtgaatgatctcgtgttcagtggctccagtgatcagtcagtccatgctcacaacattcacactggtgagctcgtgcggatctataaaggtcacaatcatgcagtgactgtggtgaatatcctaggaaaagtgatggtgactgcttgcctggataaatttgttcgtgtctatgaattacagtctcatgatcgattacaagtttatggaggacacaaagacatgattatgtgtatgaccatccataaaagcatgatttacactggctgttatgatggcagtattcaggccgtgaggcttaatctgatgcagaattaccgctgttggtggcatggttgctctctgatatttggcgttgtagatcatttaaaacaacacttgctgaccgaccacactaatcccaacttccagactctgaaatgtcgctggaagaactgcgatgcttttttcactgctaggaaaggatccaaacaggatgctgcaggacatattgaacgacatgctgaagatgacagcaaaattgattcatgaagttttttgcctcccacgttgggaagtcattagttgaactattttcacattggccccccacacaggccactctcttccctttcttggtgaagtaaggaaggagaaagtggttactagccaggcatacccctagcataagtctgggcagctctatgggatgataaattacacttttaagttcttgctggaggttttaaatagatttagacaaatgttaaggaaccatacttctctgggacagcatggcatatagtgatatatgctatttgcgttctccagatgtttattgaagatacagatcctaattggttacccagtttgaccctaatcatatgtatattttattgatttcagtttgcaatttttaatttatgttcttatgatggtttaaacctatagtcaggcttttaagtacaagtttgtttaagtgccagactttgaggatcagttttaatttctccatttgtaatagctgggtatttaaactggaagcaaatagttttctttcttaacaattatgtgcagtgtgtgtcactgttttcttgctttatagatagagctggctttaagtgctaaaggacacagtagatttttgacaaacagtggctgctctgctgactatcttttaggaattcaggaagcaaatcacatagtgacaagtccttacagacaccacttctagtaaatctctgtaaatgtggatagaaagctcagtgtgaggcagtgcgtagacctaacgtctacctttacatctgctgttgaacctgggcactacctgttacagatcctgtcaggctgttgaactggaggtgtacctttatcttcctttctagtgtctgaccctgcaagcctaatgttggtttgaacccttttggtttgttcagttgccagcctccatctctcccactgtatggccgtgcctagaccgatggcagccatcgaatattcctctgggctcacggggtgttttccacccccctgcagcaactaagatggtgggggagagggggttagaataaagcatctgaatacagttttcaggacctcaagcagacttcctagagacttgtttctgagacagttctttgccttcacttccctgctagctgggaaagaagagtggagcagagactctgcctggccactgagaacagccaaattcacaaaccctcagtggggctttgtttttggattttctccggactcatcagtaaacctgtagaagtgtcgctttccagccttttgtttctggatcctcaaaactcagaacgtggccgggcgtggtggctcacgcctgtaatcccagcactttgggaggctgaggcaggcagatcacctgaggctaggagttgcagaccagcctggccaacatggcaaaaccccgtctctactaaaaatacaaaaagccgggcgtggtgggcgcctgtaatcccagctgctcaggaggctgaggcaggagaatcgcttgaacccgggaggcagagattgcagtaagctgagatcgtgccactgcactccagcctggtgacagagtgagactccgtctcaaaaaaaaaaaaaaaaactcagcttcttcagagagataaaattgggggaggagcccagggccacataccaagctttgggacatggtgcctcatgctctctgggattgcagaccatccaggtctgtcttcgcccctgttagtgcacatatatccactcacatgtcttccctcaggctatcgggcagggggacttcaccagggggtttatggataggcttcaagagggtctgtgagcccccagaaattgtgtgtgagactgagtatgtgttcttttttccaggaaaggctccagtggttcttacttgatccaaaaaatgtcaagaattaatctaggaggccgggcctggtggctcacacctgtaatcccagctctttgggaggccgaggcgggtggatcactcaaggtcaggcatttgagaccagcctggccaacatagtgaaaccccgtctctattaaaaatacaaaaattagctgggtgtggtggtatgtgcctgtagtctcagctactcaggaggctgagacaggagaatcacttgaaccctggaggtagaagttgcagtgagccaagatcatactactgcactccagcctgggcgacaagagtgaaactccacctcaaaaaaaaaaaaaaaagagttaatctaggagataatgaatggcctagtactagataatatatggccccacaagctcttgacttctgtccttggggaaagccattttgttaaccacactagtgagatttacatgatgcttaatggagaacagagaagatcttgttgcaaaaggtgtattaaatatttgtgctgtttctgtatgagattgagaagcttttcccacctctcacccctatttcctataaggatatccagagaagccaaactgttctgtgggtttgggaatggtcatttcccgggaaaatgcatctggatcgatgactaaacctggcccttttctctgggctgtagtgaagccgcattttcacgctggctggcagtgtgctgagagcctcgaatgctctgcggcgtagtgcccttctgccctgcctgacgatgtatcgaaaagatgagagtgaaggagactttgtgcagcaggaaacgggtaggtgaggtgttgggcagttgtgggaacttctgagagtattacagagtggtagaatcggtaagaactctgatttggacttcgctttggtggaactgtgtgcctatacctgcctgtgtgtgtgcaagtgtgcaggttcctttgtatgtatgtgtacgtgtgggaacctgtgtttgtcatatttttcttcatttcacaaaggctttttttgaagcagtggcagtatgcctttgtttcaagaacacatgaaattcttttaacaccagattagtgtgttaccccaaatgaacggttctagccctctattaagaaataaagggaccataagcattttggctgcttatggctgtgtgttactacttacaagagtcttgaaaattatacagaactttgccttctttttttaatgtcttccacaatgttgtgactgattataaccctgtttcccctcagagaagagctatggctcagggatctgtgttgactctggcatttagtggctttgtgaaggaaagaaaccattaaatgacctgacaaaaactgactcatgtctttaaagtagttgaagccacttttagaatgttactctcggttgcttttgtctaattctaatggcttaaagccaagaaaaccatagtataaatctttttgtgtacctatgctagtgtttaaatggcagttcgttgtgataaagtatcagtcacttcaagttttctgtgaaagtttttaattaggttaaaaataattttggcatacgtctctactcagtttataaagcagttccacaccatgcaaacaaaactctaacagcaaaggttatcttgacctgatgttacttgaatctgagagaaagtcattacttactactgcactcctgcttttgtgggaaaaattttcttcttccccagaagagttaacagttgagtgttcagctcctgacttacctttaatttagaggcaatattattactgtttaagtgattatttgcttaacacaggttttattttgtctttttgctggtagattatacaagggacaactttagtgatgaggcatgtggatgatttggtgggagtaggtatatacttagtggaatggtttattttatggaagagaattcattggaggtgagattgaagtatattgtgaagtgggatttgaacagcacatatgctctggtttgctcaaataactgcagtttatgcttacatctaaattttgtttctgttacctaaacgggagcttctagaattacgaaggccatacctgccacatttataaaataatggttttatccctgcccccaaatcatcaggttcctcgggtttaagagaagtggtctaatagacaggaatagaagttgtggtggaggtgatttgggatagactaggtttccttatgcaagtggatatgagctcctcatagaaaccagacctactgtattagacagtaacctctaacctcacctccaagcccaagtatatggccctgctgggttacctggtgactacatttcccagattcactctaaattcaaggtagtgacccaaataaattgggaaaggagggggtcaaggaggaaaagctgttgaaaatctttctcctatttaagagaaatatatgccctagagctgctccagcacccttggtttctgatttttttaatattgaatatggattagaagaatgaaatcagatgacacctgactgcaaaaatgtttataagcaaatagccttcttacattttggtataaagctgtgaacttcgtaactttgtaaagcaagatataaagcaaatacaagaggaaaataaagtacttttactaattg

SEQ ID NO: 441321 - DNA, 10206 bp, Homo sapiens
acgcgggggagtgcagctggcaccatgggtgtgctccagagcaacttctgcttgctctgagccccctgccctgcctcccctttcaccatgtttcctctgacaagattttaagtacagcaattcaagaagatttctcctcctaaacgacatttatctgaagtctattgcctcttgattgctggaaaagaatcttaaaatcatttcaaaagtaacttataaacaaacttattaaaagtgatgaaaggagcattgaaattaattagcactaatttttcactgtgccaaagtgtgcagtgtccttcagaggaaacaataacagatctggtgagtgtgccatgccagtggggagaattgaatgtccctcatctccctctttccctagggacattagtcatgagtgccgagtgtgcggggtcacagaagtgggtctttctgcatatgcaaagcacatttctggccagttgcacaaagataacgttgatgcccaggaaagagaagatgatggaaaaggagaggaagaggaagaagattattttgacaaggaactcattcagttaataaaacaaaggaaagaacaaagtcgacaagatgaaccttccaatagcaaccaagaaataaactctgatgacagacgaccccaatggagacgagaagaccgaattccttaccaagacagagagagttacagtcagcctgcatggcatcatcgtggacctccacagcgggattggaaatgggaaaaagatggctttaataatactaggaaaaacagctttccacattctttgaggaatggtggtggaccaagaggacgttccgggtggcataagggtgttgcaggaggctcctcgacttggtttcacaaccatagtaattctggaggtggttggctttcaaatagtggagcagtagattggaatcataatggtacaggaaggaattccagttggctttctgaaggaacaggtggcttttccagttggcatatgaacaacagtaacggaaactggaaatccagtgtacgtagtacaaataattggaattacagtggccctggagacaaatttcaaccaggcagaaacagaaattctaactgtcaaatggaagacatgactatgctatggaacaagaaatctaataagtcaaacaaatacagtcacgacagatataattggcagcggcaagaaaatgacaaacttggtacagttgccacatatagaggtccttctgaaggatttacaagtgataaatttccttcagaaggcttactcgacttcaattttgagcagctggaaagccaaaccactaaacaagcagacactgctacttccaaagttagtggaaagaatggcagtgcggcaagggaaaagcctcgtcgctggacgccttacccttctcagaagactctggatttacagtcgggattgaaagacatcactggtaacaagtcagaaatgatagagaaacctctctttgattttagcttgataactacaggaatacaggagccccaaactgatgaaacacgtaattccccaacacagaaaacacaaaaagaaatacatactggatctcttaatcacaaggcctcttctgattccgctgcttccttcgaggtggtgagacagtgccccactgcagaaaaacctgaacaagagcatacaccaaataaaatgccatcattgaaatccccactccttccatgtccagccactaaatcattgtctcaaaagcaagatccaaagaatatctcaaaaaacaccaaaacaaattttttttcccctggagaacactcaaatccctcgaacaagcccactgtggaagataaccatggtccttacatatccaaactgcgtagttcatgtcctcatgttttaaaagggaataaaagtacatttggctctcaaaagcaatctggtgataatttaaatgatactttacgaaaggccaaagaggtgctacagtgtcatgagtcattgcaaaatccacttcttagcacttctaaaagtaccaggaactatgcaaaagcaagtagaaatgtagaagaatctgaaaaagggtctttgaaaattgagtttcaagtgcacgcactagaagatgaaagtgatggagagacatctgacacggaaaagcatggaacaaaaattggaaccctaggttctgcaactacagaattgttatctggcagcactcgaactgctgatgagaaagaggaggatgaccgcatcctgaagacttctagagagctatccacttccccatgtaatcccatagttcgccagaaagaatctgaattacaaatgacatctgcagccagtccacaccctggcttattgctagacttgaaaacctctctagaagatgcacaggttgatgactctattaaatctcatgtatcttatgaaacagaaggctttgagagtgctagcttggatgcagagcttcaaaaaagtgacatcagtcagccctcgggccctctcctgcctgaactaagtaagcttggctttcctgcctcacttcagagggatctaacccggcacattagtttgaagagcaaaactggagtacaccttcctgagccaaacctcaatagtgcccgccgcattcgcaatattagcggtcaccgaaagagtgagacagagaaggagtctgggctcaagccaaccctacggcagattctaaatgcatctcggagaaatgtcaactgggaacaggtcattcagcaagtaaccaagaaaaagcaagagctgggcaaaggcttacccaggtttggcatagaaatggtaccccttgttcaaaatgaacaagaagccttagatttggatggggaacctgatctgtccagtctagaaggattccagtgggaaggtgtttccatttcctcgtcccctggcttggcaagaaagcgaagcctttctgagagcagcgtgatcatggacagagctccttctgtgtatagcttcttcagtgaggaaggtacaggcaaagaaaatgagccccagcagatggtttcacctagtaactcattgagggctggacagagccagaaagcaaccatgcacctcaaacaagaagtgacacctcgggctgcctccctccgaacaggtgaaagggctgaaaatgttgctacccaaaggcgacatagtgcacaattatcctctgaccatataatacctttgatgcatttggcaaaagacttgaacagccaggagaggtctataccaccgtcagagaatcagaattcccaggagagtaatggagagggaaactgtctgtcatcaagcgcatcctcagcccttgcgatctccagtttagcggatgcagccacagatagtagctgtacctctggtgctgaacaaaatgatggccaaagtattagaaagaaacgaagagccactggagatggatcttctcctgaactcccaagtcttgagagaaaaaataaaagaaggaaaattaaaggaaaaaaagaacgttctcaggttgaccagctgctgaatatttctttaagggaggaagaacttagtaagtcattgcagtgcatggataacaatcttctgcaagcccgtgcagcccttcagacagcttatgtggaagttcagaggctacttatgctcaagcagcagataactatggagatgagtgcactgaggacccatagaatacagattctacagggattacaagaaacatatgaaccttctgagcacccagaccaggttccctgtagcctcacacgagaacgaaggaacagtagatctcaaacatccattgatgccgcactgctgcccactccctttttcccactttttctggagcctccatcttcccatgtgtctccatcacccaccggagcctctcttcaaataaccacgtctcctactttccaaacccatggcagtgtccctgctccagactcatcagttcagattaaacaagagcccatgtctcctgaacaagatgagaatgtgaatgctgtgccaccaagctctgcctgcaatgtgtccaaggaattactggaagctaataaaacccctttggagaaggaaccccactctccagctgaccagcctgaacaacaggcagaatccactttgacatcagctgagactaggggaagcaagaaaaagaagaaactccggaagaagaaaagtctacgggctgcccatgttcctgagaatagtgacactgaacaggatgttttgactgttaaacctgtaaggaaagtaaaagctggaaagttaattaaaggggggaaagtaacaacctccacttgggaagacagcaggactggtcgggagcaggagagtgtcagagatgagccagatagtgactcgtctctggaagtcctagaaattcctaatcctcagttagaagtagtagccattgattcttcagaatcaggagaagagaaaccagacagcccatctaaaaaggatatttggaactctacagagcaaaacccactagaaacgtctcgttctgggtgtgatgaagttagctctaccagtgaaattggcactcgctataaagatggcatccctgtaagtgtggcagaaactcagactgtgatctcctccataaaaggatcaaagaattcttcagaaatatcttcagagccaggagatgatgatgaacccacagaaggaagctttgagggacaccaagctgccgtaaatgcaattcagatatttgggaacttgctatatacctgttcagcagataaaactgttcgggtttataatctggtgagtcggaaatgtattggtgtctttgagggtcatacctccaaagttaactgcctcctggttactcagacctccgggaagaatgctgccctttacaccgggtccagtgaccataccatccgctgctataatgttaagagccgagagtgtgtggagcagttacagctggaagaccgggtcctctgcctccacagtagatggcgaatcctctatgcgggactggcaaatggcactgtggtcaccttcaacataaagaacaacaaacgacttgagatctttgaatgccatggccctcgggcagtcagctgtcttgctacagctcaggaaggtgcccgaaaactgctggtcgtggggtcttatgactgcacaattagtgtacgcgatgcccggaatggactgctcctcagaactctggagggccatagcaaaaccattctttgcatgaaggtggtgaatgatctcgtgttcagtggctccagtgatcagtcagtccatgctcacaacattcacactggtgagctcgtgcggatctataaaggtcacaatcatgcagtgactgtggtgaatatcctaggaaaagtgatggtgactgcttgcctggataaatttgttcgtgtctatgaattacagtctcatgatcgattacaagtttatggaggacacaaagacatgattatgtgtatgaccatccataaaagcatgatttacactggctgttatgatggcagtattcaggccgtgaggcttaatctgatgcagaattaccgctgttggtggcatggttgctctctgatatttggcgttgtagatcatttaaaacaacacttgctgaccgaccacactaatcccaacttccagactctgaaatgtcgctggaagaactgcgatgcttttttcactgctaggaaaggatccaaacaggatgctgcaggacatattgaacgacatgctgaagatgacagcaaaattgattcatgaagttttttgcctcccacgttgggaagtcattagttgaactattttcacattggccccccacacaggccactctcttccctttcttggtgaagtaaggaaggagaaagtggttactagccaggcatacccctagcataagtctgggcagctctatgggatgataaattacacttttaagttcttgctggaggttttaaatagatttagacaaatgttaaggaaccatacttctctgggacagcatggcatatagtgatatatgctatttgcgttctccagatgtttattgaagatacagatcctaattggttacccagtttgaccctaatcatatgtatattttattgatttcagtttgcaatttttaatttatgttcttatgatggtttaaacctatagtcaggcttttaagtacaagtttgtttaagtgccagactttgaggatcagttttaatttctccatttgtaatagctgggtatttaaactggaagcaaatagttttctttcttaacaattatgtgcagtgtgtgtcactgttttcttgctttatagatagagctggctttaagtgctaaaggacacagtagatttttgacaaacagtggctgctctgctgactatcttttaggaattcaggaagcaaatcacatagtgacaagtccttacagacaccacttctagtaaatctctgtaaatgtggatagaaagctcagtgtgaggcagtgcgtagacctaacgtctacctttacatctgctgttgaacctgggcactacctgttacagatcctgtcaggctgttgaactggaggtgtacctttatcttcctttctagtgtctgaccctgcaagcctaatgttggtttgaacccttttggtttgttcagttgccagcctccatctctcccactgtatggccgtgcctagaccgatggcagccatcgaatattcctctgggctcacggggtgttttccacccccctgcagcaactaagatggtgggggagagggggttagaataaagcatctgaatacagttttcaggacctcaagcagacttcctagagacttgtttctgagacagttctttgccttcacttccctgctagctgggaaagaagagtggagcagagactctgcctggccactgagaacagccaaattcacaaaccctcagtggggctttgtttttggattttctccggactcatcagtaaacctgtagaagtgtcgctttccagccttttgtttctggatcctcaaaactcagaacgtggccgggcgtggtggctcacgcctgtaatcccagcactttgggaggctgaggcaggcagatcacctgaggctaggagttgcagaccagcctggccaacatggcaaaaccccgtctctactaaaaatacaaaaagccgggcgtggtgggcgcctgtaatcccagctgctcaggaggctgaggcaggagaatcgcttgaacccgggaggcagagattgcagtaagctgagatcgtgccactgcactccagcctggtgacagagtgagactccgtctcaaaaaaaaaaaaaaaaactcagcttcttcagagagataaaattgggggaggagcccagggccacataccaagctttgggacatggtgcctcatgctctctgggattgcagaccatccaggtctgtcttcgcccctgttagtgcacatatatccactcacatgtcttccctcaggctatcgggcagggggacttcaccagggggtttatggataggcttcaagagggtctgtgagcccccagaaattgtgtgtgagactgagtatgtgttcttttttccaggaaaggctccagtggttcttacttgatccaaaaaatgtcaagaattaatctaggaggccgggcctggtggctcacacctgtaatcccagctctttgggaggccgaggcgggtggatcactcaaggtcaggcatttgagaccagcctggccaacatagtgaaaccccgtctctattaaaaatacaaaaattagctgggtgtggtggtatgtgcctgtagtctcagctactcaggaggctgagacaggagaatcacttgaaccctggaggtagaagttgcagtgagccaagatcatactactgcactccagcctgggcgacaagagtgaaactccacctcaaaaaaaaaaaaaaaagagttaatctaggagataatgaatggcctagtactagataatatatggccccacaagctcttgacttctgtccttggggaaagccattttgttaaccacactagtgagatttacatgatgcttaatggagaacagagaagatcttgttgcaaaaggtgtattaaatatttgtgctgtttctgtatgagattgagaagcttttcccacctctcacccctatttcctataaggatatccagagaagccaaactgttctgtgggtttgggaatggtcatttcccgggaaaatgcatctggatcgatgactaaacctggcccttttctctgggctgtagtgaagccgcattttcacgctggctggcagtgtgctgagagcctcgaatgctctgcggcgtagtgcccttctgccctgcctgacgatgtatcgaaaagatgagagtgaaggagactttgtgcagcaggaaacgggtaggtgaggtgttgggcagttgtgggaacttctgagagtattacagagtggtagaatcggtaagaactctgatttggacttcgctttggtggaactgtgtgcctatacctgcctgtgtgtgtgcaagtgtgcaggttcctttgtatgtatgtgtacgtgtgggaacctgtgtttgtcatatttttcttcatttcacaaaggctttttttgaagcagtggcagtatgcctttgtttcaagaacacatgaaattcttttaacaccagattagtgtgttaccccaaatgaacggttctagccctctattaagaaataaagggaccataagcattttggctgcttatggctgtgtgttactacttacaagagtcttgaaaattatacagaactttgccttctttttttaatgtcttccacaatgttgtgactgattataaccctgtttcccctcagagaagagctatggctcagggatctgtgttgactctggcatttagtggctttgtgaaggaaagaaaccattaaatgacctgacaaaaactgactcatgtctttaaagtagttgaagccacttttagaatgttactctcggttgcttttgtctaattctaatggcttaaagccaagaaaaccatagtataaatctttttgtgtacctatgctagtgtttaaatggcagttcgttgtgataaagtatcagtcacttcaagttttctgtgaaagtttttaattaggttaaaaataattttggcatacgtctctactcagtttataaagcagttccacaccatgcaaacaaaactctaacagcaaaggttatcttgacctgatgttacttgaatctgagagaaagtcattacttactactgcactcctgcttttgtgggaaaaattttcttcttccccagaagagttaacagttgagtgttcagctcctgacttacctttaatttagaggcaatattattactgtttaagtgattatttgcttaacacaggttttattttgtctttttgctggtagattatacaagggacaactttagtgatgaggcatgtggatgatttggtgggagtaggtatatacttagtggaatggtttattttatggaagagaattcattggaggtgagattgaagtatattgtgaagtgggatttgaacagcacatatgctctggtttgctcaaataactgcagtttatgcttacatctaaattttgtttctgttacctaaacgggagcttctagaattacgaaggccatacctgccacatttataaaataatggttttatccctgcccccaaatcatcaggttcctcgggtttaagagaagtggtctaatagacaggaatagaagttgtggtggaggtgatttgggatagactaggtttccttatgcaagtggatatgagctcctcatagaaaccagacctactgtattagacagtaacctctaacctcacctccaagcccaagtatatggccctgctgggttacctggtgactacatttcccagattcactctaaattcaaggtagtgacccaaataaattgggaaaggagggggtcaaggaggaaaagctgttgaaaatctttctcctatttaagagaaatatatgccctagagctgctccagcacccttggtttctgatttttttaatattgaatatggattagaagaatgaaatcagatgacacctgactgcaaaaatgtttataagcaaatagccttcttacattttggtataaagctgtgaacttcgtaactttgtaaagcaagatataaagcaaatacaagaggaaaataaagtacttttactaattg

SEQ ID NO: 441322 - DNA, 9856 bp, Homo sapiens
acgcgggggagtgcagctggcaccatgggtgtgctccagagcaacttctgcttgctctgagccccctgccctgcctcccctttcaccatgtttcctctgacaagattttaagtacagcaattcaagaagatttctcctcctaaacgacatttatctgaagtctattgcctcttgattgctggaaaagaatcttaaaatcatttcaaaagtaacttataaacaaacttattaaaagtgatgaaaggagcattgaaattaattagcactaatttttcactgtgccaaagtgtgcagtgtccttcagaggaaacaataacagatctggtgagtgtgccatgccagtggggagaattgaatgtccctcatctccctctttccctagggacattagtcatgagtgccgagtgtgcggggtcacagaagtgggtctttctgcatatgcaaagcacatttctggccagttgcacaaagataacgttgatgcccaggaaagagaagatgatggaaaaggagaggaagaggaagaagattattttgacaaggaactcattcagttaataaaacaaaggaaagaacaaagtcgacaagatgaaccttccaatagcaaccaagaaataaactctgatgacagacgaccccaatggagacgagaagaccgaattccttaccaagacagagagagttacagtcagcctgcatggcatcatcgtggacctccacagcgggattggaaatgggaaaaagatggctttaataatactaggaaaaacagctttccacattctttgaggaatggtggtggaccaagaggacgttccgggtggcataagggtgttgcaggaggctcctcgacttggtttcacaaccatagtaattctggaggtggttggctttcaaatagtggagcagtagattggaatcataatggtacaggaaggaattccagttggctttctgaaggaacaggtggcttttccagttggcatatgaacaacagtaacggaaactggaaatccagtgtacgtagtacaaataattggaattacagtggccctggagacaaatttcaaccaggcagaaacagaaattctaactgtcaaatggaagacatgactatgctatggaacaagaaatctaataagtcaaacaaatacagtcacgacagatataattggcagcggcaagaaaatgacaaacttggtacagttgccacatatagaggtccttctgaaggatttacaagtgataaatttccttcagaaggcttactcgacttcaattttgagcagctggaaagccaaaccactaaacaagcagacactgctacttccaaagttagtggaaagaatggcagtgcggcaagggaaaagcctcgtcgctggacgccttacccttctcagaagactctggatttacagtcgggattgaaagacatcactggtaacaagtcagaaatgatagagaaacctctctttgattttagcttgataactacaggaatacaggagccccaaactgatgaaacacgtaattccccaacacagaaaacacaaaaagaaatacatactggatctcttaatcacaaggcctcttctgattccgctgcttccttcgaggtggtgagacagtgccccactgcagaaaaacctgaacaagagcatacaccaaataaaatgccatcattgaaatccccactccttccatgtccagccactaaatcattgtctcaaaagcaagatccaaagaatatctcaaaaaacaccaaaacaaattttttttcccctggagaacactcaaatccctcgaacaagcccactgtggaagataaccatggtccttacatatccaaactgcgtagttcatgtcctcatgttttaaaagggaataaaagtacatttggctctcaaaagcaatctggtgataatttaaatgatactttacgaaaggccaaagaggtgctacagtgtcatgagtcattgcaaaatccacttcttagcacttctaaaagtaccaggaactatgcaaaagcaagtagaaatgtagaagaatctgaaaaagggtctttgaaaattgagtttcaagtgcacgcactagaagatgaaagtgatggagagacatctgacacggaaaagcatggaacaaaaattggaaccctaggttctgcaactacagaattgttatctggcagcactcgaactgctgatgagaaagaggaggatgaccgcatcctgaagacttctagagagctatccacttccccatgtaatcccatagttcgccagaaagaatctgaattacaaatgacatctgcagccagtccacaccctggcttattgctagacttgaaaacctctctagaagatgcacaggttgatgactctattaaatctcatgtatcttatgaaacagaaggctttgagagtgctagcttggatgcagagcttcaaaaaagtgacatcagtcagccctcgggccctctcctgcctgaactaagtaagcttggctttcctgcctcacttcagagggatctaacccggcacattagtttgaagagcaaaactggagtacaccttcctgagccaaacctcaatagtgcccgccgcattcgcaatattagcggtcaccgaaagagtgagacagagaaggagtctgggctcaagccaaccctacggcagattctaaatgcatctcggagaaatgtcaactgggaacaggtcattcagcaagtaaccaagaaaaagcaagagctgggcaaaggcttacccaggtttggcatagaaatggtaccccttgttcaaaatgaacaagaagccttagatttggatggggaacctgatctgtccagtctagaaggattccagtgggaaggtgtttccatttcctcgtcccctggcttggcaagaaagcgaagcctttctgagagcagcgtgatcatggacagagctccttctgtgtatagcttcttcagtgaggaaggtacaggcaaagaaaatgagccccagcagatggtttcacctagtaactcattgagggctggacagagccagaaagcaaccatgcacctcaaacaagaagtgacacctcgggctgcctccctccgaacaggtgaaagggctgaaaatgttgctacccaaaggcgacatagtgcacaattatcctctgaccatataatacctttgatgcatttggcaaaagacttgaacagccaggagaggtctataccaccgtcagagaatcagaattcccaggagagtaatggagagggaaactgtctgtcatcaagcgcatcctcagcccttgcgatctccagtttagcggatgcagccacagatagtagctgtacctctggtgctgaacaaaatgatggccaaagtattagaaagaaacgaagagccactggagatggatcttctcctgaactcccaagtcttgagagaaaaaataaaagaaggaaaattaaaggaaaaaaagaacgttctcaggttgaccagctgctgaatatttctttaagggaggaagaacttagtaagtcattgcagtgcatggataacaatcttctgcaagcccgtgcagcccttcagacagcttatgtggaagttcagaggctacttatgctcaagcagcagataactatggagatgagtgcactgaggacccatagaatacagattctacagggattacaagaaacatatgaaccttctgagcacccagaccaggttccctgtagcctcacacgagaacgaaggaacagtagatctcaaacatccattgatgccgcactgctgcccactccctttttcccactttttctggagcctccatcttcccatgtgtctccatcacccaccggagcctctcttcaaataaccacgtctcctactttccaaacccatggcagtgtccctgctccagactcatcagttcagattaaacaagagcccatgtctcctgaacaagatgagaatgtgaatgctgtgccaccaagctctgcctgcaatgtgtccaaggaattactggaagctaatagagagatcagtgacagttgtccagtttatccagtcatcactgctagattgtccttaccagagtcaacagaaagtttccatgagcctagccaagaactgaagttttctgtggagcaaagaaataccagaaacagagaaaactctccctcttcccaatcagctggtctttctagcataaataaagaaggggaagagccaaccaaaggcaatagtgggtctgaagcctgtaccagttcttttctaagattgtcttttgcttcagaaacccctttggagaaggaaccccactctccagctgaccagcctgaacaacaggcagaatccactttgacatcagctgagactaggggaagcaagaaaaagaagaaactccggaagaagaaaagtctacgggctgcccatgttcctgagaatagtgacactgaacaggatgttttgactgttaaacctgtaaggaaagtaaaagctggaaagttaattaaaggggggaaagtaacaacctccacttgggaagacagcaggactggtcgggagcaggagagtgtcagagatgagccagatagtgactcgtctctggaagtcctagaaattcctaatcctcagttagaagtagtagccattgattcttcagaatcaggagaagagaaaccagacagcccatctaaaaaggatatttggaactctacagagcaaaacccactagaaacgtctcgttctgggtgtgatgaagttagctctaccagtgaaattggcactcgctataaagatggcatccctgtaagtgtggcagaaactcagactgtgatctcctccataaaaggatcaaagaattcttcagaaatatcttcagagccaggagatgatgatgaacccacagaaggaagctttgagggacaccaagctgccgtaaatgcaattcagatatttgggaacttgctatatacctgttcagcagataaaactgttcgggtttataatctggtgagtcggaaatgtattggtgtctttgagggtcatacctccaaagttaactgcctcctggttactcagacctccgggaagaatgctgccctttacaccgggtccagtgaccataccatccgctgctataatgttaagagccgagagtgtgtggagcagttacagctggaagaccgggtcctctgcctccacagtagatggcgaatcctctatgcgggactggcaaatggcactgtggtcaccttcaacataaagaacaacaaacgacttgagatctttgaatgccatggccctcgggcagtcagctgtcttgctacagctcaggaaggtgcccgaaaactgctggtcgtggggtcttatgactgcacaattagtgtacgcgatgcccggaatggactgctcctcagaactctggagggccatagcaaaaccattctttgcatgaaggtggtgaatgatctcgtgttcagtggctccagtgatcagtcagtccatgctcacaacattcacactggtgagctcgtgcggatctataaaggtcacaatcatgcagtgactgtggtgaatatcctaggaaaagtgatggtgactgcttgcctggataaatttgttcgtgtctatgaattacagtctcatgatcgattacaagtttatggaggacacaaagacatgattatgtgtatgaccatccataaaagcatgatttacactggctgttatgatggcagtattcaggccgtgaggcttaatctgatgcagaattaccgctgttggtggcatggttgctctctgatatttggcgttgtagatcatttaaaacaacacttgctgaccgaccacactaatcccaacttccagactctgaaatgtcgctggaagaactgcgatgcttttttcactgctaggaaaggatccaaacaggatgctgcaggacatattgaacgacatgctgaagatgacagcaaaattgattcatgaagttttttgcctcccacgttgggaagtcattagttgaactattttcacattggccccccacacaggccactctcttccctttcttggtgaagtaaggaaggagaaagtggttactagccaggcatacccctagcataagtctgggcagctctatgggatgataaattacacttttaagttcttgctggaggttttaaatagatttagacaaatgttaaggaaccatacttctctgggacagcatggcatatagtgatatatgctatttgcgttctccagatgtttattgaagatacagatcctaattggttacccagtttgaccctaatcatatgtatattttattgatttcagtttgcaatttttaatttatgttcttatgatggtttaaacctatagtcaggcttttaagtacaagtttgtttaagtgccagactttgaggatcagttttaatttctccatttgtaatagctgggtatttaaactggaagcaaatagttttctttcttaacaattatgtgcagtgtgtgtcactgttttcttgctttatagatagagctggctttaagtgctaaaggacacagtagatttttgacaaacagtggctgctctgctgactatcttttaggaattcaggaagcaaatcacatagtgacaagtccttacagacaccacttctagtaaatctctgtaaatgtggatagaaagctcagtgtgaggcagtgcgtagacctaacgtctacctttacatctgctgttgaacctgggcactacctgttacagatcctgtcaggctgttgaactggaggtgtacctttatcttcctttctagtgtctgaccctgcaagcctaatgttggtttgaacccttttggtttgttcagttgccagcctccatctctcccactgtatggccgtgcctagaccgatggcagccatcgaatattcctctgggctcacggggtgttttccacccccctgcagcaactaagatggtgggggagagggggttagaataaagcatctgaatacagttttcaggacctcaagcagacttcctagagacttgtttctgagacagttctttgccttcacttccctgctagctgggaaagaagagtggagcagagactctgcctggccactgagaacagccaaattcacaaaccctcagtggggctttgtttttggattttctccggactcatcagtaaacctgtagaagtgtcgctttccagccttttgtttctggatcctcaaaactcagaacgtggccgggcgtggtggctcacgcctgtaatcccagcactttgggaggctgaggcaggcagatcacctgaggctaggagttgcagaccagcctggccaacatggcaaaaccccgtctctactaaaaatacaaaaagccgggcgtggtgggcgcctgtaatcccagctgctcaggaggctgaggcaggagaatcgcttgaacccgggaggcagagattgcagtaagctgagatcgtgccactgcactccagcctggtgacagagtgagactccgtctcaaaactcaaaaaaaaaaaaaaaagagttaatctaggagataatgaatggcctagtactagataatatatggccccacaagctcttgacttctgtccttggggaaagccattttgttaaccacactagtgagatttacatgatgcttaatggagaacagagaagatcttgttgcaaaaggtgtattaaatatttgtgctgtttctgtatgagattgagaagcttttcccacctctcacccctatttcctataaggatatccagagaagccaaactgttctgtgggtttgggaatggtcatttcccgggaaaatgcatctggatcgatgactaaacctggcccttttctctgggctgtagtgaagccgcattttcacgctggctggcagtgtgctgagagcctcgaatgctctgcggcgtagtgcccttctgccctgcctgacgatgtatcgaaaagatgagagtgaaggagactttgtgcagcaggaaacgggtaggtgaggtgttgggcagttgtgggaacttctgagagtattacagagtggtagaatcggtaagaactctgatttggacttcgctttggtggaactgtgtgcctatacctgcctgtgtgtgtgcaagtgtgcaggttcctttgtatgtatgtgtacgtgtgggaacctgtgtttgtcatatttttcttcatttcacaaaggctttttttgaagcagtggcagtatgcctttgtttcaagaacacatgaaattcttttaacaccagattagtgtgttaccccaaatgaacggttctagccctctattaagaaataaagggaccataagcattttggctgcttatggctgtgtgttactacttacaagagtcttgaaaattatacagaactttgccttctttttttaatgtcttccacaatgttgtgactgattataaccctgtttcccctcagagaagagctatggctcagggatctgtgttgactctggcatttagtggctttgtgaaggaaagaaaccattaaatgacctgacaaaaactgactcatgtctttaaagtagttgaagccacttttagaatgttactctcggttgcttttgtctaattctaatggcttaaagccaagaaaaccatagtataaatctttttgtgtacctatgctagtgtttaaatggcagttcgttgtgataaagtatcagtcacttcaagttttctgtgaaagtttttaattaggttaaaaataattttggcatacgtctctactcagtttataaagcagttccacaccatgcaaacaaaactctaacagcaaaggttatcttgacctgatgttacttgaatctgagagaaagtcattacttactactgcactcctgcttttgtgggaaaaattttcttcttccccagaagagttaacagttgagtgttcagctcctgacttacctttaatttagaggcaatattattactgtttaagtgattatttgcttaacacaggttttattttgtctttttgctggtagattatacaagggacaactttagtgatgaggcatgtggatgatttggtgggagtaggtatatacttagtggaatggtttattttatggaagagaattcattggaggtgagattgaagtatattgtgaagtgggatttgaacagcacatatgctctggtttgctcaaataactgcagtttatgcttacatctaaattttgtttctgttacctaaacgggagcttctagaattacgaaggccatacctgccacatttataaaataatggttttatccctgcccccaaatcatcaggttcctcgggtttaagagaagtggtctaatagacaggaatagaagttgtggtggaggtgatttgggatagactaggtttccttatgcaagtggatatgagctcctcatagaaaccagacctactgtattagacagtaacctctaacctcacctccaagcccaagtatatggccctgctgggttacctggtgactacatttcccagattcactctaaattcaaggtagtgacccaaataaattgggaaaggagggggtcaaggaggaaaagctgttgaaaatctttctcctatttaagagaaatatatgccctagagctgctccagcacccttggtttctgatttttttaatattgaatatggattagaagaatgaaatcagatgacacctgactgcaaaaatgtttataagcaaatagccttcttacattttggtataaagctgtgaacttcgtaactttgtaaagcaagatataaagcaaatacaagaggaaaataaagtacttttactaattg

SEQ ID NO: 441323 - DNA, 8024 bp, Homo sapiens
acgcgggggagtgcagctggcaccatgggtgtgctccagagcaacttctgcttgctctgagccccctgccctgcctcccctttcaccatgtttcctctgacaagattttaagtacagcaattcaagaagatttctcctcctaaacgacatttatctgaagtctattgcctcttgattgctggaaaagaatcttaaaatcatttcaaaagtaacttataaacaaacttattaaaagtgatgaaaggagcattgaaattaattagcactaatttttcactgtgccaaagtgtgcagtgtccttcagaggaaacaataacagatctggtttggcatagaaatggtaccccttgttcaaaatgaacaagaagccttagatttggatggggaacctgatctgtccagtctagaaggattccagtgggaaggtgtttccatttcctcgtcccctggcttggcaagaaagcgaagcctttctgagagcagcgtgatcatggacagagctccttctgtgtatagcttcttcagtgaggaaggtacaggcaaagaaaatgagccccagcagatggtttcacctagtaactcattgagggctggacagagccagaaagcaaccatgcacctcaaacaagaagtgacacctcgggctgcctccctccgaacaggtgaaagggctgaaaatgttgctacccaaaggcgacatagtgcacaattatcctctgaccatataatacctttgatgcatttggcaaaagacttgaacagccaggagaggtctataccaccgtcagagaatcagaattcccaggagagtaatggagagggaaactgtctgtcatcaagcgcatcctcagcccttgcgatctccagtttagcggatgcagccacagatagtagctgtacctctggtgctgaacaaaatgatggccaaagtattagaaagaaacgaagagccactggagatggatcttctcctgaactcccaagtcttgagagaaaaaataaaagaaggaaaattaaaggaaaaaaagaacgttctcaggttgaccagctgctgaatatttctttaagggaggaagaacttagtaagtcattgcagtgcatggataacaatcttctgcaagcccgtgcagcccttcagacagcttatgtggaagttcagaggctacttatgctcaagcagcagataactatggagatgagtgcactgaggacccatagaatacagattctacagggattacaagaaacatatgaaccttctgagcacccagaccaggttccctgtagcctcacacgagaacgaaggaacagtagatctcaaacatccattgatgccgcactgctgcccactccctttttcccactttttctggagcctccatcttcccatgtgtctccatcacccaccggagcctctcttcaaataaccacgtctcctactttccaaacccatggcagtgtccctgctccagactcatcagttcagattaaacaagagcccatgtctcctgaacaagatgagaatgtgaatgctgtgccaccaagctctgcctgcaatgtgtccaaggaattactggaagctaatagagagatcagtgacagttgtccagtttatccagtcatcactgctagattgtccttaccagagtcaacagaaagtttccatgagcctagccaagaactgaagttttctgtggagcaaagaaataccagaaacagagaaaactctccctcttcccaatcagctggtctttctagcataaataaagaaggggaagagccaaccaaaggcaatagtgggtctgaagcctgtaccagttcttttctaagattgtcttttgcttcagaaacccctttggagaaggaaccccactctccagctgaccagcctgaacaacaggcagaatccactttgacatcagctgagactaggggaagcaagaaaaagaagaaactccggaagaagaaaagtctacgggctgcccatgttcctgagaatagtgacactgaacaggatgttttgactgttaaacctgtaaggaaagtaaaagctggaaagttaattaaaggggggaaagtaacaacctccacttgggaagacagcaggactggtcgggagcaggagagtgtcagagatgagccagatagtgactcgtctctggaagtcctagaaattcctaatcctcagttagaagtagtagccattgattcttcagaatcaggagaagagaaaccagacagcccatctaaaaaggatatttggaactctacagagcaaaacccactagaaacgtctcgttctgggtgtgatgaagttagctctaccagtgaaattggcactcgctataaagatggcatccctgtaagtgtggcagaaactcagactgtgatctcctccataaaaggatcaaagaattcttcagaaatatcttcagagccaggagatgatgatgaacccacagaaggaagctttgagggacaccaagctgccgtaaatgcaattcagatatttgggaacttgctatatacctgttcagcagataaaactgttcgggtttataatctggtgagtcggaaatgtattggtgtctttgagggtcatacctccaaagttaactgcctcctggttactcagacctccgggaagaatgctgccctttacaccgggtccagtgaccataccatccgctgctataatgttaagagccgagagtgtgtggagcagttacagctggaagaccgggtcctctgcctccacagtagatggcgaatcctctatgcgggactggcaaatggcactgtggtcaccttcaacataaagaacaacaaacgacttgagatctttgaatgccatggccctcgggcagtcagctgtcttgctacagctcaggaaggtgcccgaaaactgctggtcgtggggtcttatgactgcacaattagtgtacgcgatgcccggaatggactgctcctcagaactctggagggccatagcaaaaccattctttgcatgaaggtggtgaatgatctcgtgttcagtggctccagtgatcagtcagtccatgctcacaacattcacactggtgagctcgtgcggatctataaaggtcacaatcatgcagtgactgtggtgaatatcctaggaaaagtgatggtgactgcttgcctggataaatttgttcgtgtctatgaattacagtctcatgatcgattacaagtttatggaggacacaaagacatgattatgtgtatgaccatccataaaagcatgatttacactggctgttatgatggcagtattcaggccgtgaggcttaatctgatgcagaattaccgctgttggtggcatggttgctctctgatatttggcgttgtagatcatttaaaacaacacttgctgaccgaccacactaatcccaacttccagactctgaaatgtcgctggaagaactgcgatgcttttttcactgctaggaaaggatccaaacaggatgctgcaggacatattgaacgacatgctgaagatgacagcaaaattgattcatgaagttttttgcctcccacgttgggaagtcattagttgaactattttcacattggccccccacacaggccactctcttccctttcttggtgaagtaaggaaggagaaagtggttactagccaggcatacccctagcataagtctgggcagctctatgggatgataaattacacttttaagttcttgctggaggttttaaatagatttagacaaatgttaaggaaccatacttctctgggacagcatggcatatagtgatatatgctatttgcgttctccagatgtttattgaagatacagatcctaattggttacccagtttgaccctaatcatatgtatattttattgatttcagtttgcaatttttaatttatgttcttatgatggtttaaacctatagtcaggcttttaagtacaagtttgtttaagtgccagactttgaggatcagttttaatttctccatttgtaatagctgggtatttaaactggaagcaaatagttttctttcttaacaattatgtgcagtgtgtgtcactgttttcttgctttatagatagagctggctttaagtgctaaaggacacagtagatttttgacaaacagtggctgctctgctgactatcttttaggaattcaggaagcaaatcacatagtgacaagtccttacagacaccacttctagtaaatctctgtaaatgtggatagaaagctcagtgtgaggcagtgcgtagacctaacgtctacctttacatctgctgttgaacctgggcactacctgttacagatcctgtcaggctgttgaactggaggtgtacctttatcttcctttctagtgtctgaccctgcaagcctaatgttggtttgaacccttttggtttgttcagttgccagcctccatctctcccactgtatggccgtgcctagaccgatggcagccatcgaatattcctctgggctcacggggtgttttccacccccctgcagcaactaagatggtgggggagagggggttagaataaagcatctgaatacagttttcaggacctcaagcagacttcctagagacttgtttctgagacagttctttgccttcacttccctgctagctgggaaagaagagtggagcagagactctgcctggccactgagaacagccaaattcacaaaccctcagtggggctttgtttttggattttctccggactcatcagtaaacctgtagaagtgtcgctttccagccttttgtttctggatcctcaaaactcagaacgtggccgggcgtggtggctcacgcctgtaatcccagcactttgggaggctgaggcaggcagatcacctgaggctaggagttgcagaccagcctggccaacatggcaaaaccccgtctctactaaaaatacaaaaagccgggcgtggtgggcgcctgtaatcccagctgctcaggaggctgaggcaggagaatcgcttgaacccgggaggcagagattgcagtaagctgagatcgtgccactgcactccagcctggtgacagagtgagactccgtctcaaaaaaaaaaaaaaaaactcagcttcttcagagagataaaattgggggaggagcccagggccacataccaagctttgggacatggtgcctcatgctctctgggattgcagaccatccaggtctgtcttcgcccctgttagtgcacatatatccactcacatgtcttccctcaggctatcgggcagggggacttcaccagggggtttatggataggcttcaagagggtctgtgagcccccagaaattgtgtgtgagactgagtatgtgttcttttttccaggaaaggctccagtggttcttacttgatccaaaaaatgtcaagaattaatctaggaggccgggcctggtggctcacacctgtaatcccagctctttgggaggccgaggcgggtggatcactcaaggtcaggcatttgagaccagcctggccaacatagtgaaaccccgtctctattaaaaatacaaaaattagctgggtgtggtggtatgtgcctgtagtctcagctactcaggaggctgagacaggagaatcacttgaaccctggaggtagaagttgcagtgagccaagatcatactactgcactccagcctgggcgacaagagtgaaactccacctcaaaaaaaaaaaaaaaagagttaatctaggagataatgaatggcctagtactagataatatatggccccacaagctcttgacttctgtccttggggaaagccattttgttaaccacactagtgagatttacatgatgcttaatggagaacagagaagatcttgttgcaaaaggtgtattaaatatttgtgctgtttctgtatgagattgagaagcttttcccacctctcacccctatttcctataaggatatccagagaagccaaactgttctgtgggtttgggaatggtcatttcccgggaaaatgcatctggatcgatgactaaacctggcccttttctctgggctgtagtgaagccgcattttcacgctggctggcagtgtgctgagagcctcgaatgctctgcggcgtagtgcccttctgccctgcctgacgatgtatcgaaaagatgagagtgaaggagactttgtgcagcaggaaacgggtaggtgaggtgttgggcagttgtgggaacttctgagagtattacagagtggtagaatcggtaagaactctgatttggacttcgctttggtggaactgtgtgcctatacctgcctgtgtgtgtgcaagtgtgcaggttcctttgtatgtatgtgtacgtgtgggaacctgtgtttgtcatatttttcttcatttcacaaaggctttttttgaagcagtggcagtatgcctttgtttcaagaacacatgaaattcttttaacaccagattagtgtgttaccccaaatgaacggttctagccctctattaagaaataaagggaccataagcattttggctgcttatggctgtgtgttactacttacaagagtcttgaaaattatacagaactttgccttctttttttaatgtcttccacaatgttgtgactgattataaccctgtttcccctcagagaagagctatggctcagggatctgtgttgactctggcatttagtggctttgtgaaggaaagaaaccattaaatgacctgacaaaaactgactcatgtctttaaagtagttgaagccacttttagaatgttactctcggttgcttttgtctaattctaatggcttaaagccaagaaaaccatagtataaatctttttgtgtacctatgctagtgtttaaatggcagttcgttgtgataaagtatcagtcacttcaagttttctgtgaaagtttttaattaggttaaaaataattttggcatacgtctctactcagtttataaagcagttccacaccatgcaaacaaaactctaacagcaaaggttatcttgacctgatgttacttgaatctgagagaaagtcattacttactactgcactcctgcttttgtgggaaaaattttcttcttccccagaagagttaacagttgagtgttcagctcctgacttacctttaatttagaggcaatattattactgtttaagtgattatttgcttaacacaggttttattttgtctttttgctggtagattatacaagggacaactttagtgatgaggcatgtggatgatttggtgggagtaggtatatacttagtggaatggtttattttatggaagagaattcattggaggtgagattgaagtatattgtgaagtgggatttgaacagcacatatgctctggtttgctcaaataactgcagtttatgcttacatctaaattttgtttctgttacctaaacgggagcttctagaattacgaaggccatacctgccacatttataaaataatggttttatccctgcccccaaatcatcaggttcctcgggtttaagagaagtggtctaatagacaggaatagaagttgtggtggaggtgatttgggatagactaggtttccttatgcaagtggatatgagctcctcatagaaaccagacctactgtattagacagtaacctctaacctcacctccaagcccaagtatatggccctgctgggttacctggtgactacatttcccagattcactctaaattcaaggtagtgacccaaataaattgggaaaggagggggtcaaggaggaaaagctgttgaaaatctttctcctatttaagagaaatatatgccctagagctgctccagcacccttggtttctgatttttttaatattgaatatggattagaagaatgaaatcagatgacacctgactgcaaaaatgtttataagcaaatagccttcttacattttggtataaagctgtgaacttcgtaactttgtaaagcaagatataaagcaaatacaagaggaaaataaagtacttttactaattg

SEQ ID NO: 441324 - DNA, 10863 bp, Homo sapiens
acgcgggggagtgcagctggcaccatgggtgtgctccagagcaacttctgcttgctctgagccccctgccctgcctcccctttcaccatgtttcctctgacaagattttaagtacagcaattcaagaagatttctcctcctaaacgacatttatctgaagtctattgcctcttgattgctggaaaagaatcttaaaatcatttcaaaagtaacttataaacaaacttattaaaagtgatgaaaggagcattgaaattaattagcactaatttttcactgtgccaaagtgtgcagtgtccttcagaggaaacaataacagatctggtgagtgtgccatgccagtggggagaattgaatgtccctcatctccctctttccctagggacattagtcatgagtgccgagtgtgcggggtcacagaagtgggtctttctgcatatgcaaagcacatttctggccagttgcacaaagataacgttgatgcccaggaaagagaagatgatggaaaaggagaggaagaggaagaagattattttgacaaggaactcattcagttaataaaacaaaggaaagaacaaagtcgacaagatgaaccttccaatagcaaccaagaaataaactctgatgacagacgaccccaatggagacgagaagaccgaattccttaccaagacagagagagttacagtcagcctgcatggcatcatcgtggacctccacagcgggattggaaatgggaaaaagatggctttaataatactaggaaaaacagctttccacattctttgaggaatggtggtggaccaagaggacgttccgggtggcataagggtgttgcaggaggctcctcgacttggtttcacaaccatagtaattctggaggtggttggctttcaaatagtggagcagtagattggaatcataatggtacaggaaggaattccagttggctttctgaaggaacaggtggcttttccagttggcatatgaacaacagtaacggaaactggaaatccagtgtacgtagtacaaataattggaattacagtggccctggagacaaatttcaaccaggcagaaacagaaattctaactgtcaaatggaagacatgactatgctatggaacaagaaatctaataagtcaaacaaatacagtcacgacagatataattggcagcggcaagaaaatgacaaacttggtacagttgccacatatagaggtccttctgaaggatttacaagtgataaatttccttcagaaggcttactcgacttcaattttgagcagctggaaagccaaaccactaaacaagcagacactgctacttccaaagttagtggaaagaatggcagtgcggcaagggaaaagcctcgtcgctggacgccttacccttctcagaagactctggatttacagtcgggattgaaagacatcactggtaacaagtcagaaatgatagagaaacctctctttgattttagcttgataactacaggaatacaggagccccaaactgatgaaacacgtaattccccaacacagaaaacacaaaaagaaatacatactggatctcttaatcacaaggcctcttctgattccgctgcttccttcgaggtggtgagacagtgccccactgcagaaaaacctgaacaagagcatacaccaaataaaatgccatcattgaaatccccactccttccatgtccagccactaaatcattgtctcaaaagcaagatccaaagaatatctcaaaaaacaccaaaacaaattttttttcccctggagaacactcaaatccctcgaacaagcccactgtggaagataaccatggtccttacatatccaaactgcgtagttcatgtcctcatgttttaaaagggaataaaagtacatttggctctcaaaagcaatctggtgataatttaaatgatactttacgaaaggccaaagaggtgctacagtgtcatgagtcattgcaaaatccacttcttagcacttctaaaagtaccaggaactatgcaaaagcaagtagaaatgtagaagaatctgaaaaagggtctttgaaaattgagtttcaagtgcacgcactagaagatgaaagtgatggagagacatctgacacggaaaagcatggaacaaaaattggaaccctaggttctgcaactacagaattgttatctggcagcactcgaactgctgatgagaaagaggaggatgaccgcatcctgaagacttctagagagctatccacttccccatgtaatcccatagttcgccagaaagaatctgaattacaaatgacatctgcagccagtccacaccctggcttattgctagacttgaaaacctctctagaagatgcacaggttgatgactctattaaatctcatgtatcttatgaaacagaaggctttgagagtgctagcttggatgcagagcttcaaaaaagtgacatcagtcagccctcgggccctctcctgcctgaactaagtaagcttggctttcctgcctcacttcagagggatctaacccggcacattagtttgaagagcaaaactggagtacaccttcctgagccaaacctcaatagtgcccgccgcattcgcaatattagcggtcaccgaaagagtgagacagagaaggagtctgggctcaagccaaccctacggcagattctaaatgcatctcggagaaatgtcaactgggaacaggtcattcagcaagtaaccaagaaaaagcaagagctgggcaaaggcttacccaggtttggcatagaaatggtaccccttgttcaaaatgaacaagaagccttagatttggatggggaacctgatctgtccagtctagaaggattccagtgggaaggtgtttccatttcctcgtcccctggcttggcaagaaagcgaagcctttctgagagcagcgtgatcatggacagagctccttctgtgtatagcttcttcagtgaggaaggtacaggcaaagaaaatgagccccagcagatggtttcacctagtaactcattgagggctggacagagccagaaagcaaccatgcacctcaaacaagaagtgacacctcgggctgcctccctccgaacaggtgaaagggctgaaaatgttgctacccaaaggcgacatagtgcacaattatcctctgaccatataatacctttgatgcatttggcaaaagacttgaacagccaggagaggtctataccaccgtcagagaatcagaattcccaggagagtaatggagagggaaactgtctgtcatcaagcgcatcctcagcccttgcgatctccagtttagcggatgcagccacagatagtagctgtacctctggtgctgaacaaaatgatggccaaagtattagaaagaaacgaagagccactggagatggatcttctcctgaactcccaagtcttgagagaaaaaataaaagaaggaaaattaaaggaaaaaaagaacgttctcaggttgaccagctgctgaatatttctttaagggaggaagaacttagtaagtcattgcagtgcatggataacaatcttctgcaagcccgtgcagcccttcagacagcttatgtggaagttcagaggctacttatgctcaagcagcagataactatggagatgagtgcactgaggacccatagaatacagattctacagggattacaagaaacatatgaaccttctgagcacccagaccaggttccctgtagcctcacacgagaacgaaggaacagtagatctcaaacatccattgatgccgcactgctgcccactccctttttcccactttttctggagcctccatcttcccatgtgtctccatcacccaccggagcctctcttcaaataaccacgtctcctactttccaaacccatggcagtgtccctgctccagactcatcagttcagattaaacaagagcccatgtctcctgaacaagatgagaatgtgaatgctgtgccaccaagctctgcctgcaatgtgtccaaggaattactggaagctaatagagagatcagtgacagttgtccagtttatccagtcatcactgctagattgtccttaccagagtcaacagaaagtttccatgagcctagccaagaactgaagttttctgtggagcaaagaaataccagaaacagagaaaactctccctcttcccaatcagctggtctttctagcataaataaagaaggggaagagccaaccaaaggcaatagtgggtctgaagcctgtaccagttcttttctaagattgtcttttgcttcagaaacccctttggagaaggaaccccactctccagctgaccagcctgaacaacaggcagaatccactttgacatcagctgagactaggggaagcaagaaaaagaagaaactccggaagaagaaaagtctacgggctgcccatgttcctgagaatagtgacactgaacaggatgttttgactgttaaacctgtaaggaaagtaaaagctggaaagttaattaaaggggggaaagtaacaacctccacttgggaagacagcaggactggtcgggagcaggagagtgtcagagatgagccagatagtgactcgtctctggaagtcctagaaattcctaatcctcagttagaagtagtagccattgattcttcagaatcaggagaagagaaaccagacagcccatctaaaaaggatatttggaactctacagagcaaaacccactagaaacgtctcgttctgggtgtgatgaagttagctctaccagtgaaattggcactcgctataaagatggcatccctgtaagtgtggcagaaactcagactgtgatctcctccataaaaggatcaaagaattcttcagaaatatcttcagagccaggagatgatgatgaacccacagaaggaagctttgagggacaccaagctgccgtaaatgcaattcagatatttgggaacttgctatatacctgttcagcagataaaactgttcgggtttataatctggtgagtcggaaatgtattggtgtctttgagggtcatacctccaaagttaactgcctcctggttactcagacctccgggaagaatgctgccctttacaccgggtccagtgaccataccatccgctgctataatgttaagagccgagagtgtgtggagcagttacagctggaagaccgggtcctctgcctccacagtagatggcgaatcctctatgcgggactggcaaatggcactgtggtcaccttcaacataaagaacaacaaacgacttgagatctttgaatgccatggccctcgggcagtcagctgtcttgctacagctcaggaaggtgcccgaaaactgctggtcgtggggtcttatgactgcacaattagtgtacgcgatgcccggaatggactgctcctcagaactctggagggccatagcaaaaccattctttgcatgaaggtggtgaatgatctcgtgttcagtggctccagtgatcagtcagtccatgctcacaacattcacactggtgagctcgtgcggatctataaaggtcacaatcatgcagtgactgtggtgaatatcctaggaaaagtgatggtgactgcttgcctggataaatttgttcgtgtctatgaattacagtctcatgatcgattacaagtttatggaggacacaaagacatgattatgtgtatgaccatccataaaagcatgatttacactggctgttatgatggcagtattcaggccgtgaggcttaatctgatgcagaattaccgctgttggtggcatggttgctctctgatatttggcgttgtagatcatttaaaacaacacttgctgaccgaccacactaatcccaacttccagactctgaaatgtcgctggaagaactgcgatgcttttttcactgctaggaaaggatccaaacaggatgctgcaggacatattgaacgacatgctgaagatgacagcaaaattgattcatgaagttttttgcctcccacgttgggaagtcattagttgaactattttcacattggccccccacacaggccactctcttccctttcttggtgaagtaaggaaggagaaagtggttactagccaggcatacccctagcataagtctgggcagctctatgggatgataaattacacttttaagttcttgctggaggttttaaatagatttagacaaatgttaaggaaccatacttctctgggacagcatggcatatagtgatatatgctatttgcgttctccagatgtttattgaagatacagatcctaattggttacccagtttgaccctaatcatatgtatattttattgatttcagtttgcaatttttaatttatgttcttatgatggtttaaacctatagtcaggcttttaagtacaagtttgtttaagtgccagactttgaggatcagttttaatttctccatttgtaatagctgggtatttaaactggaagcaaatagttttctttcttaacaattatgtgcagtgtgtgtcactgttttcttgctttatagatagagctggctttaagtgctaaaggacacagtagatttttgacaaacagtggctgctctgctgactatcttttaggaattcaggaagcaaatcacatagtgacaagtccttacagacaccacttctagtaaatctctgtaaatgtggatagaaagctcagtgtgaggcagtgcgtagacctaacgtctacctttacatctgctgttgaacctgggcactacctgttacagatcctgtcaggctgttgaactggaggtgtacctttatcttcctttctagtgtctgaccctgcaagcctaatgttggtttgaacccttttggtttgttcagttgccagcctccatctctcccactgtatggccgtgcctagaccgatggcagccatcgaatattcctctgggctcacggggtgttttccacccccctgcagcaactaagatggtgggggagagggggttagaataaagcatctgaatacagttttcaggacctcaagcagacttcctagagacttgtttctgagacagttctttgccttcacttccctgctagctgggaaagaagagtggagcagagactctgcctggccactgagaacagccaaattcacaaaccctcagtggggctttgtttttggattttctccggactcatcagtaaacctgtagaagtgtcgctttccagccttttgtttctggatcctcaaaactcagaacgtggccgggcgtggtggctcacgcctgtaatcccagcactttgggaggctgaggcaggcagatcacctgaggctaggagttgcagaccagcctggccaacatggcaaaaccccgtctctactaaaaatacaaaaagccgggcgtggtgggcgcctgtaatcccagctgctcaggaggctgaggcaggagaatcgcttgaacccgggaggcagagattgcagtaagctgagatcgtgccactgcactccagcctggtgacagagtgagactccgtctcaaaaaaaaaaaaaaaaactcagcttcttcagagagataaaattgggggaggagcccagggccacataccaagctttgggacatggtgcctcatgctctctgggattgcagaccatccaggtctgtcttcgcccctgttagtgcacatatatccactcacatgtcttccctcaggctatcgggcagggggacttcaccagggggtttatggataggcttcaagagggtctgtgagcccccagaaattgtgtgtgagactgagtatgtgttcttttttccaggaaaggctccagtggttcttacttgatccaaaaaatgtcaagaattaatctaggaggccgggcctggtggctcacacctgtaatcccagctctttgggaggccgaggcgggtggatcactcaaggtcaggcatttgagaccagcctggccaacatagtgaaaccccgtctctattaaaaatacaaaaattagctgggtgtggtggtatgtgcctgtagtctcagctactcaggaggctgagacaggagaatcacttgaaccctggaggtagaagttgcagtgagccaagatcatactactgcactccagcctgggcgacaagagtgaaactccacctcaaaaaaaaaaaaaaaagagttaatctaggagataatgaatggcctagtactagataatatatggccccacaagctcttgacttctgtccttggggaaagccattttgttaaccacactagtgagatttacatgatgcttaatggagaacagagaagatcttgttgcaaaaggtgtattaaatatttgtgctgtttctgtatgagattgagaagcttttcccacctctcacccctatttcctataaggatatccagagaagccaaactgttctgtgggtttgggaatggtcatttcccgggaaaatgcatctggatcgatgactaaacctggcccttttctctgggctgtagtgaagccgcattttcacgctggctggcagtgtgctgagagcctcgaatgctctgcggcgtagtgcccttctgccctgcctgacgatgtatcgaaaagatgagagtgaaggagactttgtgcagcaggaaacgggtaggtgaggtgttgggcagttgtgggaacttctgagagtattacagagtggtagaatcggtaagaactctgatttggacttcgctttggtggaactgtgtgcctatacctgcctgtgtgtgtgcaagtgtgcaggttcctttgtatgtatgtgtacgtgtgggaacctgtgtttgtcatatttttcttcatttcacaaaggctttttttgaagcagtggcagtatgcctttgtttcaagaacacatgaaattcttttaacaccagattagtgtgttaccccaaatgaacggttctagccctctattaagaaataaagggaccataagcattttggctgcttatggctgtgtgttactacttacaagagtcttgaaaattatacagaactttgccttctttttttaatgtcttccacaatgttgtgactgattataaccctgtttcccctcagagaagagctatggctcagggatctgtgttgactctggcatttagtggctttgtgaaggaaagaaaccattaaatgacctgacaaaaactgactcatgtctttaaagtagttgaagccacttttagaatgttactctcggttgcttttgtctaattctaatggcttaaagccaagaaaaccatagtataaatctttttgtgtacctatgctagtgtttaaatggcagttcgttgtgataaagtatcagtcacttcaagttttctgtgaaagtttttaattaggttaaaaataattttggcatacgtctctactcagtttataaagcagttccacaccatgcaaacaaaactctaacagcaaaggttatcttgacctgatgttacttgaatctgagagaaagtcattacttactactgcactcctgcttttgtgggaaaaattttcttcttccccagaagagttaacagttgagtgttcagctcctgacttacctttaatttagaggcaatattattactgtttaagtgattatttgcttaacacaggttttattttgtctttttgctggtagattatacaagggacaactttagtgatgaggcatgtggatgatttggtgggagtaggtatatacttagtggaatggtttattttatggaagagaattcattggaggtgagattgaagtatattgtgaagtgggatttgaacagcacatatgctctggtttgctcaaataactgcagtttatgcttacatctaaattttgtttctgttacctaaacgggagcttctagaattacgaaggccatacctgccacatttataaaataatggttttatccctgcccccaaatcatcaggttcctcgggtttaagagaagtggtctaatagacaggaatagaagttgtggtggaggtgatttgggatagactaggtttccttatgcaagtggatatgagctcctcatagaaaccagacctactgtattagacagtaacctctaacctcacctccaagcccaagtatatggccctgctgggttacctggtgactacatttcccagattcactctaaattcaaggtagtgacccaaataaattgggaaaggagggggtcaaggaggaaaagctgttgaaaatctttctcctatttaagagaaatatatgccctagagctgctccagcacccttggtttctgatttttttaatattgaatatggattagaagaatgaaatcagatgacacctgactgcaaaaatgtttataagcaaatagccttcttacattttggtataaagctgtgaacttcgtaactttgtaaagcaagatataaagcaaatacaagaggaaaataaagtacttttactaattgacggtttactttcgttaccttgtctgcatattcacggccagccctttccacgttggcttagcgaggaagaaggaaactgggtggaaaacacaggatgcctatagatatgccgcaggccatggtccagagaagtttagcaaacaaacagctgcgttcagggttttgtccacggtcatgcgacaggtcagttagtgagcagaggagctaggatagctcaatctccactccattattcaggtaaccggcccctcccgttgtacatgacccatttattcttgatgtcttttacagcaacaactattcctctgccttccttttatgtcttggaaagtatctgagccattcttatgctcaagaaatagcaataggcatgattacaaaattcaagattttgtt

SEQ ID NO: 441325 - DNA, 5517 bp, Homo sapiens
aggtgtggtggctcacgcctgtaatgggaggctgaggcaggcagatcacctgaggttaggagttcaagaccatcctggccaacatggtgaaaccctgtctttacaaaaatacaaaaattagccaggtgtgatggcgggcgcctgtaatcccagctactcaggaggctgcggcaggagactcacttgaacccaggaagcggaggttggagtgagctgagatggcgccattgcactccagcctgggcgacagagcgagactccgtctcaaaaaaaaaaagtggagaatttgagacttactgaaattacctaggaagaacaacaaacgacttgagatctttgaatgccatggccctcgggcagtcagctgtcttgctacagctcaggaaggtgcccgaaaactgctggtcgtggggtcttatgactgcacaattagtgtacgcgatgcccggaatggactgctcctcagaactctggagggccatagcaaaaccattctttgcatgaaggtggtgaatgatctcgtgttcagtggctccagtgatcagtcagtccatgctcacaacattcacactggtgagctcgtgcggatctataaaggtcacaatcatgcagtgactgtggtgaatatcctaggaaaagtgatggtgactgcttgcctggataaatttgttcgtgtctatgaattacagtctcatgatcgattacaagtttatggaggacacaaagacatgattatgtgtatgaccatccataaaagcatgatttacactggctgttatgatggcagtattcaggccgtgaggcttaatctgatgcagaattaccgctgttggtggcatggttgctctctgatatttggcgttgtagatcatttaaaacaacacttgctgaccgaccacactaatcccaacttccagactctgaaatgtcgctggaagaactgcgatgcttttttcactgctaggaaaggatccaaacaggatgctgcaggacatattgaacgacatgctgaagatgacagcaaaattgattcatgaagttttttgcctcccacgttgggaagtcattagttgaactattttcacattggccccccacacaggccactctcttccctttcttggtgaagtaaggaaggagaaagtggttactagccaggcatacccctagcataagtctgggcagctctatgggatgataaattacacttttaagttcttgctggaggttttaaatagatttagacaaatgttaaggaaccatacttctctgggacagcatggcatatagtgatatatgctatttgcgttctccagatgtttattgaagatacagatcctaattggttacccagtttgaccctaatcatatgtatattttattgatttcagtttgcaatttttaatttatgttcttatgatggtttaaacctatagtcaggcttttaagtacaagtttgtttaagtgccagactttgaggatcagttttaatttctccatttgtaatagctgggtatttaaactggaagcaaatagttttctttcttaacaattatgtgcagtgtgtgtcactgttttcttgctttatagatagagctggctttaagtgctaaaggacacagtagatttttgacaaacagtggctgctctgctgactatcttttaggaattcaggaagcaaatcacatagtgacaagtccttacagacaccacttctagtaaatctctgtaaatgtggatagaaagctcagtgtgaggcagtgcgtagacctaacgtctacctttacatctgctgttgaacctgggcactacctgttacagatcctgtcaggctgttgaactggaggtgtacctttatcttcctttctagtgtctgaccctgcaagcctaatgttggtttgaacccttttggtttgttcagttgccagcctccatctctcccactgtatggccgtgcctagaccgatggcagccatcgaatattcctctgggctcacggggtgttttccacccccctgcagcaactaagatggtgggggagagggggttagaataaagcatctgaatacagttttcaggacctcaagcagacttcctagagacttgtttctgagacagttctttgccttcacttccctgctagctgggaaagaagagtggagcagagactctgcctggccactgagaacagccaaattcacaaaccctcagtggggctttgtttttggattttctccggactcatcagtaaacctgtagaagtgtcgctttccagccttttgtttctggatcctcaaaactcagaacgtggccgggcgtggtggctcacgcctgtaatcccagcactttgggaggctgaggcaggcagatcacctgaggctaggagttgcagaccagcctggccaacatggcaaaaccccgtctctactaaaaatacaaaaagccgggcgtggtgggcgcctgtaatcccagctgctcaggaggctgaggcaggagaatcgcttgaacccgggaggcagagattgcagtaagctgagatcgtgccactgcactccagcctggtgacagagtgagactccgtctcaaaaaaaaaaaaaaaaactcagcttcttcagagagataaaattgggggaggagcccagggccacataccaagctttgggacatggtgcctcatgctctctgggattgcagaccatccaggtctgtcttcgcccctgttagtgcacatatatccactcacatgtcttccctcaggctatcgggcagggggacttcaccagggggtttatggataggcttcaagagggtctgtgagcccccagaaattgtgtgtgagactgagtatgtgttcttttttccaggaaaggctccagtggttcttacttgatccaaaaaatgtcaagaattaatctaggaggccgggcctggtggctcacacctgtaatcccagctctttgggaggccgaggcgggtggatcactcaaggtcaggcatttgagaccagcctggccaacatagtgaaaccccgtctctattaaaaatacaaaaattagctgggtgtggtggtatgtgcctgtagtctcagctactcaggaggctgagacaggagaatcacttgaaccctggaggtagaagttgcagtgagccaagatcatactactgcactccagcctgggcgacaagagtgaaactccacctcaaaaaaaaaaaaaaaagagttaatctaggagataatgaatggcctagtactagataatatatggccccacaagctcttgacttctgtccttggggaaagccattttgttaaccacactagtgagatttacatgatgcttaatggagaacagagaagatcttgttgcaaaaggtgtattaaatatttgtgctgtttctgtatgagattgagaagcttttcccacctctcacccctatttcctataaggatatccagagaagccaaactgttctgtgggtttgggaatggtcatttcccgggaaaatgcatctggatcgatgactaaacctggcccttttctctgggctgtagtgaagccgcattttcacgctggctggcagtgtgctgagagcctcgaatgctctgcggcgtagtgcccttctgccctgcctgacgatgtatcgaaaagatgagagtgaaggagactttgtgcagcaggaaacgggtaggtgaggtgttgggcagttgtgggaacttctgagagtattacagagtggtagaatcggtaagaactctgatttggacttcgctttggtggaactgtgtgcctatacctgcctgtgtgtgtgcaagtgtgcaggttcctttgtatgtatgtgtacgtgtgggaacctgtgtttgtcatatttttcttcatttcacaaaggctttttttgaagcagtggcagtatgcctttgtttcaagaacacatgaaattcttttaacaccagattagtgtgttaccccaaatgaacggttctagccctctattaagaaataaagggaccataagcattttggctgcttatggctgtgtgttactacttacaagagtcttgaaaattatacagaactttgccttctttttttaatgtcttccacaatgttgtgactgattataaccctgtttcccctcagagaagagctatggctcagggatctgtgttgactctggcatttagtggctttgtgaaggaaagaaaccattaaatgacctgacaaaaactgactcatgtctttaaagtagttgaagccacttttagaatgttactctcggttgcttttgtctaattctaatggcttaaagccaagaaaaccatagtataaatctttttgtgtacctatgctagtgtttaaatggcagttcgttgtgataaagtatcagtcacttcaagttttctgtgaaagtttttaattaggttaaaaataattttggcatacgtctctactcagtttataaagcagttccacaccatgcaaacaaaactctaacagcaaaggttatcttgacctgatgttacttgaatctgagagaaagtcattacttactactgcactcctgcttttgtgggaaaaattttcttcttccccagaagagttaacagttgagtgttcagctcctgacttacctttaatttagaggcaatattattactgtttaagtgattatttgcttaacacaggttttattttgtctttttgctggtagattatacaagggacaactttagtgatgaggcatgtggatgatttggtgggagtaggtatatacttagtggaatggtttattttatggaagagaattcattggaggtgagattgaagtatattgtgaagtgggatttgaacagcacatatgctctggtttgctcaaataactgcagtttatgcttacatctaaattttgtttctgttacctaaacgggagcttctagaattacgaaggccatacctgccacatttataaaataatggttttatccctgcccccaaatcatcaggttcctcgggtttaagagaagtggtctaatagacaggaatagaagttgtggtggaggtgatttgggatagactaggtttccttatgcaagtggatatgagctcctcatagaaaccagacctactgtattagacagtaacctctaacctcacctccaagcccaagtatatggccctgctgggttacctggtgactacatttcccagattcactctaaattcaaggtagtgacccaaataaattgggaaaggagggggtcaaggaggaaaagctgttgaaaatctttctcctatttaagagaaatatatgccctagagctgctccagcacccttggtttctgatttttttaatattgaatatggattagaagaatgaaatcagatgacacctgactgcaaaaatgtttataagcaaatagccttcttacattttggtataaagctgtgaacttcgtaactttgtaaagcaagatataaagcaaatacaagaggaaaataaagtacttttactaattg

SEQ ID NO: 441326 - DNA, 8636 bp, Homo sapiens
acgcgggggagtgcagctggcaccatgggtgtgctccagagcaacttctgcttgctctgagccccctgccctgcctcccctttcaccatgtttcctctgacaagattttaagtacagcaattcaagaagatttctcctcctaaacgacatttatctgaagtctattgcctcttgattgctggaaaagaatcttaaaatcatttcaaaagtaacttataaacaaacttattaaaagtgatgaaaggagcattgaaattaattagcactaatttttcactgtgccaaagtgtgcagtgtccttcagaggaaacaataacagatctggtgagtgtgccatgccagtggggagaattgaatgtccctcatctccctctttccctagggacattagtcatgagtgccgagtgtgcggggtcacagaagtgggtctttctgcatatgcaaagcacatttctggccagttgcacaaagataacgttgatgcccaggaaagagaagatgatggaaaaggagaggaagaggaagaagattattttgacaaggaactcattcagttaataaaacaaaggaaagaacaaagtcgacaagatgaaccttccaatagcaaccaagaaataaactctgatgacagacgaccccaatggagacgagaagaccgaattccttaccaagacagagagagttacagtcagcctgcatggcatcatcgtggacctccacagcgggattggaaatgggaaaaagatggctttaataatactaggaaaaacagctttccacattctttgaggaatggtggtggaccaagaggacgttccgggtggcataagggtgttgcaggaggctcctcgacttggtttcacaaccatagtaattctggaggtggttggctttcaaatagtggagcagtagattggaatcataatggtacaggaaggaattccagttggctttctgaaggaacaggtggcttttccagttggcatatgaacaacagtaacggaaactggaaatccagtgtacgtagtacaaataattggaattacagtggccctggagacaaatttcaaccaggcagaaacagaaattctaactgtcaaatggaagacatgactatgctatggaacaagaaatctaataagtcaaacaaatacagtcacgacagatataattggcagcggcaagaaaatgacaaacttggtacagttgccacatatagaggtccttctgaaggatttacaagtgataaatttccttcagaaggcttactcgacttcaattttgagcagctggaaagccaaaccactaaacaagcagacactgctacttccaaagttagtggaaagaatggcagtgcggcaagggaaaagcctcgtcgctggacgccttacccttctcagaagactctggatttacagtcgggattgaaagacatcactggtaacaagtcagaaatgatagagaaacctctctttgattttagcttgataactacaggaatacaggagccccaaactgatgaaacacgtaattccccaacacagaaaacacaaaaagaaatacatactggatctcttaatcacaaggcctcttctgattccgctgcttccttcgaggtggtgagacagtgccccactgcagaaaaacctgaacaagagcatacaccaaataaaatgccatcattgaaatccccactccttccatgtccagccactaaatcattgtctcaaaagcaagatccaaagaatatctcaaaaaacaccaaaacaaattttttttcccctggagaacactcaaatccctcgaacaagcccactgtggaagataaccatggtccttacatatccaaactgcgtagttcatgtcctcatgttttaaaagggaataaaagtacatttggctctcaaaagcaatctggtgataatttaaatgatactttacgaaaggccaaagaggtgctacagtgtcatgagtcattgcaaaatccacttcttagcacttctaaaagtaccaggaactatgcaaaagcaagtagaaatgtagaagaatctgaaaaagggtctttgaaaattgagtttcaagtgcacgcactagaagatgaaagtgatggagagacatctgacacggaaaagcatggaacaaaaattggaaccctaggttctgcaactacagaattgttatctggcagcactcgaactgctgatgagaaagaggaggatgaccgcatcctgaagacttctagagagctatccacttccccatgtaatcccatagttcgccagaaagaatctgaattacaaatgacatctgcagccagtccacaccctggcttattgctagacttgaaaacctctctagaagatgcacaggttgatgactctattaaatctcatgtatcttatgaaacagaaggctttgagagtgctagcttggatgcagagcttcaaaaaagtgacatcagtcagccctcgggccctctcctgcctgaactaagtaagcttggctttcctgcctcacttcagagggatctaacccggcacattagtttgaagagcaaaactggagtacaccttcctgagccaaacctcaatagtgcccgccgcattcgcaatattagcggtcaccgaaagagtgagacagagaaggagtctgggctcaagccaaccctacggcagattctaaatgcatctcggagaaatgtcaactgggaacaggtcattcagcaagtaaccaagaaaaagcaagagctgggcaaaggcttacccaggtttggcatagaaatggtaccccttgttcaaaatgaacaagaagccttagatttggatggggaacctgatctgtccagtctagaaggattccagtgggaaggtgtttccatttcctcgtcccctggcttggcaagaaagcgaagcctttctgagagcagcgtgatcatggacagagctccttctgtgtatagcttcttcagtgaggaaggtacaggcaaagaaaatgagccccagcagatggtttcacctagtaactcattgagggctggacagagccagaaagcaaccatgcacctcaaacaagaagtgacacctcgggctgcctccctccgaacaggtgaaagggctgaaaatgttgctacccaaaggcgacatagtgcacaattatcctctgaccatataatacctttgatgcatttggcaaaagacttgaacagccaggagaggtctataccaccgtcagagaatcagaattcccaggagagtaatggagagggaaactgtctgtcatcaagcgcatcctcagcccttgcgatctccagtttagcggatgcagccacagatagtagctgtacctctggtgctgaacaaaatgatggccaaagtattagaaagaaacgaagagccactggagatggatcttctcctgaactcccaagtcttgagagaaaaaataaaagaaggaaaattaaaggaaaaaaagaacgttctcaggttgaccagctgctgaatatttctttaagggaggaagaacttagtaagtcattgcagtgcatggataacaatcttctgcaagcccgtgcagcccttcagacagcttatgtggaagttcagaggctacttatgctcaagcagcagataactatggagatgagtgcactgaggacccatagaatacagattctacagggattacaagaaacatatgaaccttctgagcacccagaccaggttccctgtagcctcacacgagaacgaaggaacagtagatctcaaacatccattgatgccgcactgctgcccactccctttttcccactttttctggagcctccatcttcccatgtgtctccatcacccaccggagcctctcttcaaataaccacgtctcctactttccaaacccatggcagtgtccctgctccagactcatcagttcagattaaacaagagcccatgtctcctgaacaagatgagaatgtgaatgctgtgccaccaagctctgcctgcaatgtgtccaaggaattactggaagctaatagagagatcagtgacagttgtccagtttatccagtcatcactgctagattgtccttaccagagtcaacagaaagtttccatgagcctagccaagaactgaagttttctgtggagcaaagaaataccagaaacagagaaaactctccctcttcccaatcagctggtctttctagcataaataaagaaggggaagagccaaccaaaggcaatagtgggtctgaagcctgtaccagttcttttctaagattgtcttttgcttcagaaacccctttggagaaggaaccccactctccagctgaccagcctgaacaacaggcagaatccactttgacatcagctgagactaggggaagcaagaaaaagaagaaactccggaagaagaaaagtctacgggctgcccatgttcctgagaatagtgacactgaacaggatgttttgactgttaaacctgtaaggaaagtaaaagctggaaagttaattaaaggggggaaagtaacaacctccacttgggaagacagcaggactggtcgggagcaggagagtgtcagagatgagccagatagtgactcgtctctggaagtcctagaaattcctaatcctcagttagaagtagtagccattgattcttcagaatcaggagaagagaaaccagacagcccatctaaaaaggatatttggaactctacagagcaaaacccactagaaacgtctcgttctgggtgtgatgaagttagctctaccagtgaaattggcactcgctataaagatggcatccctgtaagtgtggcagaaactcagactgtgatctcctccataaaaggatcaaagaattcttcagaaatatcttcagagccaggagatgatgatgaacccacagaaggaagctttgagggacaccaagctgccgtaaatgcaattcagatatttgggaacttgctatatacctgttcagcagataaaactgttcgggtttataatctggtgagtcggaaatgtattggtgtctttgagggtcatacctccaaagttaactgcctcctggttactcagacctccgggaagaatgctgccctttacaccgggtccagtgaccataccatccgctgctataatgttaagagccgagagtgtgtggagcagttacagctggaagaccgggtcctctgcctccacagtagatggcgaatcctctatgcgggactggcaaatggcactgtggtcaccttcaacataaagaacaacaaacgacttgagatctttgaatgccatggccctcgggcagtcagctgtcttgctacagctcaggaaggtgcccgaaaactgctggtcgtggggtcttatgactgcacaattagtgtacgcgatgcccggaatggactgctcctcagaactctggagggccatagcaaaaccattctttgcatgaaggtggtgaatgatctcgtgttcagtggctccagtgatcagtcagtccatgctcacaacattcacactggtgagctcgtgcggatctataaaggtcacaatcatgcagtgactgtggtgaatatcctaggaaaagtgatggtgactgcttgcctggataaatttgttcgtgtctatgaattacagtctcatgatcgattacaagtttatggaggacacaaagacatgattatgtgtatgaccatccataaaagcatgatttacactggctgttatgatggcagtattcaggccgtgaggcttaatctgatgcagaattaccgctgttggtggcatggttgctctctgatatttggcgttgtagatcatttaaaacaacacttgctgaccgaccacactaatcccaacttccagactctgaaatgtcgctggaagaactgcgatgcttttttcactgctaggaaaggatccaaacaggatgctgcaggacatattgaacgacatgctgaagatgacagcaaaattgattcatgaagttttttgcctcccacgttgggaagtcattagttgaactattttcacattggccccccacacaggccactctcttccctttcttggtgaagtaaggaaggagaaagtggttactagccaggcatacccctagcataagtctggccaacatagtgaaaccccgtctctattaaaaatacaaaaattagctgggtgtggtggtatgtgcctgtagtctcagctactcaggaggctgagacaggagaatcacttgaaccctggaggtagaagttgcagtgagccaagatcatactactgcactccagcctgggcgacaagagtgaaactccacctcaaaaaaaaaaaaaaaagagttaatctaggagataatgaatggcctagtactagataatatatggccccacaagctcttgacttctgtccttggggaaagccattttgttaaccacactagtgagatttacatgatgcttaatggagaacagagaagatcttgttgcaaaaggtgtattaaatatttgtgctgtttctgtatgagattgagaagcttttcccacctctcacccctatttcctataaggatatccagagaagccaaactgttctgtgggtttgggaatggtcatttcccgggaaaatgcatctggatcgatgactaaacctggcccttttctctgggctgtagtgaagccgcattttcacgctggctggcagtgtgctgagagcctcgaatgctctgcggcgtagtgcccttctgccctgcctgacgatgtatcgaaaagatgagagtgaaggagactttgtgcagcaggaaacgggtaggtgaggtgttgggcagttgtgggaacttctgagagtattacagagtggtagaatcggtaagaactctgatttggacttcgctttggtggaactgtgtgcctatacctgcctgtgtgtgtgcaagtgtgcaggttcctttgtatgtatgtgtacgtgtgggaacctgtgtttgtcatatttttcttcatttcacaaaggctttttttgaagcagtggcagtatgcctttgtttcaagaacacatgaaattcttttaacaccagattagtgtgttaccccaaatgaacggttctagccctctattaagaaataaagggaccataagcattttggctgcttatggctgtgtgttactacttacaagagtcttgaaaattatacagaactttgccttctttttttaatgtcttccacaatgttgtgactgattataaccctgtttcccctcagagaagagctatggctcagggatctgtgttgactctggcatttagtggctttgtgaaggaaagaaaccattaaatgacctgacaaaaactgactcatgtctttaaagtagttgaagccacttttagaatgttactctcggttgcttttgtctaattctaatggcttaaagccaagaaaaccatagtataaatctttttgtgtacctatgctagtgtttaaatggcagttcgttgtgataaagtatcagtcacttcaagttttctgtgaaagtttttaattaggttaaaaataattttggcatacgtctctactcagtttataaagcagttccacaccatgcaaacaaaactctaacagcaaaggttatcttgacctgatgttacttgaatctgagagaaagtcattacttactactgcactcctgcttttgtgggaaaaattttcttcttccccagaagagttaacagttgagtgttcagctcctgacttacctttaatttagaggcaatattattactgtttaagtgattatttgcttaacacaggttttattttgtctttttgctggtagattatacaagggacaactttagtgatgaggcatgtggatgatttggtgggagtaggtatatacttagtggaatggtttattttatggaagagaattcattggaggtgagattgaagtatattgtgaagtgggatttgaacagcacatatgctctggtttgctcaaataactgcagtttatgcttacatctaaattttgtttctgttacctaaacgggagcttctagaattacgaaggccatacctgccacatttataaaataatggttttatccctgcccccaaatcatcaggttcctcgggtttaagagaagtggtctaatagacaggaatagaagttgtggtggaggtgatttgggatagactaggtttccttatgcaagtggatatgagctcctcatagaaaccagacctactgtattagacagtaacctctaacctcacctccaagcccaagtatatggccctgctgggttacctggtgactacatttcccagattcactctaaattcaaggtagtgacccaaataaattgggaaaggagggggtcaaggaggaaaagctgttgaaaatctttctcctatttaagagaaatatatgccctagagctgctccagcacccttggtttctgatttttttaatattgaatatggattagaagaatgaaatcagatgacacctgactgcaaaaatgtttataagcaaatagccttcttacattttggtataaagctgtgaacttcgtaactttgtaaagcaagatataaagcaaatacaagaggaaaataaagtacttttactaattg

SEQ ID NO: 441327 - DNA, 7128 bp, Homo sapiens
acgcgggggagtgcagctggcaccatgggtgtgctccagagcaacttctgcttgctctgagccccctgccctgcctcccctttcaccatgtttcctctgacaagattttaagtacagcaattcaagaagatttctcctcctaaacgacatttatctgaagtctattgcctcttgattgctggaaaagaatcttaaaatcatttcaaaagtaacttataaacaaacttattaaaagtgatgaaaggagcattgaaattaattagcactaatttttcactgtgccaaagtgtgcagtgtccttcagaggaaacaataacagatctggtgagtgtgccatgccagtggggagaattgaatgtccctcatctccctctttccctagggacattagtcatgagtgccgagtgtgcggggtcacagaagtgggtctttctgcatatgcaaagcacatttctggccagttgcacaaagataacgttgatgcccaggaaagagaagatgatggaaaaggagaggaagaggaagaagattattttgacaaggaactcattcagttaataaaacaaaggaaagaacaaagtcgacaagatgaaccttccaatagcaaccaagaaataaactctgatgacagacgaccccaatggagacgagaagaccgaattccttaccaagacagagagagttacagtcagcctgcatggcatcatcgtggacctccacagcgggattggaaatgggaaaaagatggctttaataatactaggaaaaacagctttccacattctttgaggaatggtggtggaccaagaggacgttccgggtggcataagggtgttgcaggaggctcctcgacttggtttcacaaccatagtaattctggaggtggttggctttcaaatagtggagcagtagattggaatcataatggtacaggaaggaattccagttggctttctgaaggaacaggtggcttttccagttggcatatgaacaacagtaacggaaactggaaatccagtgtacgtagtacaaataattggaattacagtggccctggagacaaatttcaaccaggcagaaacagaaattctaactgtcaaatggaagacatgactatgctatggaacaagaaatctaataagtcaaacaaatacagtcacgacagatataattggcagcggcaagaaaatgacaaacttggtacagttgccacatatagaggtccttctgaaggatttacaagtgataaatttccttcagaaggcttactcgacttcaattttgagcagctggaaagccaaaccactaaacaagcagacactgctacttccaaagttagtggaaagaatggcagtgcggcaagggaaaagcctcgtcgctggacgccttacccttctcagaagactctggatttacagtcgggattgaaagacatcactggtaacaagtcagaaatgatagagaaacctctctttgattttagcttgataactacaggaatacaggagccccaaactgatgaaacacgtaattccccaacacagaaaacacaaaaagaaatacatactggatctcttaatcacaaggcctcttctgattccgctgcttccttcgaggtggtgagacagtgccccactgcagaaaaacctgaacaagagcatacaccaaataaaatgccatcattgaaatccccactccttccatgtccagccactaaatcattgtctcaaaagcaagatccaaagaatatctcaaaaaacaccaaaacaaattttttttcccctggagaacactcaaatccctcgaacaagcccactgtggaagataaccatggtccttacatatccaaactgcgtagttcatgtcctcatgttttaaaagggaataaaagtacatttggctctcaaaagcaatctggtgataatttaaatgatactttacgaaaggccaaagaggtgctacagtgtcatgagtcattgcaaaatccacttcttagcacttctaaaagtaccaggaactatgcaaaagcaagtagaaatgtagaagaatctgaaaaagggtctttgaaaattgagtttcaagtgcacgcactagaagatgaaagtgatggagagacatctgacacggaaaagcatggaacaaaaattggaaccctaggttctgcaactacagaattgttatctggcagcactcgaactgctgatgagaaagaggaggatgaccgcatcctgaagacttctagagagctatccacttccccatgtaatcccatagttcgccagaaagaatctgaattacaaatgacatctgcagccagtccacaccctggcttattgctagacttgaaaacctctctagaagatgcacaggttgatgactctattaaatctcatgtatcttatgaaacagaaggctttgagagtgctagcttggatgcagagcttcaaaaaagtgacatcagtcagccctcgggccctctcctgcctgaactaagtaagcttggctttcctgcctcacttcagagggatctaacccggcacattagtttgaagagcaaaactggagtacaccttcctgagccaaacctcaatagtgcccgccgcattcgcaatattagcggtcaccgaaagagtgagacagagaaggagtctgggctcaagccaaccctacggcagattctaaatgcatctcggagaaatgtcaactgggaacaggtcattcagcaagtaaccaagaaaaagcaagagctgggcaaaggcttacccaggtttggcatagaaatggtaccccttgttcaaaatgaacaagaagccttagatttggatggggaacctgatctgtccagtctagaaggattccagtgggaaggtgtttccatttcctcgtcccctggcttggcaagaaagcgaagcctttctgagagcagcgtgatcatggacagagctccttctgtgtatagcttcttcagtgaggaaggtacaggcaaagaaaatgagccccagcagatggtttcacctagtaactcattgagggctggacagagccagaaagcaaccatgcacctcaaacaagaagtgacacctcgggctgcctccctccgaacaggtgaaagggctgaaaatgttgctacccaaaggcgacatagtgcacaattatcctctgaccatataatacctttgatgcatttggcaaaagacttgaacagccaggagaggtctataccaccgtcagagaatcagaattcccaggagagtaatggagagggaaactgtctgtcatcaagcgcatcctcagcccttgcgatctccagtttagcggatgcagccacagatagtagctgtacctctggtgctgaacaaaatgatggccaaagtattagaaagaaacgaagagccactggagatggatcttctcctgaactcccaagtcttgagagaaaaaataaaagaaggaaaattaaaggaaaaaaagaacgttctcaggttgaccagctgctgaatatttctttaagggaggaagaacttagtaagtcattgcagtgcatggataacaatcttctgcaagcccgtgcagcccttcagacagcttatgtggaagttcagaggctacttatgctcaagcagcagataactatggagatgagtgcactgaggacccatagaatacagattctacagggattacaagaaacatatgaaccttctgagcacccagaccaggttccctgtagcctcacacgagaacgaaggaacagtagatctcaaacatccattgatgccgcactgctgcccactccctttttcccactttttctggagcctccatcttcccatgtgtctccatcacccaccggagcctctcttcaaataaccacgtctcctactttccaaacccatggcagtgtccctgctccagactcatcagttcagattaaacaagagcccatgtctcctgaacaagatgagaatgtgaatgctgtgccaccaagctctgcctgcaatgtgtccaaggaattactggaagctaatagagagatcagtgacagttgtccagtttatccagtcatcactgctagattgtccttaccagagtcaacagaaagtttccatgagcctagccaagaactgaagttttctgtggagcaaagaaataccagaaacagagaaaactctccctcttcccaatcagctggtctttctagcataaataaagaaggggaagagccaaccaaaggcaatagtgggtctgaagcctgtaccagttcttttctaagattgtcttttgcttcagaaacccctttggagaaggaaccccactctccagctgaccagcctgaacaacaggcagaatccactttgacatcagctgagactaggggaagcaagaaaaagaagaaactccggaagaagaaaagtctacgggctgcccatgttcctgagaatagtgacactgaacaggatgttttgactgttaaacctgtaaggaaagtaaaagctggaaagttaattaaaggggggaaagtaacaacctccacttgggaagacagcaggactggtcgggagcaggagagtgtcagagatgagccagatagtgactcgtctctggaagtcctagaaattcctaatcctcagttagaagtagtagccattgattcttcagaatcaggagaagagaaaccagacagcccatctaaaaaggatatttggaactctacagagcaaaacccactagaaacgtctcgttctgggtgtgatgaagttagctctaccagtgaaattggcactcgctataaagatggcatccctgtaagtgtggcagaaactcagactgtgatctcctccataaaaggatcaaagaattcttcagaaatatcttcagagccaggagatgatgatgaacccacagaaggaagctttgagggacaccaagctgccgtaaatgcaattcagatatttgggaacttgctatatacctgttcagcagataaaactgttcgggtttataatctggtgagtcggaaatgtattggtgtctttgagggtcatacctccaaagttaactgcctcctggttactcagacctccgggaagaatgctgccctttacaccgggtccagtgaccataccatccgctgctataatgttaagagccgagagtgtgtggagcagttacagctggaagaccgggtcctctgcctccacagtagatggcgaatcctctatgcgggactggcaaatggcactgtggtcaccttcaacataaagaacaacaaacgacttgagatctttgaatgccatggccctcgggcagtcagctgtcttgctacagctcaggaaggtgcccgaaaactgctggtcgtggggtcttatgactgcacaattagtgtacgcgatgcccggaatggactgctcctcagaactctggagggccatagcaaaaccattctttgcatgaaggtggtgaatgatctcgtgttcagtggctccagtgatcagtcagtccatgctcacaacattcacactggtgagctcgtgcggatctataaaggtcacaatcatgcagtgactgtggtgaatatcctaggaaaagtgatggtgactgcttgcctggataaatttgttcgtgtctatgaattacagtctcatgatcgattacaagtttatggaggacacaaagacatgattatgtgtatgaccatccataaaagcatgatttacactggctgttatgatggcagtattcaggccgtgaggcttaatctgatgcagaattaccgctgttggtggcatggttgctctctgatatttggcgttgtagatcatttaaaacaacacttgctgaccgaccacactaatcccaacttccagactctgaaatgtcgctggaagaactgcgatgcttttttcactgctaggaaaggatccaaacaggatgctgcaggacatattgaacgacatgctgaagatgacagcaaaattgattcatgaagttttttgcctcccacgttgggaagtcattagttgaactattttcacattggccccccacacaggccactctcttccctttcttggtgaagtaaggaaggagaaagtggttactagccaggcatacccctagcataagtctgggcagctctatgggatgataaattacacttttaagttcttgctggaggttttaaatagatttagacaaatgttaaggaaccatacttctctgggacagcatggcatatagtgatatatgctatttgcgttctccagatgtttattgaagatacagatcctaattggttacccagtttgaccctaatcatatgtatattttattgatttcagtttgcaatttttaatttatgttcttatgatggtttaaacctatagtcaggcttttaagtacaagtttgtttaagtgccagactttgaggatcagttttaatttctccatttgtaatagctgggtatttaaactggaagcaaatagttttctttcttaacaattatgtgcagtgtgtgtcactgttttcttgctttatagatagagctggctttaagtgctaaaggacacagtagatttttgacaaacagtggctgctctgctgactatcttttaggaattcaggaagcaaatcacatagtgacaagtccttacagacaccacttctagtaaatctctgtaaatgtggatagaaagctcagtgtgaggcagtgcgtagacctaacgtctacctttacatctgctgttgaacctgggcactacctgttacagatcctgtcaggctgttgaactggaggtgtacctttatcttcctttctagtgtctgaccctgcaagcctaatgttggtttgaacccttttggtttgttcagttgccagcctccatctctcccactgtatggccgtgcctagaccgatggcagccatcgaatattcctctgggctcacggggtgttttccacccccctgcagcaactaagatggtgggggagagggggttagaataaaatcattttgtattacgttcttatttattattaacttcttttgagttttttatactcattcttttttggggggatcttggatacctcaaatgttctctttttatgggggttgtatctacatt

SEQ ID NO: 441328 - DNA, 4642 bp, Homo sapiens
  misc_feature (4579)..(4579): n is a, c, g, or t
acgcgggggagtgcagctggcaccatgggtgtgctccagagcaacttctgcttgctctgagccccctgccctgcctcccctttcaccatgtttcctctgacaagattttaagtacagcaattcaagaagatttctcctcctaaacgacatttatctgaagtctattgcctcttgattgctggaaaagaatcttaaaatcatttcaaaagtaacttataaacaaacttattaaaagtgatgaaaggagcattgaaattaattagcactaatttttcactgtgccaaagtgtgcagtgtccttcagaggaaacaataacagatctggtgagtgtgccatgccagtggggagaattgaatgtccctcatctccctctttccctagggacattagtcatgagtgccgagtgtgcggggtcacagaagtgggtctttctgcatatgcaaagcacatttctggccagttgcacaaagataacgttgatgcccaggaaagagaagatgatggaaaaggagaggaagaggaagaagattattttgacaaggaactcattcagttaataaaacaaaggaaagaacaaagtcgacaagatgaaccttccaatagcaaccaagaaataaactctgatgacagacgaccccaatggagacgagaagaccgaattccttaccaagacagagagagttacagtcagcctgcatggcatcatcgtggacctccacagcgggattggaaatgggaaaaagatggctttaataatactaggaaaaacagctttccacattctttgaggaatggtggtggaccaagaggacgttccgggtggcataagggtgttgcaggaggctcctcgacttggtttcacaaccatagtaattctggaggtggttggctttcaaatagtggagcagtagattggaatcataatggtacaggaaggaattccagttggctttctgaaggaacaggtggcttttccagttggcatatgaacaacagtaacggaaactggaaatccagtgtacgtagtacaaataattggaattacagtggccctggagacaaatttcaaccaggcagaaacagaaattctaactgtcaaatggaagacatgactatgctatggaacaagaaatctaataagtcaaacaaatacagtcacgacagatataattggcagcggcaagaaaatgacaaacttggtacagttgccacatatagaggtccttctgaaggatttacaagtgataaatttccttcagaaggcttactcgacttcaattttgagcagctggaaagccaaaccactaaacaagcagacactgctacttccaaagttagtggaaagaatggcagtgcggcaagggaaaagcctcgtcgctggacgccttacccttctcagaagactctggatttacagtcgggattgaaagacatcactggtaacaagtcagaaatgatagagaaacctctctttgattttagcttgataactacaggaatacaggagccccaaactgatgaaacacgtaattccccaacacagaaaacacaaaaagaaatacatactggatctcttaatcacaaggcctcttctgattccgctgcttccttcgaggtggtgagacagtgccccactgcagaaaaacctgaacaagagcatacaccaaataaaatgccatcattgaaatccccactccttccatgtccagccactaaatcattgtctcaaaagcaagatccaaagaatatctcaaaaaacaccaaaacaaattttttttcccctggagaacactcaaatccctcgaacaagcccactgtggaagataaccatggtccttacatatccaaactgcgtagttcatgtcctcatgttttaaaagggaataaaagtacatttggctctcaaaagcaatctggtgataatttaaatgatactttacgaaaggccaaagaggtgctacagtgtcatgagtcattgcaaaatccacttcttagcacttctaaaagtaccaggaactatgcaaaagcaagtagaaatgtagaagaatctgaaaaagggtctttgaaaattgagtttcaagtgcacgcactagaagatgaaagtgatggagagacatctgacacggaaaagcatggaacaaaaattggaaccctaggttctgcaactacagaattgttatctggcagcactcgaactgctgatgagaaagaggaggatgaccgcatcctgaagacttctagagagctatccacttccccatgtaatcccatagttcgccagaaagaatctgaattacaaatgacatctgcagccagtccacaccctggcttattgctagacttgaaaacctctctagaagatgcacaggttgatgactctattaaatctcatgtatcttatgaaacagaaggctttgagagtgctagcttggatgcagagcttcaaaaaagtgacatcagtcagccctcgggccctctcctgcctgaactaagtaagcttggctttcctgcctcacttcagagggatctaacccggcacattagtttgaagagcaaaactggagtacaccttcctgagccaaacctcaatagtgcccgccgcattcgcaatattagcggtcaccgaaagagtgagacagagaaggagtctgggctcaagccaaccctacggcagattctaaatgcatctcggagaaatgtcaactgggaacaggtcattcagcaagtaaccaagaaaaagcaagagctgggcaaaggcttacccaggtttggcatagaaatggtaccccttgttcaaaatgaacaagaagccttagatttggatggggaacctgatctgtccagtctagaaggattccagtgggaaggtgtttccatttcctcgtcccctggcttggcaagaaagcgaagcctttctgagagcagcgtgatcatggacagagctccttctgtgtatagcttcttcagtgaggaaggtacaggcaaagaaaatgagccccagcagatggtttcacctagtaactcattgagggctggacagagccagaaagcaaccatgcacctcaaacaagaagtgacacctcgggctgcctccctccgaacaggtgaaagggctgaaaatgttgctacccaaaggcgacatagtgcacaattatcctctgaccatataatacctttgatgcatttggcaaaagacttgaacagccaggagaggtctataccaccgtcagagaatcagaattcccaggagagtaatggagagggaaactgtctgtcatcaagcgcatcctcagcccttgcgatctccagtttagcggatgcagccacagatagtagctgtacctctggtgctgaacaaaatgatggccaaagtattagaaagaaacgaagagccactggagatggatcttctcctgaactcccaagtcttgagagaaaaaataaaagaaggaaaattaaaggaaaaaaagaacgttctcaggttgaccagctgctgaatatttctttaagggaggaagaacttagtaagtcattgcagtgcatggataacaatcttctgcaagcccgtgcagcccttcagacagcttatgtggaagttcagaggctacttatgctcaagcagcagataactatggagatgagtgcactgaggacccatagaatacagattctacagggattacaagaaacatatgaaccttctgagcacccagaccaggttccctgtagcctcacacgagaacgaaggaacagtagatctcaaacatccattgatgccgcactgctgcccactccctttttcccactttttctggagcctccatcttcccatgtgtctccatcacccaccggagcctctcttcaaataaccacgtctcctactttccaaacccatggcagtgtccctgctccagactcatcagttcagattaaacaagagcccatgtctcctgaacaagatgagaatgtgaatgctgtgccaccaagctctgcctgcaatgtgtccaaggaattactggaagctaatagagagatcagtgacagttgtccagtttatccagtcatcactgctagattgtccttaccagagtcaacagaaagtttccatgagcctagccaagaactgaagttttctgtggagcaaagaaataccagaaacagagaaaactctccctcttcccaatcagctggtctttctagcataaataaagaaggggaagagccaaccaaaggcaatagtgggtctgaagcctgtaccagttcttttctaagattgtcttttgcttcagaaacccctttggagaaggaaccccactctccagctgaccagcctgaacaacaggcagaatccactttgacatcagctgagactaggggaagcaagaaaaagaagaaactccggaagaagaaaagtctacgggctgcccatgttcctgagaatagtgacactgaacaggatgttttgactgttaaacctgtaaggaaagtaaaagctggaaagttaattaaaggggggaaagtaacaacctccacttgggaagagtgcgagctttaaagctcgcactcttccctcccagntttttcatctgcactgccaaggactgagtgggttggagtggcaagcattgtgggtgttgggca

SEQ ID NO: 441329 - DNA, 3832 bp, Homo sapiens
acgcgggggagtgcagctggcaccatgggtgtgctccagagcaacttctgcttgctctgagccccctgccctgcctcccctttcaccatgtttcctctgacaagattttaagtacagcaattcaagaagatttctcctcctaaacgacatttatctgaagtctattgcctcttgattgctggaaaagaatcttaaaatcatttcaaaagtaacttataaacaaacttattaaaagtgatgaaaggagcattgaaattaattagcactaatttttcactgtgccaaagtgtgcagtgtccttcagaggaaacaataacagatctggtgagtgtgccatgccagtggggagaattgaatgtccctcatctccctctttccctagggacattagtcatgagtgccgagtgtgcggggtcacagaagtgggtctttctgcatatgcaaagcacatttctggccagttgcacaaagataacgttgatgcccaggaaagagaagatgatggaaaaggagaggaagaggaagaagattattttgacaaggaactcattcagttaataaaacaaaggaaagaacaaagtcgacaagatgaaccttccaatagcaaccaagaaataaactctgatgacagacgaccccaatggagacgagaagaccgaattccttaccaagacagagagagttacagtcagcctgcatggcatcatcgtggacctccacagcgggattggaaatgggaaaaagatggctttaataatactaggaaaaacagctttccacattctttgaggaatggtggtggaccaagaggacgttccgggtggcataagggtgttgcaggaggctcctcgacttggtttcacaaccatagtaattctggaggtggttggctttcaaatagtggagcagtagattggaatcataatggtacaggaaggaattccagttggctttctgaaggaacaggtggcttttccagttggcatatgaacaacagtaacggaaactggaaatccagtgtacgtagtacaaataattggaattacagtggccctggagacaaatttcaaccaggcagaaacagaaattctaactgtcaaatggaagacatgactatgctatggaacaagaaatctaataagtcaaacaaatacagtcacgacagatataattggcagcggcaagaaaatgacaaacttggtacagttgccacatatagaggtccttctgaaggatttacaagtgataaatttccttcagaaggcttactcgacttcaattttgagcagctggaaagccaaaccactaaacaagcagacactgctacttccaaagttagtggaaagaatggcagtgcggcaagggaaaagcctcgtcgctggacgccttacccttctcagaagactctggatttacagtcgggattgaaagacatcactggtaacaagtcagaaatgatagagaaacctctctttgattttagcttgataactacaggaatacaggagccccaaactgatgaaacacgtaattccccaacacagaaaacacaaaaagaaatacatactggatctcttaatcacaaggcctcttctgattccgctgcttccttcgaggtggtgagacagtgccccactgcagaaaaacctgaacaagagcatacaccaaataaaatgccatcattgaaatccccactccttccatgtccagccactaaatcattgtctcaaaagcaagatccaaagaatatctcaaaaaacaccaaaacaaattttttttcccctggagaacactcaaatccctcgaacaagcccactgtggaagataaccatggtccttacatatccaaactgcgtagttcatgtcctcatgttttaaaagggaataaaagtacatttggctctcaaaagcaatctggtgataatttaaatgatactttacgaaaggccaaagaggtgctacagtgtcatgagtcattgcaaaatccacttcttagcacttctaaaagtaccaggaactatgcaaaagcaagtagaaatgtagaagaatctgaaaaagggtctttgaaaattgagtttcaagtgcacgcactagaagatgaaagtgatggagagacatctgacacggaaaagcatggaacaaaaattggaaccctaggttctgcaactacagaattgttatctggcagcactcgaactgctgatgagaaagaggaggatgaccgcatcctgaagacttctagagagctatccacttccccatgtaatcccatagttcgccagaaagaatctgaattacaaatgacatctgcagccagtccacaccctggcttattgctagacttgaaaacctctctagaagatgcacaggttgatgactctattaaatctcatgtatcttatgaaacagaaggctttgagagtgctagcttggatgcagagcttcaaaaaagtgacatcagtcagccctcgggccctctcctgcctgaactaagtaagcttggctttcctgcctcacttcagagggatctaacccggcacattagtttgaagagcaaaactggagtacaccttcctgagccaaacctcaatagtgcccgccgcattcgcaatattagcggtcaccgaaagagtgagacagagaaggagtctgggctcaagccaaccctacggcagattctaaatgcatctcggagaaatgtcaactgggaacaggtcattcagcaagtaaccaagaaaaagcaagagctgggcaaaggcttacccaggtttggcatagaaatggtaccccttgttcaaaatgaacaagaagccttagatttggatggggaacctgatctgtccagtctagaaggattccagtgggaaggtgtttccatttcctcgtcccctggcttggcaagaaagcgaagcctttctgagagcagcgtgatcatggacagagctccttctgtgtatagcttcttcagtgaggaaggtacaggcaaagaaaatgagccccagcagatggtttcacctagtaactcattgagggctggacagagccagaaagcaaccatgcacctcaaacaagaagtgacacctcgggctgcctccctccgaacaggtgaaagggctgaaaatgttgctacccaaaggcgacatagtgcacaattatcctctgaccatataatacctttgatgcatttggcaaaagacttgaacagccaggagaggtctataccaccgtcagagaatcagaattcccaggagagtaatggagagggaaactgtctgtcatcaagcgcatcctcagcccttgcgatctccagtttagcggatgcagccacagatagtagctgtacctctggtgctgaacaaaatgatggccaaagtattagaaagaaacgaagagccactggacagaatgggagaaaatatttgcaaactgcccatgtgaccagggattaataaccaaagtatataaggagttcagacaactctaagaaatataatctattaaaaaaatgggcaaaagatttgaatagacatttctcatcagaagacatataaatggcaaacaggcatatgaaaaggtgctcaacatcactggtcatcagagaaatgcaaatcaaaacgacaatggaatatcatctcaccgcggttaaaatagcttatatccaaaagacaggcaataacaaatgctggcaaggatgtggacaaaagggaacccttgtacactgttggtgggaatgtaaattagtacagtcactatggagcacagtttggaggtttctcaaatagctaaaaattgagctaccatatgatccagcaattctgctgctgggtatata

SEQ ID NO: 441330 - DNA, 2453 bp, Homo sapiens
  misc_feature (6)..(6): n is a, c, g, or t
  misc_feature (78)..(78): n is a, c, g, or t
  misc_feature (83)..(83): n is a, c, g, or t
  misc_feature (96)..(96): n is a, c, g, or t
  misc_feature (101)..(101): n is a, c, g, or t
  misc_feature (103)..(103): n is a, c, g, or t
  misc_feature (116)..(116): n is a, c, g, or t
  misc_feature (118)..(118): n is a, c, g, or t
  misc_feature (126)..(126): n is a, c, g, or t
  misc_feature (137)..(138): n is a, c, g, or t
  misc_feature (140)..(140): n is a, c, g, or t
gagganggggaggatgagtggggaaatgagtttgaaggcagtacagggagaggcagaaagaggggagtggggtgtaanggggngaaggacgggggngaggntngagaggaggaggngngtgaaagngagcgcggtgnngncgggagagacagagggggagaagagggggagctggcaggaacaggagggtatgggatcaacattttagggatggatcccctaagcacaccttttgacaatgagttctacaatggactctgtaaccgggatcgggatggaaacactctgacatactaccgaagaccttggaacgtggcttctttgatctatgaaaccaaaggcgagaaaaatttcagaaccgaacattacgaagaacaaattgaagcatttaaaagtatcatccaagagaagacatcaaattttaatgcagctatatctctaaaatttacacccactgaaacaaataaagctgaacaatgttgtgaggaaacagcctcctcaatttctttacatggcaagggtagttttcggttttcatattccaaaaatgaaacttaccaactatttttgtcatattcttcaaagaaggaaaaaatgtttctgcatgtgaaaggagaaattcatctgggaagatttgtaatgagaaatcgcgatgttgtgctcacaacaacttttgtggatgatataaaagctttgccaactacctatgaaaagggagaatattttgcctttttggaaacctatggaactcactacagtagctctgggtctctaggaggactctatgaactaatatatgttttggataaagcttccatgaagcggaaaggtgttgaactaaaagacataaagagatgccttgggtatcatctggatgtatctctggctttctctgaaatctctgttggagctgaatttaataaagatgattgtgtaaagaggggagagggtagagctgtaaacatcaccagtgaaaacctcatagatgatgttgtttcactcataagaggtggaaccagaaaatatgcatttgaactgaaagaaaagcttctccgaggaaccgtgattgatgtgactgactttgtcaactgggcctcttccataaatgatgctcctgttctcattagtcaaaaactgtctcctatatataatctggttccagtgaaaatgaaaaatgcacacctaaagaaacaaaacttggaaagagccattgaagactatatcaatgaatttagtgtaagaaaatgccacacatgccaaaatggaggtacagtgattctaatggatggaaagtgtttgtgtgcctgcccattcaaatttgagggaattgcctgtgaaatcagtaaacaaaaaatttctgaaggattgccagccctagagttccccaatgaaaaatagagctgttggcttctctgagctccagtggaagaagaaaacactagtaccttcagatcctacccctgaagataatcttagctgccaagtaaatagcaacatgcttcatgaaaatcctaccaacctctgaagtctcttctctcttaggtctataattttttttttaatttttcttccttaaactcctgtgatgtttccattttttgttccctaatgagaagtcaacagtgaaatacgccagaactgctttatcccacggaaaatgccaatctcttctaaaaaaaaacaaaattaaattaaaaacagaatgttggtttaaaaaacttcaaagtaattttcaaacggctttgtatggttaacatattctgccaggtccatgaccacacgtctgtaccatgcaatttaactcttatttacattgttatgtttagttgggttatttgcttaggtgtgcatacattcattcagcaaatgctgagcaccagccacgtgcacagcagttgcttttactagtcttagctctacgatttaaatccatgtgtccaagggggaaaacatattatatttgtaaccaaaaactactagtttaccagaggactgaagggagataaagaggagttggttaatgggtacaaaaatccagttagatgaaaggaataatatagatagtgttcagtagcagaatagaatgaacataaactattagtttaaattatgtgaaattccttctatttgatcatattttacaagaaaaaacatcaattttatatagtccaacttaatacctagccttatgagttgtataaggtaaggttacctacctgagaagctgattaacattggttgtacaatcttattcattagagaacatggtgcttagggtctgagaccttttgaaaggtctgagaactctttaaaaaaaggaaagaaagaaagaaaagaggaaaaatatatcaaaataaaaaaatgcaaaatgagaattaataaatgcttaaacatcagtatgtatcatgttaactttattgttactattaataaacatttcacacatttataaa

SEQ ID NO: 441331 - DNA, 3008 bp, Homo sapiens
  misc_feature (6)..(6): n is a, c, g, or t
  misc_feature (78)..(78): n is a, c, g, or t
  misc_feature (83)..(83): n is a, c, g, or t
  misc_feature (96)..(96): n is a, c, g, or t
  misc_feature (101)..(101): n is a, c, g, or t
  misc_feature (103)..(103): n is a, c, g, or t
  misc_feature (116)..(116): n is a, c, g, or t
  misc_feature (118)..(118): n is a, c, g, or t
  misc_feature (126)..(126): n is a, c, g, or t
  misc_feature (137)..(138): n is a, c, g, or t
  misc_feature (140)..(140): n is a, c, g, or t
gagganggggaggatgagtggggaaatgagtttgaaggcagtacagggagaggcagaaagaggggagtggggtgtaanggggngaaggacgggggngaggntngagaggaggaggngngtgaaagngagcgcggtgnngncgggagagacagagggggagaagagggggagctggcaggaacaggagggtatgggatcaacattttagggatggatcccctaagcacaccttttgacaatgagttctacaatggactctgtaaccgggatcgggatggaaacactctgacatactaccgaagaccttggaacgtggcttctttgatctatgaaaccaaaggcgagaaaaatttcagaaccgaacattacgaagaacaaattgaagcatttaaaagtatcatccaagagaagacatcaaattttaatgcagctatatctctaaaatttacacccactgaaacaaataaagctgaacaatgttgtgaggaaacagcctcctcaatttctttacatggcaagggtagttttcggttttcatattccaaaaatgaaacttaccaactatttttgtcatattcttcaaagaaggaaaaaatgtttctgcatgtgaaaggagaaattcatctgggaagatttgtaatgagaaatcgcgatgttgtgctcacaacaacttttgtggatgatataaaagctttgccaactacctatgaaaagggagaatattttgcctttttggaaacctatggaactcactacagtagctctgggtctctaggaggactctatgaactaatatatgttttggataaagcttccatgaagcggaaaggtgttgaactaaaagacataaagagatgccttgggtatcatctggatgtatctctggctttctctgaaatctctgttggagctgaatttaataaagatgattgtgtaaagaggggagagggtagagctgtaaacatcaccagtgaaaacctcatagatgatgttgtttcactcataagaggtggaaccagaaaatatgcatttgaactgaaagaaaagcttctccgaggaaccgtgattgatgtgactgactttgtcaactgggcctcttccataaatgatgctcctgttctcattagtcaaaaactgtctcctatatataatctggttccagtgaaaatgaaaaatgcacacctaaagaaacaaaacttggaaagagccattgaagactatatcaatgaatttagtgtaagaaaatgccacacatgccaaaatggaggtacagtgattctaatggatggaaagtgtttgtgtgcctgcccattcaaatttgagggaattgcctgtgaaatcagtaaacaaaaaatttctgaaggattgccagccctagagttccccaatgaaaaatagagctgttggcttctctgagctccagtggaagaagaaaacactagtaccttcagatcctacccctgaagataatcttagctgccaagtaaatagcaacatgcttcatgaaaatcctaccaacctctgaagtctcttctctcttaggtctataattttttttttaatttttcttccttaaactcctgtgatgtttccattttttgttccctaatgagaagtcaacagtgaaatacgccagaactgctttatcccacggaaaatgccaatctcttctaaaaaaaaacaaaattaaattaaaaacagaatgttggtttaaaaaacttcaaagtaattttcaaacggctttgtatggttaacatattctgccaggtccatgaccacacgtctgtaccatgcaatttaactcttatttacattgttatgtttagttgggttatttgcttaggtgtgcatacattcattcagcaaatgctgagcaccagccacgtgcacagcagttgcttttactagtcttagctctacgatttaaatccatgtgtccaagggggaaaacatattatatttgtaaccaaaaactactagtttaccagaggactgaagggagataaagaggagttggttaatgggtacaaaaatccagttagatgaaaggaataatatagatagtgttcagtagcagaatagaatgaacataaactattagtttaaattatgtgaaattccttctatttgatcatattttacaagaaaaaacatcaattttatatagtccaacttaatacctagccttatgagttgtataaggtaaggttacctacctgagaagctgattaacattggttgtacaatcttattcattagagaacatggtgcttagggtctgagaccttttgaaaggtctgagaactctttaaaaaaaggaaagaaagaaagaaaagaggaaaaatatatcaaaataaaaaaatgcaaaatgagaattaataaatgcttaaacatcagtaaaaaaaaaaaaaaaaaaaaaaaaaaaaaaaaaaaaaaaaaaaaaaaaaaaaaaaaaaaaaaaaaaaaaaaatgtggcccgcttggcccaagcgaattttaaattgaacaaggttaatccatgcgcccgaatttgaagttaattggccaaattcccctaatagggagccgaataaaaattaatggcccgtcgtttaaaaacgtcggaattggaaaaaccttggggtacccaaattaaatccctttgaagaaaatccccttttggcaagttgcggaaaaaccaaaaagccccgaacggatggcctttccaaaaagttgccaaccttgaagggcaatggaaaattgaaggcgtaaatatttggtaaaaatcccgttaaaattttggtaaaacaagttaatttttaaaccaatgggccgaattgggaaaaacccttaataattaaaaggattaacccgaaatagggtggagggtggtccaatttggaacaaggagcccttattaaaaacggggacttaaaggtaaagggcaaaaaaacggtttataaggcgagggccctttcgggaaccatcaccttaacaaagtttttgggcccaaggtcccaaaaacacta

SEQ ID NO: 441332 - DNA, 2292 bp, Homo sapiens
cagatgaggatgattgtgaaagtgagccccgtcccccctgcagagacagagtggtagaagagtctgagctggcacgaacagcaggctatgggatcaacattttagggatggatcccctaagcacaccttttgacaatgagttctacaatggactctgtaaccgggatcgggatggaaacactctgacatactaccgaagaccttggaacgtggcttctttgatctatgaaaccaaaggcgagaaaaatttcagaaccgaacattacgaagaacaaattgaagcatttaaaagtatcatccaagagaagacatcaaattttaatgcagctatatctctaaaatttacacccactgaaacaaataaagctgaacaatgttgtgaggaaacagcctcctcaatttctttacatggcaagggtagttttcggttttcatattccaaaaatgaaacttaccaactatttttgtcatattcttcaaagaagatcgcgatgttgtgctcacaacaacttttgtggatgatataaaagctttgccaactacctatgaaaagggagaatattttgcctttttggaaacctatggaactcactacagtagctctgggtctctaggaggactctatgaactaatatatgttttggataaagcttccatgaagcggaaaggtgttgaactaaaagacataaagagatgccttgggtatcatctggatgtatctctggctttctctgaaatctctgttggagctgaatttaataaagatgattgtgtaaagaggggagagggtagagctgtaaacatcaccagtgaaaacctcatagatgatgttgtttcactcataagaggtggaaccagaaaatatgcatttgaactgaaagaaaagcttctccgaggaaccgtgattgatgtgactgactttgtcaactgggcctcttccataaatgatgctcctgttctcattagtcaaaaactgtctcctatatataatctggttccagtgaaaatgaaaaatgcacacctaaagaaacaaaacttggaaagagccattgaagactatatcaatgaatttagtgtaagaaaatgccacacatgccaaaatggaggtacagtgattctaatggatggaaagtgtttgtgtgcctgcccattcaaatttgagggaattgcctgtgaaatcagtaaacaaaaaatttctgaaggattgccagccctagagttccccaatgaaaaatagagctgttggcttctctgagctccagtggaagaagaaaacactagtaccttcagatcctacccctgaagataatcttagctgccaagtaaatagcaacatgcttcatgaaaatcctaccaacctctgaagtctcttctctcttaggtctataattttttttttaatttttcttccttaaactcctgtgatgtttccattttttgttccctaatgagaagtcaacagtgaaatacgccagaactgctttatcccacggaaaatgccaatctcttctaaaaaaaaacaaaattaaattaaaaacagaatgttggtttaaaaaacttcaaagtaattttcaaacggctttgtatggttaacatattctgccaggtccatgaccacacgtctgtaccatgcaatttaactcttatttacattgttatgtttagttgggttatttgcttaggtgtgcatacattcattcagcaaatgctgagcaccagccacgtgcacagcagttgcttttactagtcttagctctacgatttaaatccatgtgtccaagggggaaaacatattatatttgtaaccaaaaactactagtttaccagaggactgaagggagataaagaggagttggttaatgggtacaaaaatccagttagatgaaaggaataatatagatagtgttcagtagcagaatagaatgaacataaactattagtttaaattatgtgaaattccttctatttgatcatattttacaagaaaaaacatcaattttatatagtccaacttaatacctagccttatgagttgtataaggtaaggttacctacctgagaagctgattaacattggttgtacaatcttattcattagagaacatggtgcttagggtctgagaccttttgaaaggtctgagaactctttaaaaaaaggaaagaaagaaagaaaagaggaaaaatatatcaaaataaaaaaatgcaaaatgagaattaataaatgcttaaacatcagtatgtatcatgttaactttattgttactattaataaacatttcacacatttataaa

SEQ ID NO: 441333 - DNA, 2324 bp, Homo sapiens
  misc_feature (6)..(6): n is a, c, g, or t
  misc_feature (78)..(78): n is a, c, g, or t
  misc_feature (83)..(83): n is a, c, g, or t
  misc_feature (96)..(96): n is a, c, g, or t
  misc_feature (101)..(101): n is a, c, g, or t
  misc_feature (103)..(103): n is a, c, g, or t
  misc_feature (116)..(116): n is a, c, g, or t
  misc_feature (118)..(118): n is a, c, g, or t
  misc_feature (126)..(126): n is a, c, g, or t
  misc_feature (137)..(138): n is a, c, g, or t
  misc_feature (140)..(140): n is a, c, g, or t
gagganggggaggatgagtggggaaatgagtttgaaggcagtacagggagaggcagaaagaggggagtggggtgtaanggggngaaggacgggggngaggntngagaggaggaggngngtgaaagngagcgcggtgnngncgggagagacagagggggagaagagggggagctggcaggaacaggagggtatgggatcaacattttagggatggatcccctaagcacaccttttgacaatgagttctacaatggactctgtaaccgggatcgggatggaaacactctgacatactaccgaagaccttggaacgtggcttctttgatctatgaaaccaaaggcgagaaaaatttcagaaccgaacattacgaagaacaaattgaagcatttaaaagtatcatccaagagaagacatcaaattttaatgcagctatatctctaaaatttacacccactgaaacaaataaagctgaacaatgttgtgaggaaacagcctcctcaatttctttacatggcaagggtagttttcggttttcatattccaaaaatgaaacttaccaactatttttgtcatattcttcaaagaaggaaaaaatgtttctgcatgtgaaaggagaaattcatctgggaagatttgtaatgagaaatcgcgatgttgtgctcacaacaacttttgtggatgatataaaagctttgccaactacctatgaaaagggagaatattttgcctttttggaaacctatggaactcactacagtagctctgggtctctaggaggactctatgaactaatatatgttttggataaagcttccatgaagcggaaagtaaacatcaccagtgaaaacctcatagatgatgttgtttcactcataagaggtggaaccagaaaatatgcatttgaactgaaagaaaagcttctccgaggaaccgtgattgatgtgactgactttgtcaactgggcctcttccataaatgatgctcctgttctcattagtcaaaaactgtctcctatatataatctggttccagtgaaaatgaaaaatgcacacctaaagaaacaaaacttggaaagagccattgaagactatatcaatgaatttagtgtaagaaaatgccacacatgccaaaatggaggtacagtgattctaatggatggaaagtgtttgtgtgcctgcccattcaaatttgagggaattgcctgtgaaatcagtaaacaaaaaatttctgaaggattgccagccctagagttccccaatgaaaaatagagctgttggcttctctgagctccagtggaagaagaaaacactagtaccttcagatcctacccctgaagataatcttagctgccaagtaaatagcaacatgcttcatgaaaatcctaccaacctctgaagtctcttctctcttaggtctataattttttttttaatttttcttccttaaactcctgtgatgtttccattttttgttccctaatgagaagtcaacagtgaaatacgccagaactgctttatcccacggaaaatgccaatctcttctaaaaaaaaacaaaattaaattaaaaacagaatgttggtttaaaaaacttcaaagtaattttcaaacggctttgtatggttaacatattctgccaggtccatgaccacacgtctgtaccatgcaatttaactcttatttacattgttatgtttagttgggttatttgcttaggtgtgcatacattcattcagcaaatgctgagcaccagccacgtgcacagcagttgcttttactagtcttagctctacgatttaaatccatgtgtccaagggggaaaacatattatatttgtaaccaaaaactactagtttaccagaggactgaagggagataaagaggagttggttaatgggtacaaaaatccagttagatgaaaggaataatatagatagtgttcagtagcagaatagaatgaacataaactattagtttaaattatgtgaaattccttctatttgatcatattttacaagaaaaaacatcaattttatatagtccaacttaatacctagccttatgagttgtataaggtaaggttacctacctgagaagctgattaacattggttgtacaatcttattcattagagaacatggtgcttagggtctgagaccttttgaaaggtctgagaactctttaaaaaaaggaaagaaagaaagaaaagaggaaaaatatatcaaaataaaaaaatgcaaaatgagaattaataaatgcttaaacatcagtatgtatcatgttaactttattgttactattaataaacatttcacacatttataaa

SEQ ID NO: 441334 - DNA, 2400 bp, Homo sapiens
  misc_feature (6)..(6): n is a, c, g, or t
  misc_feature (78)..(78): n is a, c, g, or t
  misc_feature (83)..(83): n is a, c, g, or t
  misc_feature (96)..(96): n is a, c, g, or t
  misc_feature (101)..(101): n is a, c, g, or t
  misc_feature (103)..(103): n is a, c, g, or t
  misc_feature (116)..(116): n is a, c, g, or t
  misc_feature (118)..(118): n is a, c, g, or t
  misc_feature (126)..(126): n is a, c, g, or t
  misc_feature (137)..(138): n is a, c, g, or t
  misc_feature (140)..(140): n is a, c, g, or t
gagganggggaggatgagtggggaaatgagtttgaaggcagtacagggagaggcagaaagaggggagtggggtgtaanggggngaaggacgggggngaggntngagaggaggaggngngtgaaagngagcgcggtgnngncgggagagacagagggggagaagagggggagctggcaggaacaggagggtatgggatcaacattttagggatggatcccctaagcacaccttttgacaatgagttctacaatggactctgtaaccgggatcgggatggaaacactctgacatactaccgaagaccttggaacgtggcttctttgatctatgaaaccaaaggcgagaaaaatttcagaaccgaacattacgaagaacaaattgaagcatttaaaagtatcatccaagagaagacatcaaattttaatgcagctatatctctaaaatttacacccactgaaacaaataaagctgaacaatgttgtgaggaaacagcctcctcaatttctttacatggcaagggtagttttcggttttcatattccaaaaatgaaacttaccaactatttttgtcatattcttcaaagaaggaaaaaatgtttctgcatgtgaaaggagaaattcatctgggaagatttgtaatgagaaatcgcgatgttgtgctcacaacaacttttgtggatgatataaaagctttgccaactacctatgaaaagggagaatattttgcctttttggaaacctatggaactcactacagtagctctgggtctctaggaggactctatgaactaatatatgttttggataaagcttccatgaagcggaaaggtgttgaactaaaagacataaagagatgccttgggtatcatctggatgtatctctggctttctctgaaatctctgttggagctgaatttaataaagatgattgtgtaaagaggggagagggtagagctgtaaacatcaccagtgaaaacctcatagatgatgttgtttcactcataagaggtggaaccagaaaatatgcatttgaactgaaagaaaagcttctccgaggaaccgtgattgatgtgactgactttgtcaactgggcctcttccataaatgatgctcctgttctcattagtcaaaaactgtctcctatatataatctggttccagtgaaaatgaaaaatgcacacctaaagaaacaaaacttggaaagagccattgaagactatatcaatgaatttagtgtaagaaaatgccacacatgccaaaatggaggtacagtgattctaatggatggaaagtgtttgtgtgcctgcccattcaaatttgagggaattgcctgtgaaatcagtaaacaaaaaatttctgaaggattgccagccctagagttccccaatgaaaaatagagctgttggcttctctgagctccagtggaagaagaaaacactagtaccttcagatcctacccctgaagataatcttagctgccaagtaaatagcaacatgcttcatgaaaatcctaccaacctctgaagtctcttctctcttaggtctataattttttttttaatttttcttccttaaactcctgtgatgtttccattttttgttccctaatgagaagtcaacagtgaaatacgccagaactgctttatcccacggaaaatgccaatctcttctaaaaaaaaacaaaattaaattaaaaacagaatgttggtttaagtccatgaccacacgtctgtaccatgcaatttaactcttatttacattgttatgtttagttgggttatttgcttaggtgtgcatacattcattcagcaaatgctgagcaccagccacgtgcacagcagttgcttttactagtcttagctctacgatttaaatccatgtgtccaagggggaaaacatattatatttgtaaccaaaaactactagtttaccagaggactgaagggagataaagaggagttggttaatgggtacaaaaatccagttagatgaaaggaataatatagatagtgttcagtagcagaatagaatgaacataaactattagtttaaattatgtgaaattccttctatttgatcatattttacaagaaaaaacatcaattttatatagtccaacttaatacctagccttatgagttgtataaggtaaggttacctacctgagaagctgattaacattggttgtacaatcttattcattagagaacatggtgcttagggtctgagaccttttgaaaggtctgagaactctttaaaaaaaggaaagaaagaaagaaaagaggaaaaatatatcaaaataaaaaaatgcaaaatgagaattaataaatgcttaaacatcagtatgtatcatgttaactttattgttactattaataaacatttcacacatttataaa

SEQ ID NO: 441335 - DNA, 1552 bp, Homo sapiens
  misc_feature (6)..(6): n is a, c, g, or t
  misc_feature (78)..(78): n is a, c, g, or t
  misc_feature (83)..(83): n is a, c, g, or t
  misc_feature (96)..(96): n is a, c, g, or t
  misc_feature (101)..(101): n is a, c, g, or t
  misc_feature (103)..(103): n is a, c, g, or t
  misc_feature (116)..(116): n is a, c, g, or t
  misc_feature (118)..(118): n is a, c, g, or t
  misc_feature (126)..(126): n is a, c, g, or t
  misc_feature (137)..(138): n is a, c, g, or t
  misc_feature (140)..(140): n is a, c, g, or t
gagganggggaggatgagtggggaaatgagtttgaaggcagtacagggagaggcagaaagaggggagtggggtgtaanggggngaaggacgggggngaggntngagaggaggaggngngtgaaagngagcgcggtgnngncgggagagacagagggggagaagagggggagctggcaggaacaggagggtatgggatcaacattttagggatggatcccctaagcacaccttttgacaatgagttctacaatggactctgtaaccgggatcgggatggaaacactctgacatactaccgaagaccttggaacgtggcttctttgatctatgaaaccaaaggcgagaaaaatttcagaaccgaacattacgaagaacaaattgaagcatttaaaagtatcatccaagagaagacatcaaattttaatgcagctatatctctaaaatttacacccactgaaacaaataaagctgaacaatgttgtgaggaaacagcctcctcaatttctttacatggcaagggtagttttcggttttcatattccaaaaatgaaacttaccaactatttttgtcatattcttcaaagaaggaaaaaatgtttctgcatgtgaaaggagaaattcatctgggaagatttgtaatgagaaatcgcgatgttgtgctcacaacaacttttgtggatgatataaaagctttgccaactacctatgaaaagggagaatattttgcctttttggaaacctatggaactcactacagtagctctgggtctctaggaggactctatgaactaatatatgttttggataaagcttccatgaagcggaaaggtgttgaactaaaagacataaagagatgccttgggtatcatctggatgtatctctggctttctctgaaatctctgttggagctgaatttaataaagatgattgtgtaaagaggggagagggtagagctgtaaacatcaccagtgaaaacctcatagatgatgttgtttcactcataagaggtggaaccagaaaatatgcatttgaactgaaagaaaagcttctccgaggaaccgtgattgatgtgactgactttgtcaactgggcctcttccataaatgatgctcctgttctcattagtcaaaaactgtctcctatatataatctggttccagtgaaaatgaaaaatgcacacctaaagaaacaaaacttggaaagagccattgaagactatatcaatgaatttagtgtaagaaaatgccacacatgccaaaatggaggtacagtgattctaatggatggaaagtgtttgtgtgcctgcccattcaaatttgagggaattgcctgtgaaatcagtaaacaaaaaatttctgaaggattgccagccctagagttccccaatgaaaaatagagctgttggcttctctgagctccagtggaagaagaaaacactagtaccttcagatcctacccctgaagataatcttagctgccaagtaaatagcaacatgcttcatgaaaatcctaccaacctaagagagaagagacttcagaggttgtcgacc

SEQ ID NO: 441336 - DNA, 2350 bp, Homo sapiens
cagatgaggatgattgtgaaagtgagccccgtcccccctgcagagacagagtggtagaagagtctgagctggcacgaacagcaggctatgggatcaacattttagggatggatcccctaagcacaccttttgacaatgagttctacaatggactctgtaaccgggatcgggatggaaacactctgacatactaccgaagaccttggaacgtggcttctttgatctatgaaaccaaaggcgagaaaaatttcagaaccgaacattacgaagaacaaattgaagcatttaaaagtatcatccaagagaagacatcaaattttaatgcagctatatctctaaaatttacacccactgaaacaaataaagctgaacaatgttgtgaggaaacagcctcctcaatttctttacatggcaagggtagttttcggttttcatattccaaaaatgaaacttaccaactatttttgtcatattcttcaaagaaggaaaaaatgtttctgcatgtgaaaggagaaattcatctgggaagatttgtaatgagaaatcgcgatgttgtgctcacaacaacttttgtggatgatataaaagctttgccaactacctatgaaaagggagaatattttgcctttttggaaacctatggaactcactacagtagctctgggtctctaggaggactctatgaactaatatatgttttggataaagcttccatgaagcggaaaggtgttgaactaaaagacataaagagatgccttgggtatcatctggatgtatctctggctttctctgaaatctctgttggagctgaatttaataaagatgattgtgtaaagaggggagagggtagagctgtaaacatcaccagtgaaaacctcatagatgatgttgtttcactcataagaggtggaaccagaaaatatgcatttgaactgaaagaaaagcttctccgaggaaccgtgattgatgtgactgactttgtcaactgggcctcttccataaatgatgctcctgttctcattagtcaaaaactgtctcctatatataatctggttccagtgaaaatgaaaaatgcacacctaaagaaacaaaacttggaaagagccattgaagactatatcaatgaatttagtgtaagaaaatgccacacatgccaaaatggaggtacagtgattctaatggatggaaagtgtttgtgtgcctgcccattcaaatttgagggaattgcctgtgaaatcagtaaacaaaaaatttctgaaggattgccagccctagagttccccaatgaaaaatagagctgttggcttctctgagctccagtggaagaagaaaacactagtaccttcagatcctacccctgaagataatcttagctgccaagtaaatagcaacatgcttcatgaaaatcctaccaacctctgaagtctcttctctcttaggtctataattttttttttaatttttcttccttaaactcctgtgatgtttccattttttgttccctaatgagaagtcaacagtgaaatacgccagaactgctttatcccacggaaaatgccaatctcttctaaaaaaaaacaaaattaaattaaaaacagaatgttggtttaaaaaacttcaaagtaattttcaaacggctttgtatggttaacatattctgccaggtccatgaccacacgtctgtaccatgcaatttaactcttatttacattgttatgtttagttgggttatttgcttaggtgtgcatacattcattcagcaaatgctgagcaccagccacgtgcacagcagttgcttttactagtcttagctctacgatttaaatccatgtgtccaagggggaaaacatattatatttgtaaccaaaaactactagtttaccagaggactgaagggagataaagaggagttggttaatgggtacaaaaatccagttagatgaaaggaataatatagatagtgttcagtagcagaatagaatgaacataaactattagtttaaattatgtgaaattccttctatttgatcatattttacaagaaaaaacatcaattttatatagtccaacttaatacctagccttatgagttgtataaggtaaggttacctacctgagaagctgattaacattggttgtacaatcttattcattagagaacatggtgcttagggtctgagaccttttgaaaggtctgagaactctttaaaaaaaggaaagaaagaaagaaaagaggaaaaatatatcaaaataaaaaaatgcaaaatgagaattaataaatgcttaaacatcagtatgtatcatgttaactttattgttactattaataaacatttcacacatttataaa

SEQ ID NO: 441337 - DNA, 2955 bp, Homo sapiens
  misc_feature (6)..(6): n is a, c, g, or t
  misc_feature (78)..(78): n is a, c, g, or t
  misc_feature (83)..(83): n is a, c, g, or t
  misc_feature (96)..(96): n is a, c, g, or t
  misc_feature (101)..(101): n is a, c, g, or t
  misc_feature (103)..(103): n is a, c, g, or t
  misc_feature (116)..(116): n is a, c, g, or t
  misc_feature (118)..(118): n is a, c, g, or t
  misc_feature (126)..(126): n is a, c, g, or t
  misc_feature (137)..(138): n is a, c, g, or t
  misc_feature (140)..(140): n is a, c, g, or t
gagganggggaggatgagtggggaaatgagtttgaaggcagtacagggagaggcagaaagaggggagtggggtgtaanggggngaaggacgggggngaggntngagaggaggaggngngtgaaagngagcgcggtgnngncgggagagacagagggggagaagagggggagctggcaggaacaggagggtatgggatcaacattttagggatggatcccctaagcacaccttttgacaatgagttctacaatggactctgtaaccgggatcgggatggaaacactctgacatactaccgaagaccttggaacgtggcttctttgatctatgaaaccaaaggcgagaaaaatttcagaaccgaacattacgaagaacaaattgaagcatttaaaagtatcatccaagagaagacatcaaattttaatgcagctatatctctaaaatttacacccactgaaacaaataaagctgaacaatgttgtgaggaaacagcctcctcaatttctttacatggcaagggtagttttcggttttcatattccaaaaatgaaacttaccaactatttttgtcatattcttcaaagaaggaaaaaatgtttctgcatgtgaaaggagaaattcatctgggaagatttgtaatgagaaatcgcgatgttgtgctcacaacaacttttgtggatgatataaaagctttgccaactacctatgaaaagggagaatattttgcctttttggaaacctatggaactcactacagtagctctgggtctctaggaggactctatgaactaatatatgttttggataaagcttccatgaagcggaaaggtgttgaactaaaagacataaagagatgccttgggtatcatctggatgtatctctggctttctctgaaatctctgttggagctgaatttaataaagatgattgtgtaaagaggggagagggtagagctgtaaacatcaccagtgaaaacctcatagatgatgttgtttcactcataagaggtggaaccagaaaatatgcatttgaactgaaagaaaagcttctccgaggaaccgtgattgatgtgactgactttgtcaactgggcctcttccataaatgatgctcctgttctcattagtcaaaaactgtctcctatatataatctggttccagtgaaaatgaaaaatgcacacctaaagaaacaaaacttggaaagagccattgaagactatatcaatgaatttagtgtaagaaaatgccacacatgccaaaatggaggtacagtgattctaatggatggaaagtgtttgtgtgcctgcccattcaaatttgagggaattgcctgtgaaatcagtaaacaaaaaatttctgaaggattgccagccctagagttccccaatgaaaaatagagctgttggcttctctgagctccagtggaagaagaaaacactagtaccttcagatcctacccctgaagataatcttagctgccaagtaaatagcaacatgcttcatgaaaatcctaccaacctctgaagtctcttctctcttaggtctataattttttttttaatttttcttccttaaactcctgtgatgtttccattttttgttccctaatgagaagtcaacagtgaaatacgccagaactgctttatcccacggaaaatgccaatctcttctaaaaaaaaacaaaattaaattaaaaacagaatgttggtttaaaaaacttcaaagtaattttcaaacggctttgtatggttaacatattctgccaggtccatgaccacacgtctgtaccatgcaatttaactcttatttacattgttatgtttagttgggttatttgcttaggtgtgcatacattcattcagcaaatgctgagcaccagccacgtgcacagcagttgcttttactagtcttagctctacgatttaaatccatgtgtccaagggggaaaacatattatatttgtaaccaaaaactactagtttaccagaggactgaagggagataaagaggagttggttaatgggtacaaaaatccagttagatgaaaggaataatatagatagtgttcagtagcagaatagaatgaacaagaaaaaacatcaattttatatagtccaacttaatacctagccttatgagttgtataaggtaaggttacctacctgagaagctgattaacattggttgtacaatcttattcattagagaacatggtgcttagggtctgagaccttttgaaaggtctgagaactctttaaaaaaaggaaagaaagaaagaaaagaggaaaaatatatcaaaataaaaaaatgcaaaatgagaattaataaatgcttaaacatcagtaaaaaaaaaaaaaaaaaaaaaaaaaaaaaaaaaaaaaaaaaaaaaaaaaaaaaaaaaaaaaaaaaaaaaaaatgtggcccgcttggcccaagcgaattttaaattgaacaaggttaatccatgcgcccgaatttgaagttaattggccaaattcccctaatagggagccgaataaaaattaatggcccgtcgtttaaaaacgtcggaattggaaaaaccttggggtacccaaattaaatccctttgaagaaaatccccttttggcaagttgcggaaaaaccaaaaagccccgaacggatggcctttccaaaaagttgccaaccttgaagggcaatggaaaattgaaggcgtaaatatttggtaaaaatcccgttaaaattttggtaaaacaagttaatttttaaaccaatgggccgaattgggaaaaacccttaataattaaaaggattaacccgaaatagggtggagggtggtccaatttggaacaaggagcccttattaaaaacggggacttaaaggtaaagggcaaaaaaacggtttataaggcgagggccctttcgggaaccatcaccttaacaaagtttttgggcccaaggtcccaaaaacacta

SEQ ID NO: 441338 - DNA, 3011 bp, Homo sapiens
  misc_feature (6)..(6): n is a, c, g, or t
  misc_feature (78)..(78): n is a, c, g, or t
  misc_feature (83)..(83): n is a, c, g, or t
  misc_feature (96)..(96): n is a, c, g, or t
  misc_feature (101)..(101): n is a, c, g, or t
  misc_feature (103)..(103): n is a, c, g, or t
  misc_feature (116)..(116): n is a, c, g, or t
  misc_feature (118)..(118): n is a, c, g, or t
  misc_feature (126)..(126): n is a, c, g, or t
  misc_feature (137)..(138): n is a, c, g, or t
  misc_feature (140)..(140): n is a, c, g, or t
  misc_feature (1814)..(1814): n is a, c, g, or t
  misc_feature (1826)..(1826): n is a, c, g, or t
  misc_feature (1858)..(1858): n is a, c, g, or t
  misc_feature (1875)..(1875): n is a, c, g, or t
  misc_feature (1885)..(1885): n is a, c, g, or t
  misc_feature (1896)..(1896): n is a, c, g, or t
  misc_feature (1902)..(1902): n is a, c, g, or t
  misc_feature (1911)..(1911): n is a, c, g, or t
  misc_feature (1926)..(1926): n is a, c, g, or t
  misc_feature (1936)..(1936): n is a, c, g, or t
  misc_feature (1938)..(1938): n is a, c, g, or t
  misc_feature (1947)..(1947): n is a, c, g, or t
  misc_feature (1956)..(1956): n is a, c, g, or t
  misc_feature (1958)..(1959): n is a, c, g, or t
  misc_feature (1965)..(1965): n is a, c, g, or t
  misc_feature (1981)..(1981): n is a, c, g, or t
  misc_feature (1984)..(1986): n is a, c, g, or t
  misc_feature (2000)..(2000): n is a, c, g, or t
  misc_feature (2003)..(2005): n is a, c, g, or t
  misc_feature (2009)..(2009): n is a, c, g, or t
  misc_feature (2013)..(2015): n is a, c, g, or t
  misc_feature (2017)..(2019): n is a, c, g, or t
  misc_feature (2022)..(2022): n is a, c, g, or t
  misc_feature (2028)..(2028): n is a, c, g, or t
gagganggggaggatgagtggggaaatgagtttgaaggcagtacagggagaggcagaaagaggggagtggggtgtaanggggngaaggacgggggngaggntngagaggaggaggngngtgaaagngagcgcggtgnngncgggagagacagagggggagaagagggggagctggcaggaacaggagggtatgggatcaacattttagggatggatcccctaagcacaccttttgacaatgagttctacaatggactctgtaaccgggatcgggatggaaacactctgacatactaccgaagaccttggaacgtggcttctttgatctatgaaaccaaaggcgagaaaaatttcagaaccgaacattacgaagaacaaattgaagcatttaaaagtatcatccaagagaagacatcaaattttaatgcagctatatctctaaaatttacacccactgaaacaaataaagctgaacaatgttgtgaggaaacagcctcctcaatttctttacatggcaagggtagttttcggttttcatattccaaaaatgaaacttaccaactatttttgtcatattcttcaaagaaggaaaaaatgtttctgcatgtgaaaggagaaattcatctgggaagatttgtaatgagaaatcgcgatgttgtgctcacaacaacttttgtggatgatataaaagctttgccaactacctatgaaaagggagaatattttgcctttttggaaacctatggaactcactacagtagctctgggtctctaggaggactctatgaactaatatatgttttggataaagcttccatgaagcggaaaggtgttgaactaaaagacataaagagatgccttgggtatcatctggatgtatctctggctttctctgaaatctctgttggagctgaatttaataaagatgattgtgtaaagaggggagagggtagagctgtaaacatcaccagtgaaaacctcatagatgatgttgtttcactcataagaggtggaaccagaaaatatgcatttgaactgaaagaaaagcttctccgaggaaccgtgattgatgtgactgactttgtcaactgggcctcttccataaatgatgctcctgttctcattagtcaaaaactgtctcctatatataatctggttccagtgaaaatgaaaaatgcacacctaaagaaacaaaacttggaaagagccattgaagactatatcaatgaatttagtgtaagaaaatgccacacatgccaaaatggaggtacagtgattctaatggatggaaagtgtttgtgtgcctgcccattcaaatttgagggaattgcctgtgaaatcagtaaacaaaaaatttctgaaggattgccagccctagagttccccaatgaaaaatagagctgttggcttctctgagctccagtggaagaagaaaacactagtaccttcagatcctacccctgaagataatcttagctgccaagtaaatagcaacatgcttcatgaaaatcctaccaacctctgaagtctcttctctcttaggtctataattttttttttaatttttcttccttaaactcctgtgatgtttccattttttgttccctaatgagaagtcaacagtgaaatacgccagaactgctttatcccacggaaaatgccaatctcttctaaaaaaaaacaaaattaaattaaaaacagaatgttggtttaaaaaacttcaaagtaattttcaaacggctttgtatggttaacatattctgccaggtccatgaccacacgtctgtaccatgcccccccccccccaccccccncccccccccccncctccgcccccccccccccccccccccccccncccccctccccctcccncccccccccnccctccccccncgttcnttctcctcntcttccccccccccncccccccccncnccccccggnccccccccncnnctattnctcccccccacccccnccnnncccccccccccccncgnnnctanagcnnncnnnccncatgcncccaaaaatccagttagatgaaaggaataatatagatagtgttcagtagcagaatagaatgaacataaactattagtttaaattatgtgaaattccttctatttgatcatattttacaagaaaaaacatcaattttatatagtccaacttaatacctagccttatgagttgtataaggtaaggttacctacctgagaagctgattaacattggttgtacaatcttattcattagagaacatggtgcttagggtctgagaccttttgaaaggtctgagaactctttaaaaaaaggaaagaaagaaagaaaagaggaaaaatatatcaaaataaaaaaatgcaaaatgagaattaataaatgcttaaacatcagtaaaaaaaaaaaaaaaaaaaaaaaaaaaaaaaaaaaaaaaaaaaaaaaaaaaaaaaaaaaaaaaaaaaaaaaatgtggcccgcttggcccaagcgaattttaaattgaacaaggttaatccatgcgcccgaatttgaagttaattggccaaattcccctaatagggagccgaataaaaattaatggcccgtcgtttaaaaacgtcggaattggaaaaaccttggggtacccaaattaaatccctttgaagaaaatccccttttggcaagttgcggaaaaaccaaaaagccccgaacggatggcctttccaaaaagttgccaaccttgaagggcaatggaaaattgaaggcgtaaatatttggtaaaaatcccgttaaaattttggtaaaacaagttaatttttaaaccaatgggccgaattgggaaaaacccttaataattaaaaggattaacccgaaatagggtggagggtggtccaatttggaacaaggagcccttattaaaaacggggacttaaaggtaaagggcaaaaaaacggtttataaggcgagggccctttcgggaaccatcaccttaacaaagtttttgggcccaaggtcccaaaaacacta

SEQ ID NO: 441339 - DNA, 2357 bp, Homo sapiens
  misc_feature (6)..(6): n is a, c, g, or t
  misc_feature (78)..(78): n is a, c, g, or t
  misc_feature (83)..(83): n is a, c, g, or t
  misc_feature (96)..(96): n is a, c, g, or t
  misc_feature (101)..(101): n is a, c, g, or t
  misc_feature (103)..(103): n is a, c, g, or t
  misc_feature (116)..(116): n is a, c, g, or t
  misc_feature (118)..(118): n is a, c, g, or t
  misc_feature (126)..(126): n is a, c, g, or t
  misc_feature (137)..(138): n is a, c, g, or t
  misc_feature (140)..(140): n is a, c, g, or t
gagganggggaggatgagtggggaaatgagtttgaaggcagtacagggagaggcagaaagaggggagtggggtgtaanggggngaaggacgggggngaggntngagaggaggaggngngtgaaagngagcgcggtgnngncgggagagacagagggggagaagagggggagctggcaggaacaggagggtatgggatcaacattttagggatggatcccctaagcacaccttttgacaatgagttctacaatggactctgtaaccgggatcgggatggaaacactctgacatactaccgaagaccttggaacgtggcttctttgatctatgaaaccaaaggcgagaaaaatttcagaaccgaacattacgaagaacaaattgaagcatttaaaagtatcatccaagagaagacatcaaattttaatgcagctatatctctaaaatttacacccactgaaacaaataaagctgaacaatgttgtgaggaaacagcctcctcaatttctttacatggcaagggtagttttcggttttcatattccaaaaatgaaacttaccaactatttttgtcatattcttcaaagaaggaaaaaatgtttctgcatgtgaaaggagaaattcatctgggaagatttgtaatgagaaatcgcgatgttgtgctcacaacaacttttgtggatgatataaaagctttgccaactacctatgaaaagggagaatattttgcctttttggaaacctatggaactcactacagtagctctgggtctctaggaggactctatgaactaatatatgttttggataaagcttccatgaagcggaaaggtgttgaactaaaagacataaagagatgccttgggtatcatctggatgtatctctggctttctctgaaatctctgttggagctgaatttaataaagatgattgtgtaaagaggggagagggtagagctgtaaacatcaccagtgaaaacctcatagatgatgttgtttcactcataagaggtggaaccagaaaatatgcatttgaactgaaagaaaagcttctccgaggaaccgtgattgatgtgactgactttgtcaactgggcctcttccataaatgatgctcctgttctcattagtcaaaaactgtctcctatatataatctggttccagtgaaaatgaaaaatgcacacctaaagaaacaaaacttggaaagagccattgaagactatatcaatgaatttagtgtaagaaaatgccacacatgccaaaatggaggattgccagccctagagttccccaatgaaaaatagagctgttggcttctctgagctccagtggaagaagaaaacactagtaccttcagatcctacccctgaagataatcttagctgccaagtaaatagcaacatgcttcatgaaaatcctaccaacctctgaagtctcttctctcttaggtctataattttttttttaatttttcttccttaaactcctgtgatgtttccattttttgttccctaatgagaagtcaacagtgaaatacgccagaactgctttatcccacggaaaatgccaatctcttctaaaaaaaaacaaaattaaattaaaaacagaatgttggtttaaaaaacttcaaagtaattttcaaacggctttgtatggttaacatattctgccaggtccatgaccacacgtctgtaccatgcaatttaactcttatttacattgttatgtttagttgggttatttgcttaggtgtgcatacattcattcagcaaatgctgagcaccagccacgtgcacagcagttgcttttactagtcttagctctacgatttaaatccatgtgtccaagggggaaaacatattatatttgtaaccaaaaactactagtttaccagaggactgaagggagataaagaggagttggttaatgggtacaaaaatccagttagatgaaaggaataatatagatagtgttcagtagcagaatagaatgaacataaactattagtttaaattatgtgaaattccttctatttgatcatattttacaagaaaaaacatcaattttatatagtccaacttaatacctagccttatgagttgtataaggtaaggttacctacctgagaagctgattaacattggttgtacaatcttattcattagagaacatggtgcttagggtctgagaccttttgaaaggtctgagaactctttaaaaaaaggaaagaaagaaagaaaagaggaaaaatatatcaaaataaaaaaatgcaaaatgagaattaataaatgcttaaacatcagtatgtatcatgttaactttattgttactattaataaacatttcacacatttataaa

SEQ ID NO: 441340 - DNA, 801 bp, Homo sapiens
  misc_feature (6)..(6): n is a, c, g, or t
  misc_feature (78)..(78): n is a, c, g, or t
  misc_feature (83)..(83): n is a, c, g, or t
  misc_feature (96)..(96): n is a, c, g, or t
  misc_feature (101)..(101): n is a, c, g, or t
  misc_feature (103)..(103): n is a, c, g, or t
  misc_feature (116)..(116): n is a, c, g, or t
  misc_feature (118)..(118): n is a, c, g, or t
  misc_feature (126)..(126): n is a, c, g, or t
  misc_feature (137)..(138): n is a, c, g, or t
  misc_feature (140)..(140): n is a, c, g, or t
gagganggggaggatgagtggggaaatgagtttgaaggcagtacagggagaggcagaaagaggggagtggggtgtaanggggngaaggacgggggngaggntngagaggaggaggngngtgaaagngagcgcggtgnngncgggagagacagagggggagaagagggggagctggcaggaacaggagggtatgggatcaacattttagggatggatcccctaagcacaccttttgacaatgagttctacaatggactctgtaaccgggatcgggatggaaacactctgacatactaccgaagaccttggaacgtggcttctttgatctatgaaaccaaaggcgagaaaaatttcagaaccgaacattacgaagaacaaattgaagcatttaaaagtatcatccaagagaagacatcaaattttaatgcagctatatctctaaaatttacacccactgaaacaaataaagctgaacaatgttgtgaggaaacagcctcctcaatttctttacatggcaagggtagttttcggttttcatattccaaaaatgaaacttaccaactatttttgtcatattcttcaaagaaggaaaaaatgtttctgcatgtgaaaggagaaattcatctgggaagatttgtaatgagaaatcgcgatgttgtgctcacaacaacttttgtggatgatataaaagctttgccaactacctatgctgggtctctaggaggactctatgaactaatatatgttttggataaagcttccatgaagcggaaaggtatgcctagaaatagagctctgact

SEQ ID NO: 441341 - DNA, 6033 bp, Homo sapiens
agcgatgtttgcccgtcagtcgagtccggagtgaggagctcggtcgccgaagcggagggagactcttgagcttcatcttgccgccgccacggccaccgcctggacctttgcccggagggagctgcagagggtccatcgccgccgtcctctggagggcagcgcgattgggggcccggacctccagtccgggggggatttttcgtcgtccccctccccccaaccagggagcccgagcggccgccaaacaaaggtaccagtcgccgccgcgggaggaggaggagccggagcctctgcctcagcagccgctggacccgccgcccttcttccccatctctcccccgggcctgctggttttgggggggagaaggagagaggggactctggacgtgccagggtcagatctcgcctccgaggaaggtgcagctgaacctggtgttttagaggataccttggtcccagagtcatcatgaaggcccttgatgagcctccctatttgacagtgggcactgatgtgagtgctaaatacagaggagccttttgtgaagccaagatcaagacagcaaaaagacttgtcaaagtcaaggtgacatttagacatgattcttcaacagtggaagttcaggatgaccacataaagggcccactaaaggtaggagctattgtggaagtgaagaatcttgatggtgcatatcaggaagctgttatcaataaactaacagatgcgagttggtacactgtagtttttgatgacggagatgagaagacactgagacgatcttcactgtgcctgaaaggagagaggcattttgctgaaagtgaaacattagaccagctcccactcaccaaccctgagcattttggcactccagtcataggaaagaaaacaaatagaggaagaagatctaatcatataccagaggaagagtcttcatcatcctccagtgatgaagatgaggatgataggaaacagattgatgagctactaggcaaagttgtatgtgtagattacattagtttggataaaaagaaagcactgtggtttcctgcattggtggtttgtcctgattgtagtgatgagattgctgtaaaaaaggacaatattcttgttcgatctttcaaagatggaaaatttacttcagttccaagaaaagatgtccatgaaattactagtgacactgcaccaaagcctgatgctgttttaaagcaagcctttgaacaggcacttgaatttcacaaaagtagaactattcctgctaactggaagactgaattgaaagaagatagctctagcagtgaagcagaggaagaagaggaggaggaagatgatgaaaaagaaaaggaggataatagcagtgaagaagaagaagaaatagaaccatttccagaagaaagggagaactttcttcagcaattgtacaaatttatggaagatagaggtacacctattaacaaacgacctgtacttggatatcgaaatttgaatctctttaagttattcagacttgtacacaaacttggaggatttgataatattgaaagtggagctgtttggaaacaagtctaccaagatcttggaatccctgtcttaaattcagctgcaggatacaatgttaaatgtgcttataaaaaatacttatatggttttgaggagtactgtagatcagccaacattgaatttcagatggcattgccagagaaagttgttaacaagcaatgtaaggagtgtgaaaatgtaaaagaaataaaagttaaggaggaaaatgaaacagagatcaaagaaataaagatggaggaggagaggaatataataccaagagaagaaaagcctattgaggatgaaattgaaagaaaagaaaatattaagccctctctgggaagtaaaaagaatttattagaatctatacctacacattctgatcaggaaaaagaagttaacattaaaaaaccagaagacaatgaaaatctggatgacaaagatgatgacacaactagggtagatgaatccctcaacataaaggtagaagctgaggaagaaaaagcaaaatctggagatgaaacgaataaagaagaagatgaagatgatgaagaagcagaagaggaggaggaggaggaagaagaagaagaggatgaagatgatgatgacaacaatgaggaagaggagtttgagtgctatccaccaggcatgaaagtccaagtgcggtatggacgagggaaaaatcaaaaaatgtatgaagctagtattaaagattctgatgtcgaaggtggagaggtcctttacttggtgcattactgcggatggaatgtgagatacgatgaatggattaaagcagataaaatagtaagacctgctgataaaaatgtgccaaagataaaacatcggaagaaaataaagaataaattagacaaagaaaaagacaaagatgaaaaatactctccaaaaaactgtaaacttcggcgcttgtccaaaccaccatttcagacaaatccatctcctgaaatggtatccaaactggatctcactgatgccaaaaactctgatactgctcatattaagtccatagaaattacttcgatccttaatggacttcaagcttctgaaagttctgctgaagacagtgagcaggaagatgagagaggtgctcaagacatggataataatggcaaagaggaatctaagattgatcatttgaccaacaacagaaatgatcttatttcaaaggaggaacagaacagttcatctttgctagaagaaaacaaagttcatgcagatttggtaatatccaaaccagtgtcaaaatctccagaaagattaaggaaagatatagaagtattatccgaagatactgattatgaagaagatgaagtcacaaaaaagagaaaggatgtcaagaaggacacaacagataaatcttcaaaaccacaaataaaacgtggtaaaagaaggtattgcaatacagaagagtgtctaaaaactggatcacctggcaaaaaggaagagaaggccaagaacaaagaatcactttgcatggaaaacagtagcaacagctcttcagatgaagatgaagaagaaacaaaagcaaagatgacaccaactaagaaatacaatggtttggaggaaaaaagaaaatctctacggacaactggtttctattcaggattttcagaagtggcagaaaaaaggattaaacttttaaataactctgatgaaagacttcaaaacagcagggccaaagatcgaaaagatgtctggtcaagtattcagggacagtggcctaaaaaaacgctgaaagagcttttttcagactctgatactgaggctgcagcttccccaccgcatcctgccccagaggagggggtggcagaggagtcactgcagactgtggctgaagaggagagttgttcacccagtgtagaactagaaaaaccacctccagtcaatgtcgatagtaaacccattgaagaaaaaacagtagaggtcaatgacagaaaagcagaatttccaagtagtggcagtaattcagtgctaaatacccctcctactacacctgaatcgccttcatcagtcactgtaacagaaggcagccggcagcagtcttctgtaacagtatcagaaccactggctccaaaccaagaagaggttcgaagtatcaagagtgaaactgatagcacaattgaggtggatagtgttgctggggagctccaagacctccagtctgaagggaatagctcgccagcaggttttgatgccagtgtgagctcaagcagtagtaatcagccagaaccagaacatcctgaaaaagcctgtacaggtcagaaaagagtgaaagatgctcagggaggaggaagttcatcaaaaaagcagaaaagaagccataaagcaacagtggtaaacaacaaaaagaagggaaaaggcacaaatagtagtgatagtgaagaactttcagctggtgaaagtataactaagagtcagccagtcaaatcagtttccactggaatgaagtctcatagtaccaaatctcccgcaaggacgcagtctccaggaaaatgtggaaagaatggtgataaggatcctgatctcaaggaacccagtaatcgattacccaaagtttacaaatggagttttcagatgtcggacctggaaaatatgacaagtgccgaacgcatcacaattcttcaagaaaaacttcaagaaatcagaaaacattatctgtcattaaaatctgaagtagcttccattgatcggaggagaaagcgtttaaagaagaaagagagagaaagtgctgctacatcctcatcctcctcttcaccttcatccagttccataacagctgctgttatgttaactttagctgaaccgtcaatgtccagcgcatcacaaaatggaatgtcagttgagtgcaggtgacagcaggacttgctaaagcactttgcacttaatggctgttgagggccactttttttttatactgcacagtggcacaaaaaaatatcagacaagcactattttatatttaaaaattgtttcttgacaagctgacttggcacttaagtgcacttttttatgaagaaaaagtacaatgaactgcttttcctcaagcaataattgtttccaacttgtctgggaattgtgtgtctggtaactggaaggccttccactgtggcaaatggaggcttttcactgcctgtagagacaatacagtaagcatagttaaggggtgggtcagaacatgttaagataacttactgtatatgtattcccttgtattttgttaaagctggaacatttgatatttttccatttatttatgaaaaaatatgaacctattttcatttgtacaaggtaattgttttttaaagcaagtcaccttagggtggctttaattgtataagtcaagcacatgtaataaattcaaaacctgcagttaacaggatattagacatcaatcctggtaaccaaatattaaagattctctttaaaaaagactgaacatgtttacaggtttgaattaggctaaaaggtcttgcagtggcttttcatggcccttcaaattggaatggaactactgtactttgccatttttctataaatcagtatttttttttaattttgatatacattgtgtgaaaaaagaaaatggctaataaactgtattaaatcttaaacaatgtataaagattgtacttagccagttcaaagtgtatatttattcataatgaattataacagttatatttttgtgttttcttgtaaatgtttcttttcccttaaatacagataattcatttgtattgcttattttattatgagctacaacaaaaggacttcaggaacaagtaatgtattagtatggttcaagattgttgataggaactgtctcaaaaggatggtggttattttaaatataaatagctaatgggggtggtaggcctataaaattaaatgccttgtataaaatccaaaatgaatgcaaaattgttttcacttgtattgactttatgttgtatgattccaatctctgttctgtttggcacttgtatttaattcttcacctttgtaagacatttgtatattgtggatgtgttcattcaagctatttaatatctggcactgttaatacacagtactttattgtacagactgttttactgttttaattgtagttctgtgtactttttttggatggggctggcatgttttctttgtttcctggcaatacgacgtgggaatttcaatgcgttttgttgtagatgctaacgtgtcagaatcctttacattcaacttttctaagaaaagcattttcagtcttgtagtgtgtgcttacagtaactaattttgttgaaaatggtttcaagttattcaaatttgtacaggactgtaaagatttgttgacagcaaaatgttgaagaaaaaagcttatagaataaaagctataaagtatatattaggatctgcaaacaatgaagaattatgtaatatattgtacaaatgtaagcaaaggctctgaaataaaatgccatagtttgtgaatcctt

SEQ ID NO: 441342 - DNA, 843 bp, Homo sapiens
agcgatgtttgcccgtcagtcgagtccggagtgaggagctcggtcgccgaagcggagggagactcttgagcttcatcttgccgccgccacggccaccgcctggacctttgcccggagggagctgcagagggtccatcgccgccgtcctctggagggcagcgcgattgggggcccggacctccagtccgggggggatttttcgtcgtccccctccccccaaccagggagcccgagcggccgccaaacaaaggtaccagtcgccgccgcgggaggaggaggagccggagcctctgcctcagcagccgctggacccgccgcccttcttccccatctctcccccgggcctgctggttttgggggggagaaggagagaggggactctggacgtgccagggtcagatctcgcctccgaggaaggtgcagctgaacctggtgttttagaggataccttggtcccagagtcatcatgaaggcccttgatgagcctccctatttgacagtgggcactgatgtgagtgctaaatacagaggagccttttgtgaagccaagatcaagacagcaaaaagacttgtcaaagtcaaggtgacatttagacatgattcttcaacagtggaagttcaggatgaccacataaagggcccactaaaggtaggagctattgtggaagtgaagaatcttgatggtgcatatcaggaagctgttatcaataaactaacagatgcgagttggtacactgtagtttttgatgacggagatgagaagacactgagacgatcttcactgtgcctgaaaggagagaggcattttgctgaaagtgaagtaagtcatcatttaacaaatga

SEQ ID NO: 441343 - DNA, 312 bp, Homo sapiens
ccagtttcgcataagttgagagtaggtattcttgaacctgtgatcctgatttgaaaaatagctctctcatatggtaaaaaaaacaaaacaaaacaaaacaaaaccacgaacagtcttgctagtcccttttctcatatgggaatttttactgtggggattctaactattgggatactttttaaggcatattcctctataaaacataaaatgtctagacttacctggttttgaacagcttagtgttaaaagagtaactttgattacgtaaaaagcctttgaagtattttaatgaacactagtctttgctattgg

SEQ ID NO: 441344 - DNA, 6128 bp, Homo sapiens
agcgatgtttgcccgtcagtcgagtccggagtgaggagctcggtcgccgaagcggagggagactcttgagcttcatcttgccgccgccacggccaccgcctggacctttgcccggagggagctgcagagggtccatcgccgccgtcctctggagggcagcgcgattgggggcccggacctccagtccgggggggatttttcgtcgtccccctccccccaaccagggagcccgagcggccgccaaacaaaggtaccagtcgccgccgcgggaggaggaggagccggagcctctgcctcagcagccgctggacccgccgcccttcttccccatctctcccccgggcctgctggttttgggggggagaaggagagaggggactctggacgtgccagggtcagatctcgcctccgaggaaggtgcagctgaacctggtgttttagaggataccttggtcccagagtcatcatgaaggctggagtgcagtggtgcaatctcagcttactgcaatctccgtctcctgagttcaagcagttctgcctcagcctcctgagtagctgtgactacaggcccttgatgagcctccctatttgacagtgggcactgatgtgagtgctaaatacagaggagccttttgtgaagccaagatcaagacagcaaaaagacttgtcaaagtcaaggtgacatttagacatgattcttcaacagtggaagttcaggatgaccacataaagggcccactaaaggtaggagctattgtggaagtgaagaatcttgatggtgcatatcaggaagctgttatcaataaactaacagatgcgagttggtacactgtagtttttgatgacggagatgagaagacactgagacgatcttcactgtgcctgaaaggagagaggcattttgctgaaagtgaaacattagaccagctcccactcaccaaccctgagcattttggcactccagtcataggaaagaaaacaaatagaggaagaagatctaatcatataccagaggaagagtcttcatcatcctccagtgatgaagatgaggatgataggaaacagattgatgagctactaggcaaagttgtatgtgtagattacattagtttggataaaaagaaagcactgtggtttcctgcattggtggtttgtcctgattgtagtgatgagattgctgtaaaaaaggacaatattcttgttcgatctttcaaagatggaaaatttacttcagttccaagaaaagatgtccatgaaattactagtgacactgcaccaaagcctgatgctgttttaaagcaagcctttgaacaggcacttgaatttcacaaaagtagaactattcctgctaactggaagactgaattgaaagaagatagctctagcagtgaagcagaggaagaagaggaggaggaagatgatgaaaaagaaaaggaggataatagcagtgaagaagaagaagaaatagaaccatttccagaagaaagggagaactttcttcagcaattgtacaaatttatggaagatagaggtacacctattaacaaacgacctgtacttggatatcgaaatttgaatctctttaagttattcagacttgtacacaaacttggaggatttgataatattgaaagtggagctgtttggaaacaagtctaccaagatcttggaatccctgtcttaaattcagctgcaggatacaatgttaaatgtgcttataaaaaatacttatatggttttgaggagtactgtagatcagccaacattgaatttcagatggcattgccagagaaagttgttaacaagcaatgtaaggagtgtgaaaatgtaaaagaaataaaagttaaggaggaaaatgaaacagagatcaaagaaataaagatggaggaggagaggaatataataccaagagaagaaaagcctattgaggatgaaattgaaagaaaagaaaatattaagccctctctgggaagtaaaaagaatttattagaatctatacctacacattctgatcaggaaaaagaagttaacattaaaaaaccagaagacaatgaaaatctggatgacaaagatgatgacacaactagggtagatgaatccctcaacataaaggtagaagctgaggaagaaaaagcaaaatctggagatgaaacgaataaagaagaagatgaagatgatgaagaagcagaagaggaggaggaggaggaagaagaagaagaggatgaagatgatgatgacaacaatgaggaagaggagtttgagtgctatccaccaggcatgaaagtccaagtgcggtatggacgagggaaaaatcaaaaaatgtatgaagctagtattaaagattctgatgtcgaaggtggagaggtcctttacttggtgcattactgcggatggaatgtgagatacgatgaatggattaaagcagataaaatagtaagacctgctgataaaaatgtgccaaagataaaacatcggaagaaaataaagaataaattagacaaagaaaaagacaaagatgaaaaatactctccaaaaaactgtaaacttcggcgcttgtccaaaccaccatttcagacaaatccatctcctgaaatggtatccaaactggatctcactgatgccaaaaactctgatactgctcatattaagtccatagaaattacttcgatccttaatggacttcaagcttctgaaagttctgctgaagacagtgagcaggaagatgagagaggtgctcaagacatggataataatggcaaagaggaatctaagattgatcatttgaccaacaacagaaatgatcttatttcaaaggaggaacagaacagttcatctttgctagaagaaaacaaagttcatgcagatttggtaatatccaaaccagtgtcaaaatctccagaaagattaaggaaagatatagaagtattatccgaagatactgattatgaagaagatgaagtcacaaaaaagagaaaggatgtcaagaaggacacaacagataaatcttcaaaaccacaaataaaacgtggtaaaagaaggtattgcaatacagaagagtgtctaaaaactggatcacctggcaaaaaggaagagaaggccaagaacaaagaatcactttgcatggaaaacagtagcaacagctcttcagatgaagatgaagaagaaacaaaagcaaagatgacaccaactaagaaatacaatggtttggaggaaaaaagaaaatctctacggacaactggtttctattcaggattttcagaagtggcagaaaaaaggattaaacttttaaataactctgatgaaagacttcaaaacagcagggccaaagatcgaaaagatgtctggtcaagtattcagggacagtggcctaaaaaaacgctgaaagagcttttttcagactctgatactgaggctgcagcttccccaccgcatcctgccccagaggagggggtggcagaggagtcactgcagactgtggctgaagaggagagttgttcacccagtgtagaactagaaaaaccacctccagtcaatgtcgatagtaaacccattgaagaaaaaacagtagaggtcaatgacagaaaagcagaatttccaagtagtggcagtaattcagtgctaaatacccctcctactacacctgaatcgccttcatcagtcactgtaacagaaggcagccggcagcagtcttctgtaacagtatcagaaccactggctccaaaccaagaagaggttcgaagtatcaagagtgaaactgatagcacaattgaggtggatagtgttgctggggagctccaagacctccagtctgaagggaatagctcgccagcaggttttgatgccagtgtgagctcaagcagtagtaatcagccagaaccagaacatcctgaaaaagcctgtacaggtcagaaaagagtgaaagatgctcagggaggaggaagttcatcaaaaaagcagaaaagaagccataaagcaacagtggtaaacaacaaaaagaagggaaaaggcacaaatagtagtgatagtgaagaactttcagctggtgaaagtataactaagagtcagccagtcaaatcagtttccactggaatgaagtctcatagtaccaaatctcccgcaaggacgcagtctccaggaaaatgtggaaagaatggtgataaggatcctgatctcaaggaacccagtaatcgattacccaaagtttacaaatggagttttcagatgtcggacctggaaaatatgacaagtgccgaacgcatcacaattcttcaagaaaaacttcaagaaatcagaaaacattatctgtcattaaaatctgaagtagcttccattgatcggaggagaaagcgtttaaagaagaaagagagagaaagtgctgctacatcctcatcctcctcttcaccttcatccagttccataacagctgctgttatgttaactttagctgaaccgtcaatgtccagcgcatcacaaaatggaatgtcagttgagtgcaggtgacagcaggacttgctaaagcactttgcacttaatggctgttgagggccactttttttttatactgcacagtggcacaaaaaaatatcagacaagcactattttatatttaaaaattgtttcttgacaagctgacttggcacttaagtgcacttttttatgaagaaaaagtacaatgaactgcttttcctcaagcaataattgtttccaacttgtctgggaattgtgtgtctggtaactggaaggccttccactgtggcaaatggaggcttttcactgcctgtagagacaatacagtaagcatagttaaggggtgggtcagaacatgttaagataacttactgtatatgtattcccttgtattttgttaaagctggaacatttgatatttttccatttatttatgaaaaaatatgaacctattttcatttgtacaaggtaattgttttttaaagcaagtcaccttagggtggctttaattgtataagtcaagcacatgtaataaattcaaaacctgcagttaacaggatattagacatcaatcctggtaaccaaatattaaagattctctttaaaaaagactgaacatgtttacaggtttgaattaggctaaaaggtcttgcagtggcttttcatggcccttcaaattggaatggaactactgtactttgccatttttctataaatcagtatttttttttaattttgatatacattgtgtgaaaaaagaaaatggctaataaactgtattaaatcttaaacaatgtataaagattgtacttagccagttcaaagtgtatatttattcataatgaattataacagttatatttttgtgttttcttgtaaatgtttcttttcccttaaatacagataattcatttgtattgcttattttattatgagctacaacaaaaggacttcaggaacaagtaatgtattagtatggttcaagattgttgataggaactgtctcaaaaggatggtggttattttaaatataaatagctaatgggggtggtaggcctataaaattaaatgccttgtataaaatccaaaatgaatgcaaaattgttttcacttgtattgactttatgttgtatgattccaatctctgttctgtttggcacttgtatttaattcttcacctttgtaagacatttgtatattgtggatgtgttcattcaagctatttaatatctggcactgttaatacacagtactttattgtacagactgttttactgttttaattgtagttctgtgtactttttttggatggggctggcatgttttctttgtttcctggcaatacgacgtgggaatttcaatgcgttttgttgtagatgctaacgtgtcagaatcctttacattcaacttttctaagaaaagcattttcagtcttgtagtgtgtgcttacagtaactaattttgttgaaaatggtttcaagttattcaaatttgtacaggactgtaaagatttgttgacagcaaaatgttgaagaaaaaagcttatagaataaaagctataaagtatatattaggatctgcaaacaatgaagaattatgtaatatattgtacaaatgtaagcaaaggctctgaaataaaatgccatagtttgtgaatcctt

SEQ ID NO: 441345 - DNA, 4990 bp, Homo sapiens
agcgatgtttgcccgtcagtcgagtccggagtgaggagctcggtcgccgaagcggagggagactcttgagcttcatcttgccgccgccacggccaccgcctggacctttgcccggagggagctgcagagggtccatcgccgccgtcctctggagggcagcgcgattgggggcccggacctccagtccgggggggatttttcgtcgtccccctccccccaaccagggagcccgagcggccgccaaacaaaggtaccagtcgccgccgcgggaggaggaagatgatgaaaaagaaaaggaggataatagcagtgaagaagaagaagaaatagaaccatttccagaagaaagggagaactttcttcagcaattgtacaaatttatggaagatagaggtacacctattaacaaacgacctgtacttggatatcgaaatttgaatctctttaagttattcagacttgtacacaaacttggaggatttgataatattgaaagtggagctgtttggaaacaagtctaccaagatcttggaatccctgtcttaaattcagctgcaggatacaatgttaaatgtgcttataaaaaatacttatatggttttgaggagtactgtagatcagccaacattgaatttcagatggcattgccagagaaagttgttaacaagcaatgtaaggagtgtgaaaatgtaaaagaaataaaagttaaggaggaaaatgaaacagagatcaaagaaataaagatggaggaggagaggaatataataccaagagaagaaaagcctattgaggatgaaattgaaagaaaagaaaatattaagccctctctgggaagtaaaaagaatttattagaatctatacctacacattctgatcaggaaaaagaagttaacattaaaaaaccagaagacaatgaaaatctggatgacaaagatgatgacacaactagggtagatgaatccctcaacataaaggtagaagctgaggaagaaaaagcaaaatctggagatgaaacgaataaagaagaagatgaagatgatgaagaagcagaagaggaggaggaggaggaagaagaagaagaggatgaagatgatgatgacaacaatgaggaagaggagtttgagtgctatccaccaggcatgaaagtccaagtgcggtatggacgagggaaaaatcaaaaaatgtatgaagctagtattaaagattctgatgtcgaaggtggagaggtcctttacttggtgcattactgcggatggaatgtgagatacgatgaatggattaaagcagataaaatagtaagacctgctgataaaaatgtgccaaagataaaacatcggaagaaaataaagaataaattagacaaagaaaaagacaaagatgaaaaatactctccaaaaaactgtaaacttcggcgcttgtccaaaccaccatttcagacaaatccatctcctgaaatggtatccaaactggatctcactgatgccaaaaactctgatactgctcatattaagtccatagaaattacttcgatccttaatggacttcaagcttctgaaagttctgctgaagacagtgagcaggaagatgagagaggtgctcaagacatggataataatggcaaagaggaatctaagattgatcatttgaccaacaacagaaatgatcttatttcaaaggaggaacagaacagttcatctttgctagaagaaaacaaagttcatgcagatttggtaatatccaaaccagtgtcaaaatctccagaaagattaaggaaagatatagaagtattatccgaagatactgattatgaagaagatgaagtcacaaaaaagagaaaggatgtcaagaaggacacaacagataaatcttcaaaaccacaaataaaacgtggtaaaagaaggtattgcaatacagaagagtgtctaaaaactggatcacctggcaaaaaggaagagaaggccaagaacaaagaatcactttgcatggaaaacagtagcaacagctcttcagatgaagatgaagaagaaacaaaagcaaagatgacaccaactaagaaatacaatggtttggaggaaaaaagaaaatctctacggacaactggtttctattcaggattttcagaagtggcagaaaaaaggattaaacttttaaataactctgatgaaagacttcaaaacagcagggccaaagatcgaaaagatgtctggtcaagtattcagggacagtggcctaaaaaaacgctgaaagagcttttttcagactctgatactgaggctgcagcttccccaccgcatcctgccccagaggagggggtggcagaggagtcactgcagactgtggctgaagaggagagttgttcacccagtgtagaactagaaaaaccacctccagtcaatgtcgatagtaaacccattgaagaaaaaacagtagaggtcaatgacagaaaagcagaatttccaagtagtggcagtaattcagtgctaaatacccctcctactacacctgaatcgccttcatcagtcactgtaacagaaggcagccggcagcagtcttctgtaacagtatcagaaccactggctccaaaccaagaagaggttcgaagtatcaagagtgaaactgatagcacaattgaggtggatagtgttgctggggagctccaagacctccagtctgaagggaatagctcgccagcaggttttgatgccagtgtgagctcaagcagtagtaatcagccagaaccagaacatcctgaaaaagcctgtacaggtcagaaaagagtgaaagatgctcagggaggaggaagttcatcaaaaaagcagaaaagaagccataaagcaacagtggtaaacaacaaaaagaagggaaaaggcacaaatagtagtgatagtgaagaactttcagctggtgaaagtataactaagagtcagccagtcaaatcagtttccactggaatgaagtctcatagtaccaaatctcccgcaaggacgcagtctccaggaaaatgtggaaagaatggtgataaggatcctgatctcaaggaacccagtaatcgattacccaaagtttacaaatggagttttcagatgtcggacctggaaaatatgacaagtgccgaacgcatcacaattcttcaagaaaaacttcaagaaatcagaaaacattatctgtcattaaaatctgaagtagcttccattgatcggaggagaaagcgtttaaagaagaaagagagagaaagtgctgctacatcctcatcctcctcttcaccttcatccagttccataacagctgctgttatgttaactttagctgaaccgtcaatgtccagcgcatcacaaaatggaatgtcagttgagtgcaggtgacagcaggacttgctaaagcactttgcacttaatggctgttgagggccactttttttttatactgcacagtggcacaaaaaaatatcagacaagcactattttatatttaaaaattgtttcttgacaagctgacttggcacttaagtgcacttttttatgaagaaaaagtacaatgaactgcttttcctcaagcaataattgtttccaacttgtctgggaattgtgtgtctggtaactggaaggccttccactgtggcaaatggaggcttttcactgcctgtagagacaatacagtaagcatagttaaggggtgggtcagaacatgttaagataacttactgtatatgtattcccttgtattttgttaaagctggaacatttgatatttttccatttatttatgaaaaaatatgaacctattttcatttgtacaaggtaattgttttttaaagcaagtcaccttagggtggctttaattgtataagtcaagcacatgtaataaattcaaaacctgcagttaacaggatattagacatcaatcctggtaaccaaatattaaagattctctttaaaaaagactgaacatgtttacaggtttgaattaggctaaaaggtcttgcagtggcttttcatggcccttcaaattggaatggaactactgtactttgccatttttctataaatcagtatttttttttaattttgatatacattgtgtgaaaaaagaaaatggctaataaactgtattaaatcttaaacaatgtataaagattgtacttagccagttcaaagtgtatatttattcataatgaattataacagttatatttttgtgttttcttgtaaatgtttcttttcccttaaatacagataattcatttgtattgcttattttattatgagctacaacaaaaggacttcaggaacaagtaatgtattagtatggttcaagattgttgataggaactgtctcaaaaggatggtggttattttaaatataaatagctaatgggggtggtaggcctataaaattaaatgccttgtataaaatccaaaatgaatgcaaaattgttttcacttgtattgactttatgttgtatgattccaatctctgttctgtttggcacttgtatttaattcttcacctttgtaagacatttgtatattgtggatgtgttcattcaagctatttaatatctggcactgttaatacacagtactttattgtacagactgttttactgttttaattgtagttctgtgtactttttttggatggggctggcatgttttctttgtttcctggcaatacgacgtgggaatttcaatgcgttttgttgtagatgctaacgtgtcagaatcctttacattcaacttttctaagaaaagcattttcagtcttgtagtgtgtgcttacagtaactaattttgttgaaaatggtttcaagttattcaaatttgtacaggactgtaaagatttgttgacagcaaaatgttgaagaaaaaagcttatagaataaaagctataaagtatatattaggatctgcaaacaatgaagaattatgtaatatattgtacaaatgtaagcaaaggctctgaaataaaatgccatagtttgtgaatcctt

SEQ ID NO: 441346 - DNA, 5975 bp, Homo sapiens
agcgatgtttgcccgtcagtcgagtccggagtgaggagctcggtcgccgaagcggagggagactcttgagcttcatcttgccgccgccacggccaccgcctggacctttgcccggagggagctgcagagggtccatcgccgccgtcctctggagggcagcgcgattgggggcccggacctccagtccgggggggatttttcgtcgtccccctccccccaaccagggagcccgagcggccgccaaacaaaggtaccagtcgccgccgcgggaggaggaggagccggagcctctgcctcagcagccgctggacccgccgcccttcttccccatctctcccccgggcctgctggttttgggggggagaaggagagaggggactctggacgtgccagggtcagatctcgcctccgaggaaggtgcagctgaacctggtgttttagaggataccttggtcccagagtcatcatgaaggcccttgatgagcctccctatttgacagtgggcactgatgtgagtgctaaatacagaggagccttttgtgaagccaagatcaagacagcaaaaagacttgtcaaagtcaaggtgacatttagacatgattcttcaacagtggaagttcaggatgaccacataaagggcccactaaaggtaggagctattgtggaagtgaagaatcttgatggtgcatatcaggaagctgttatcaataaactaacagatgcgagttggtacactgtagtttttgatgacggagatgagaagacactgagacgatcttcactgtgcctgaaaggagagaggcattttgctgaaagtgaaacattagaccagctcccactcaccaaccctgagcattttggcactccagtcataggaaagaaaacaaatagaggaagaagatctaatcatataccagaggaagagtcttcatcatcctccagtgatgaagatgaggatgataggaaacagattgatgagctactaggcaaagttgtatgtgtagattacattagtttggataaaaagaaagcactgtggtttcctgcattggtggtttgtcctgattgtagtgatgagattgctgtaaaaaaggacaatattcttgttcgatctttcaaagatggaaaatttacttcagttccaagaaaagatgtccatgaaattactagtgacactgcaccaaagcctgatgctgttttaaagcaagcctttgaacaggcacttgaatttcacaaaagtagaactattcctgctaactggaagactgaattgaaagaagatagctctagcagtgaagcagaggaagaagaggaggaggaagatgatgaaaaagaaaaggaggataatagcagtgaagaagaagaagaaatagaaccatttccagaagaaagggagaactttcttcagcaattgtacaaatttatggaagatagaggtacacctattaacaaacgacctgtacttggatatcgaaatttgaatctctttaagttattcagacttgtacacaaacttggaggatttgataatattgaaagtggagctgtttggaaacaagtctaccaagatcttggaatccctgtcttaaattcagctgcaggatacaatgttaaatgtgcttataaaaaatacttatatggttttgaggagtactgtagatcagccaacattgaatttcagatggcattgccagagaaagttgttaacaagcaatgtaaggagtgtgaaaatgtaaaagaaataaaagttaaggaggaaaatgaaacagagatcaaagaaataaagatggaggaggagaggaatataataccaagagaagaaaagcctattgaggatgaaattgaaagaaaagaaaatattaagccctctctgggaagtaaaaagaatttattagaatctatacctacacattctgatcaggaaaaagaagttaacattaaaaaaccagaagacaatgaaaatctggatgacaaagatgatgacacaactagggtagatgaatccctcaacataaaggtagaagctgaggaagaaaaagcaaaatctggagatgaaacgaataaagaagaagatgaagatgatgaagaagcagaagaggaggaggaggaggaagaagaagaagaggatgaagatgatgatgacaacaatgaggaagaggagtttgagtgctatccaccaggcatgaaagtccaagtgcggtatggacgagggaaaaatcaaaaaatgtatgaagctagtattaaagattctgatgtcgaaggtggagaggtcctttacttggtgcattactgcggatggaatgtgagatacgatgaatggattaaagcagataaaatagtaagacctgctgataaaaatgtgccaaagataaaacatcggaagaaaataaagaataaattagacaaagaaaaagacaaagatgaaaaatactctccaaaaaactgtaaacttcggcgcttgtccaaaccaccatttcagacaaatccatctcctgaaatggtatccaaactggatctcactgatgccaaaaactctgatactgctcatattaagtccatagaaattacttcgatccttaatggacttcaagcttctgaaagttctgctgaagacagtgagcaggaagatgagagaggtgctcaagacatggataataatggcaaagaggaatctaagattgatcatttgaccaacaacagaaatgatcttatttcaaaggaggaacagaacagttcatctttgctagaagaaaacaaagttcatgcagatttggtaatatccaaaccagtgtcaaaatctccagaaagattaaggaaagatatagaagtattatccgaagatactgattatgaagaagatgaagtcacaaaaaagagaaaggatgtcaagaaggacacaacagataaatcttcaaaaccacaaataaaacgtggtaaaagaaggtattgcaatacagaagagtgtctaaaaactggatcacctggcaaaaaggaagagaaggccaagaacaaagaatcactttgcatggaaaacagtagcaacagctcttcagatgaagatgaagaagaaacaaaagcaaagatgacaccaactaagaaatacaatggtttggaggaaaaaagaaaatctctacggacaactggtttctattcaggattttcagaagtggcagaaaaaaggattaaacttttaaataactctgatgaaagacttcaaaacagcagggccaaagatcgaaaagatgtctggtcaagtattcagggacagtggcctaaaaaaacgctgaaagagcttttttcagactctgatactgaggctgcagcttccccaccgcatcctgccccagaggagggggtggcagaggagtcactgcagactgtggctgaagaggagagttgttcacccagtgtagaactagaaaaaccacctccagtcaatgtcgatagtaaacccattgaagaaaaaacagtagaggtcaatgacagaaaagcagaatttccaagtagtggcagtaattcagtgctaaatacccctcctactacacctgaatcgccttcatcagtcactgtaacagaaggcagccggcagcagtcttctgtaacagtatcagaaccactggctccaaaccaagaagaggttcgaagtatcaagagtgaaactgatagcacaattgaggtggatagtgttgctggggagctccaagacctccagtctgaagggaatagctcgccagcaggttttgatgccagtgtgagctcaagcagtagtaatcagccagaaccagaacatcctgaaaaagcctgtacaggtcagaaaagagtgaaagatgctcagggaggaggaagttcatcaaaaaagcagaaaagaagccataaagcaacagtggtaaacaacaaaaagaagggaaaaggcacaaatagtagtgatagtgaagaactttcagctggtgaaagtataactaagagtcagccagtcaaatcagtttccactggaatgaagtctcatagtaccaaatctcccgcaaggacgcagtctccaggaaaatgtggaaagaatggtgataaggatcctgatctcaaggaacccagtaatcgattacccaaagtttacaaatggagttttcagatgtcggacctggaaaatatgacaagtgccgaacgcatcacaattcttcaagaaaaacttcaagaaatcagaaaacattatctgtcattaaaatctgaagtagcttccattgatcggaggagaaagcgtttaaagaagaaagagagagaaagtgctgctacatcctcatcctcctcttcaccttcatccagttccataacagctgctgttatgttaactttagctgaaccgtcaatgtccagcgcatcacaaaatggaatgcttcaaccactcccagaagacgtccttcactcccaaaatgaggcttttctgaaacggcgaggaccaccaaccgacggcgacaaacctgctccctcacccagcgcctcccttcgccgccgcccggcggccgactgccggaggggagggggcgtggccagagagcggaagtgcccggaacccggaagtgcgagctggcgcgcagctgcagtctgggagtctttggagtaagaatggccttggaagggatgagcaaacggaagagaaagagaagtgtccaggagggagagaatcctgacgacggcgttcgcgggagtccgccggaagactacaggcttggacaggtcgccagtagcttatttcgcggcgaacaccattccagaggtggcaccggtcggctggcgtccctcttcagttctctggagccccagattcaacccgtgtacgtgcctgtgcctaaacaaaccatcaaaaaaacgaaacggaatgaggaggaagaaagtacatcccagattgaaagaccactttcgcaagaacctgccaaaaaagtgaaagcgaagaagaaacacactaacgcagaaaaaaagttggcagacagggaaagcgctctagcgagtgctgatttagaagaagaaattcaccagaaacaagggcagaaaaggaaaaattctcaacctggtgttaaagtagcagatagaaaaatacttgatgacacagaagacacagttgtcagtcaaagaaagaaaattcaaatcaaccaagaagaagagagattaaagaatgagagaactgtgtttgttgggaatttgcctgttacatgtaataagaagaagctgaagtcgttttttaaagagtatggacaaatagaatctgtacgatttcgttctctgattccagcagagggaacgctatccaaaaagttggcagcaataaaacgtaaaattcatcctgatcagaaaaatattaatgcctatgttgtgtttaaggaggagagtgctgccacgcaagcattgaaaagaaatggggcccagattgcagatggatttcgtattagagttgatctcgcatctgagacctcatctagagacaagagatcggtttttgtggggaatctcccttataaagttgaagaatctgccattgagaagcactttctggactgtggaagtatcatggccgtgaggattgtgagagacaaaatgacaggcatcggcaaagggtttggctatgtgctctttgagaatacagattctgttcatcttgctctgaaattaaataattctgaactcatggggagaaaactcagagtcatgcgttctgttaataaagaaaaatttaaacaacaaaattcaaatccacgattgaagaatgtcagtaaacctaagcagggacttaattttacttccaaaactgcagaaggacatcctaaaagcttatttattggagaaaaagctgttctccttaaaacgaagaagaaaggacagaagaaaagtggacgccctaagaaacagagaaaacagaaataacaaccaggaactgctttttcttttcctgctgagtactgctaataaaagtgctattatctgctgat

SEQ ID NO: 441347 - DNA, 6326 bp, Homo sapiens
agcgatgtttgcccgtcagtcgagtccggagtgaggagctcggtcgccgaagcggagggagactcttgagcttcatcttgccgccgccacggccaccgcctggacctttgcccggagggagctgcagagggtccatcgccgccgtcctctggagggcagcgcgattgggggcccggacctccagtccgggggggatttttcgtcgtccccctccccccaaccagggagcccgagcggccgccaaacaaaggtaccagtcgccgccgcgggaggaggaggagccggagcctctgcctcagcagccgctggacccgccgcccttcttccccatctctcccccgggcctgctggttttgggggggagaaggagagaggggactctggacgtgccagggtcagatctcgcctccgaggaaggtgcagctgaacctggtgttttagaggataccttggtcccagagtcatcatgaaggcccttgatgagcctccctatttgacagtgggcactgatgtgagtgctaaatacagaggagccttttgtgaagccaagatcaagacagcaaaaagacttgtcaaagtcaaggtgacatttagacatgattcttcaacagtggaagttcaggatgaccacataaagggcccactaaaggtaggagctattgtggaagtgaagaatcttgatggtgcatatcaggaagctgttatcaataaactaacagatgcgagttggtacactgtagtttttgatgacggagatgagaagacactgagacgatcttcactgtgcctgaaaggagagaggcattttgctgaaagtgaaacattagaccagctcccactcaccaaccctgagcattttggcactccagtcataggaaagaaaacaaatagaggaagaagatctaatcatataccagaggaagagtcttcatcatcctccagtgatgaagatgaggatgataggaaacagattgatgagctactaggcaaagttgtatgtgtagattacattagtttggataaaaagaaagcactgtggtttcctgcattggtggtttgtcctgattgtagtgatgagattgctgtaaaaaaggacaatattcttgttcgatctttcaaagatggaaaatttacttcagttccaagaaaagatgtccatgaaattactagtgacactgcaccaaagcctgatgctgttttaaagcaagcctttgaacaggcacttgaatttcacaaaagtagaactattcctgctaactggaagactgaattgaaagaagatagctctagcagtgaagcagaggaagaagaggaggaggaagatgatgaaaaagaaaaggaggataatagcagtgaagaagaagaagaaatagaaccatttccagaagaaagggagaactttcttcagcaattgtacaaatttatggaagatagaggtacacctattaacaaacgacctgtacttggatatcgaaatttgaatctctttaagttattcagacttgtacacaaacttggaggatttgataatattgaaagtggagctgtttggaaacaagtctaccaagatcttggaatccctgtcttaaattcagctgcaggatacaatgttaaatgtgcttataaaaaatacttatatggttttgaggagtactgtagatcagccaacattgaatttcagatggcattgccagagaaagttgttaacaagcaatgtaaggagtgtgaaaatgtaaaagaaataaaagttaaggaggaaaatgaaacagagatcaaagaaataaagatggaggaggagaggaatataataccaagagaagaaaagcctattgaggatgaaattgaaagaaaagaaaatattaagccctctctgggaagtaaaaagaatttattagaatctatacctacacattctgatcaggaaaaagaagttaacattaaaaaaccagaagacaatgaaaatctggatgacaaagatgatgacacaactagggtagatgaatccctcaacataaaggtagaagctgaggaagaaaaagcaaaatctggagatgaaacgaataaagaagaagatgaagatgatgaagaagcagaagaggaggaggaggaggaagaagaagaagaggatgaagatgatgatgacaacaatgaggaagaggagtttgagtgctatccaccaggcatgaaagtccaagtgcggtatggacgagggaaaaatcaaaaaatgtatgaagctagtattaaagattctgatgtcgaaggtggagaggtcctttacttggtgcattactgcggatggaatgtgagatacgatgaatggattaaagcagataaaatagtaagacctgctgataaaaatgtgccaaagataaaacatcggaagaaaataaagaataaattagacaaagaaaaagacaaagatgaaaaatactctccaaaaaactgtaaacttcggcgcttgtccaaaccaccatttcagacaaatccatctcctgaaatggtatccaaactggatctcactgatgccaaaaactctgatactgctcatattaagtccatagaaattacttcgatccttaatggacttcaagcttctgaaagttctgctgaagacagtgagcaggaagatgagagaggtgctcaagacatggataataatggcaaagaggaatctaagattgatcatttgaccaacaacagaaatgatcttatttcaaaggaggaacagaacagttcatctttgctagaagaaaacaaagttcatgcagatttggtaatatccaaaccagtgtcaaaatctccagaaagattaaggaaagatatagaagtattatccgaagatactgattatgaagaagatgaagtcacaaaaaagagaaaggatgtcaagaaggacacaacagataaatcttcaaaaccacaaataaaacgtggtaaaagaaggtattgcaatacagaagagtgtctaaaaactggatcacctggcaaaaaggaagagaaggccaagaacaaagaatcactttgcatggaaaacagtagcaacagctcttcagatgaagatgaagaagaaacaaaagcaaagatgacaccaactaagaaatacaatggtttggaggaaaaaagaaaatctctacggacaactggtttctattcaggattttcagaagtggcagaaaaaaggattaaacttttaaataactctgatgaaagacttcaaaacagcagggccaaagatcgaaaagatgtctggtcaagtattcagggacagtggcctaaaaaaacgctgaaagagcttttttcagactctgatactgaggctgcagcttccccaccgcatcctgccccagaggagggggtggcagaggagtcactgcagactgtggctgaagaggagagttgttcacccagtgtagaactagaaaaaccacctccagtcaatgtcgatagtaaacccattgaagaaaaaacagtagaggtcaatgacagaaaagcagaatttccaagtagtggcagtaattcagtgctaaatacccctcctactacacctgaatcgccttcatcagtcactgtaacagaaggcagccggcagcagtcttctgtaacagtatcagaaccactggctccaaaccaagaagaggttcgaagtatcaagagtgaaactgatagcacaattgaggtggatagtgttgctggggagctccaagacctccagtctgaagggaatagctcgccagcaggttttgatgccagtgtgagctcaagcagtagtaatcagccagaaccagaacatcctgaaaaagcctgtacaggtcagaaaagagtgaaagatgctcagggaggaggaagttcatcaaaaaagcagaaaagaagccataaagcaacagtggtaaacaacaaaaagaagggaaaaggcacaaatagtagtgatagtgaagaactttcagctggtgaaagtataactaagagtcagccagtcaaatcagtttccactggaatgaagtctcatagtaccaaatctcccgcaaggacgcagtctccaggaaaatgtggaaagaatggtgataaggatcctgatctcaaggaacccagtaatcgattacccaaagtttacaaatggagttttcagatgtcggacctggaaaatatgacaagtgccgaacgcatcacaattcttcaagaaaaacttcaagaaatcagaaaacattatctgtcattaaaatctgaagtagcttccattgatcggaggagaaagcgtttaaagaagaaagagagagaaagtgctgctacatcctcatcctcctcttcaccttcatccagttccataacagctgctgttatgttaactttagctgaaccgtcaatgtccagcgcatcacaaaatggaatgcttcaaccactcccagaagacgtccttcactcccaaaatgaggcttttctgaaacggcgaggaccaccaaccgacggcgacaaacctgctccctcacccagcgcctcccttcgccgccgcccggcggccgactgccggaggggagggggcgtggccagagagcggaagtgcccggaacccggaagtgcgagctggcgcgcagctgcagtctgggagtctttggagtaagaatggccttggaagggatgagcaaacggaagagaaagagaagtgtccaggagggagagaatcctgacgacggcgttcgcgggagtccgccggaagactacaggcttggacaggtcgccagtagcttatttcgcggcgaacaccattccagaggtggcaccggtcggctggcgtccctcttcagttctctggagccccagattcaacccgtgtacgtgcctgtgcctaaacaaaccatcaaaaaaacgaaacggaatgaggaggaagaaagtacatcccagattgaaagaccactttcgcaagaacctgccaaaaaagtgaaagcgaagaagaaacacactaacgcagaaaaaaagttggcagacagggaaagcgctctagcgagtgctgatttagaagaagaaattcaccagaaacaagggcagaaaaggaaaaattctcaacctggtgttaaagtagcagatagaaaaatacttgatgacacagaagacacagttgtcagtcaaagaaagaaaattcaaatcaaccaagaagaagagagattaaagaatgagagaactgtgtttgttgggaatttgcctgttacatgtaataagaagaagctgaagtcgttttttaaagagtatggacaaatagaatctgtacgatttcgttctctgattccagcagagggaacgctatccaaaaagttggcagcaataaaacgtaaaattcatcctgatcagaaaaatattaatgcctatgttgtgtttaaggaggagagtgctgccacgcaagcattgaaaagaaatggggcccagattgcagatggatttcgtattagagttgatctcgcatctgagacctcatctagagacaagagatcggtttttgtggggaatctcccttataaagttgaagaatctgccattgagaagcactttctggactgtggaagtatcatggccgtgaggattgtgagagacaaaatgacaggcatcggcaaagggtttggctatgtgctctttgagaatacagattctgttcatcttgctctgaaattaaataattctgaactcatggggagaaaactcagagtcatgcgttctgttaataaagaaaaatttaaacaacaaaattcaaatccacgattgaagaatgtcagtaaacctaagcagggacttaattttacttccaaaactgcagaaggacatcctaaaagcttatttattggagaaaaagctgttctccttaaaacgaagaagaaaggacagaagaaaagtggacgccctaagaaacagagaaaacagaaataacaaccaggaactgctttttcttttcctgctgagtactgctaataaaagtgctattatctgctgataaaaagctaaaaaagaaaaacattgtgtggcgggcgcgcgccaccaaggagagtttaaacacaactggggtggggcggcgcccaaggatatgacacaggggacacgtgccccctgacacgctgccagccaagggtgggtctcccaaaaaaagccggggcacgacggtagaacaccagagagtggggactggcaagccgcgaaacagcgtgcactcgctgcctctctaccgacactgactcgacacgccatacaagagcagaggcagcatccgaagacgagcacgactagtgaaagacgcgctagagacacactggatacttgatagtcgtcgacgcgaggggagggggggg

SEQ ID NO: 441348 - DNA, 5492 bp, Homo sapiens
agcgatgtttgcccgtcagtcgagtccggagtgaggagctcggtcgccgaagcggagggagactcttgagcttcatcttgccgccgccacggccaccgcctggacctttgcccggagggagctgcagagggtccatcgccgccgtcctctggagggcagcgcgattgggggcccggacctccagtccgggggggatttttcgtcgtccccctccccccaaccagggagcccgagcggccgccaaacaaaggtaccagtcgccgccgcgggaggaggaggagccggagcctctgcctcagcagccgctggacccgccgcccttcttccccatctctcccccgggcctgctggttttgggggggagaaggagagaggggactctggacgtgccagggtcagatctcgcctccgaggaaggtgcagctgaacctggtgttttagaggataccttggtcccagagtcatcatgaaggcccttgatgagcctccctatttgacagtgggcactgatgtgagtgctaaatacagaggagccttttgtgaagccaagatcaagacagcaaaaagacttgtcaaagtcaaggtgacatttagacatgattcttcaacagtggaagttcaggatgaccacataaagggcccactaaaggtaggagctattgtggaagtgaagaatcttgatggtgcatatcaggaagctgttatcaataaactaacagatgcgagttggtacactgtagtttttgatgacggagatgagaagacactgagacgatcttcactgtgcctgaaaggagagaggcattttgctgaaagtgaaacattagaccagctcccactcaccaaccctgagcattttggcactccagtcataggaaagaaaacaaatagaggaagaagatctaatcatataccagaggaagagtcttcatcatcctccagtgatgaagatgaggatgataggaaacagattgatgagctactaggcaaagttgtatgtgtagattacattagtttggataaaaagaaagcactgtggtttcctgcattggtggtttgtcctgattgtagtgatgagattgctgtaaaaaaggacaatattcttgttcgatctttcaaagatggaaaatttacttcagttccaagaaaagatgtccatgaaattactagtgacactgcaccaaagcctgatgctgttttaaagcaagcctttgaacaggcacttgaatttcacaaaagtagaactattcctgctaactggaagactgaattgaaagaagatagctctagcagtgaagcagaggaagaagaggaggaggaagatgatgaaaaagaaaaggaggataatagcagtgaagaagaagaagaaatagaaccatttccagaagaaagggagaactttcttcagcaattgtacaaatttatggaagatagaggtacacctattaacaaacgacctgtacttggatatcgaaatttgaatctctttaagttattcagacttgtacacaaacttggaggatttgataatattgaaagtggagctgtttggaaacaagtctaccaagatcttggaatccctgtcttaaattcagctgcaggatacaatgttaaatgtgcttataaaaaatacttatatggttttgaggagtactgtagatcagccaacattgaatttcagatggcattgccagagaaagttgttaacaagcaatgtaaggagtgtgaaaatgtaaaagaaataaaagttaaggaggaaaatgaaacagagatcaaagaaataaagatggaggaggagaggaatataataccaagagaagaaaagcctattgaggatgaaattgaaagaaaagaaaatattaagccctctctgggaagtaaaaagaatttattagaatctatacctacacattctgatcaggaaaaagaagttaacattaaaaaaccagaagacaatgaaaatctggatgacaaagatgatgacacaactagggtagatgaatccctcaacataaaggtagaagctgaggaagaaaaagcaaaatctggagatgaaacgaataaagaagaagatgaagatgatgaagaagcagaagaggaggaggaggaggaagaagaagaagaggatgaagatgatgatgacaacaatgaggaagaggagtttgagtgctatccaccaggcatgaaagtccaagtgcggtatggacgagggaaaaatcaaaaaatgtatgaagctagtattaaagattctgatgtcgaaggtggagaggtcctttacttggtgcattactgcggatggaatgtgagatacgatgaatggattaaagcagataaaatagtaagacctgctgataaaaatgtgccaaagataaaacatcggaagaaaataaagaataaattagacaaagaaaaagacaaagatgaaaaatactctccaaaaaactgtaaacttcggcgcttgtccaaaccaccatttcagacaaatccatctcctgaaatggtatccaaactggatctcactgatgccaaaaactctgatactgctcatattaagtccatagaaattacttcgatccttaatggacttcaagcttctgaaagttctgctgaagacagtgagcaggaagatgagagaggtgctcaagacatggataataatggcaaagaggaatctaagattgatcatttgaccaacaacagaaatgatcttatttcaaaggaggaacagaacagttcatctttgctagaagaaaacaaagttcatgcagatttggtaatatccaaaccagtgtcaaaatctccagaaagattaaggaaagatatagaagtattatccgaagatactgattatgaagaagatgaagtcacaaaaaagagaaaggatgtcaagaaggacacaacagataaatcttcaaaaccacaaataaaacgtggtaaaagaaggtattgcaatacagaagagtgtctaaaaactggatcacctggcaaaaaggaagagaaggccaagaacaaagaatcactttgcatggaaaacagtagcaacagctcttcagatgaagatgaagaagaaacaaaagcaaagatgacaccaactaagaaatacaatggtttggaggaaaaaagaaaatctctacggacaactggtttctattcaggattttcagaagtggcagaaaaaaggattaaacttttaaataactctgatgaaagacttcaaaacagcagggccaaagatcgaaaagatgtctggtcaagtattcagggacagtggcctaaaaaaacgctgaaagagcttttttcagactctgatactgaggctgcagcttccccaccgcatcctgccccagaggagggggtggcagaggagtcactgcagactgtggctgaagaggagagttgttcacccagtgtagaactagaaaaaccacctccagtcaatgtcgatagtaaacccattgaagaaaaaacagtagaggtcaatgacagaaaagcagaatttccaagtagtggcagtaattcagtgctaaatacccctcctactacacctgaatcgccttcatcagtcactgtaacagaaggcagccggcagcagtcttctgtaacagtatcagaaccactggctccaaaccaagaagaggttcgaagtatcaagagtgaaactgatagcacaattgaggtggatagtgttgctggggagctccaagacctccagtctgaagggaatagctcgccagcaggttttgatgccagtgtgagctcaagcagtagtaatcagccagaaccagaacatcctgaaaaagcctgtacaggtcagaaaagagtgaaagatgctcagggaggaggaagttcatcaaaaaagcagaaaagaagccataaagcaacagtggtaaacaacaaaaagaagggaaaaggcacaaatagtagtgatagtgaagaactttcagctggtgaaagtataactaagagtcagccagtcaaatcagtttccactggaatgaagtctcatagtaccaaatctcccgcaaggacgcagtctccaggaaaatgtggaaagaatggtgataaggatcctgatctcaaggaacccagtaatcgattacccaaagtttacaaatggagttttcagatgtcggacctggaaaatatgacaagtgccgaacgcatcacaattcttcaagaaaaacttcaagaaatcagaaaacattatctgtcattaaaatctgaagtagcttccattgatcggaggagaaagcgtttaaagaagaaagagagagaaagtgctgctacatcctcatcctcctcttcaccttcatccagttccataacagctgctgttatgttaactttagctgaaccgtcaatgtccagcgcatcacaaaatggaatgcttcaaccactcccagaagacgtccttcactcccaaaatgaggcttttctgaaacggcgaggaccaccaaccgacggcgacaaacctgctccctcacccagcgcctcccttcgccgccgcccggcggccgactgccggaggggagggggcgtggccagagagcggaagtgcccggaacccggaagtgcgagctggcgcgcagctgcagtctgggagtctttggagtaagaatggccttggaagggatgagcaaacggaagagaaagagaagtgtccaggagggagagaatcctgacgacggcgttcgcgggagtccgccggaagactacaggcttggacaggtcgccagtagcttatttcgcggcgaacaccattccagaggtggcaccggtcggctggcgtccctcttcagttctctggagccccagattcaacccgtgtacgtgcctgtgcctaaacaaaccatcaaaaaaacgaaacggaatgaggaggaagaaagtacatcccagattgaaagaccactttcgcaagaacctgccaaaaaagtgaaagcgaagaagaaacacactaacgcagaaaaaaagttggcagacagggaaagcgctctagcgagtgctgatttagaagaagaaattcaccagaaacaagggcagaaaaggaaaaattctcaacctggtgttaaagtagcagatagaaaaatacttgatgacacagaagacacagttgtcagtcaaagaaagaaaattcaaatcaaccaagaagaagagagattaaagaatgagagaactgtgtttgttgggaatttgcctgttacatgtaataagaagaagctgaagtcgttttttaaagagtatggacaaatagaatctgtacgatttcgttctctggtatgtttcattcccccgtaaaattacataatattaaaatttattgcatttaaatcagatgaacttattgctgttagtgagatggtgaagcactttaaccttttgaatcaataggttcaaatttaacccaagaaaagagttgctcttactatctactgctgactcttgaactttttaaataatgtattgagtttacttaataaaatgatactcttgct

SEQ ID NO: 441349 - DNA, 5427 bp, Homo sapiens
agcgatgtttgcccgtcagtcgagtccggagtgaggagctcggtcgccgaagcggagggagactcttgagcttcatcttgccgccgccacggccaccgcctggacctttgcccggagggagctgcagagggtccatcgccgccgtcctctggagggcagcgcgattgggggcccggacctccagtccgggggggatttttcgtcgtccccctccccccaaccagggagcccgagcggccgccaaacaaaggtaccagtcgccgccgcgggaggaggaggagccggagcctctgcctcagcagccgctggacccgccgcccttcttccccatctctcccccgggcctgctggttttgggggggagaaggagagaggggactctggacgtgccagggtcagatctcgcctccgaggaaggtgcagctgaacctggtgttttagaggataccttggtcccagagtcatcatgaaggcccttgatgagcctccctatttgacagtgggcactgatgtgagtgctaaatacagaggagccttttgtgaagccaagatcaagacagcaaaaagacttgtcaaagtcaaggtgacatttagacatgattcttcaacagtggaagttcaggatgaccacataaagggcccactaaaggtaggagctattgtggaagtgaagaatcttgatggtgcatatcaggaagctgttatcaataaactaacagatgcgagttggtacactgtagtttttgatgacggagatgagaagacactgagacgatcttcactgtgcctgaaaggagagaggcattttgctgaaagtgaaacattagaccagctcccactcaccaaccctgagcattttggcactccagtcataggaaagaaaacaaatagaggaagaagatctaatcatataccagaggaagagtcttcatcatcctccagtgatgaagatgaggatgataggaaacagattgatgagctactaggcaaagttgtatgtgtagattacattagtttggataaaaagaaagcactgtggtttcctgcattggtggtttgtcctgattgtagtgatgagattgctgtaaaaaaggacaatattcttgttcgatctttcaaagatggaaaatttacttcagttccaagaaaagatgtccatgaaattactagtgacactgcaccaaagcctgatgctgttttaaagcaagcctttgaacaggcacttgaatttcacaaaagtagaactattcctgctaactggaagactgaattgaaagaagatagctctagcagtgaagcagaggaagaagaggaggaggaagatgatgaaaaagaaaaggaggataatagcagtgaagaagaagaagaaatagaaccatttccagaagaaagggagaactttcttcagcaattgtacaaatttatggaagatagaggtacacctattaacaaacgacctgtacttggatatcgaaatttgaatctctttaagttattcagacttgtacacaaacttggaggatttgataatattgaaagtggagctgtttggaaacaagtctaccaagatcttggaatccctgtcttaaattcagctgcaggatacaatgttaaatgtgcttataaaaaatacttatatggttttgaggagtactgtagatcagccaacattgaatttcagatggcattgccagagaaagttgttaacaagcaatgtaaggagtgtgaaaatgtaaaagaaataaaagttaaggaggaaaatgaaacagagatcaaagaaataaagatggaggaggagaggaatataataccaagagaagaaaagcctattgaggatgaaattgaaagaaaagaaaatattaagccctctctgggaagtaaaaagaatttattagaatctatacctacacattctgatcaggaaaaagaagttaacattaaaaaaccagaagacaatgaaaatctggatgacaaagatgatgacacaactagggtagatgaatccctcaacataaaggtagaagctgaggaagaaaaagcaaaatctggagatgaaacgaataaagaagaagatgaagatgatgaagaagcagaagaggaggaggaggaggaagaagaagaagaggatgaagatgatgatgacaacaatgaggaagaggagtttgagtgctatccaccaggcatgaaagtccaagtgcggtatggacgagggaaaaatcaaaaaatgtatgaagctagtattaaagattctgatgtcgaaggtggagaggtcctttacttggtgcattactgcggatggaatgtgagatacgatgaatggattaaagcagataaaatagtaagacctgctgataaaaatgtgccaaagataaaacatcggaagaaaataaagaataaattagacaaagaaaaagacaaagatgaaaaatactctccaaaaaactgtaaacttcggcgcttgtccaaaccaccatttcagacaaatccatctcctgaaatggtatccaaactggatctcactgatgccaaaaactctgatactgctcatattaagtccatagaaattacttcgatccttaatggacttcaagcttctgaaagttctgctgaagacagtgagcaggaagatgagagaggtgctcaagacatggataataatggcaaagaggaatctaagattgatcatttgaccaacaacagaaatgatcttatttcaaaggaggaacagaacagttcatctttgctagaagaaaacaaagttcatgcagatttggtaatatccaaaccagtgtcaaaatctccagaaagattaaggaaagatatagaagtattatccgaagatactgattatgaagaagatgaagtcacaaaaaagagaaaggatgtcaagaaggacacaacagataaatcttcaaaaccacaaataaaacgtggtaaaagaaggtattgcaatacagaagagtgtctaaaaactggatcacctggcaaaaaggaagagaaggccaagaacaaagaatcactttgcatggaaaacagtagcaacagctcttcagatgaagatgaagaagaaacaaaagcaaagatgacaccaactaagaaatacaatggtttggaggaaaaaagaaaatctctacggacaactggtttctattcaggattttcagaagtggcagaaaaaaggattaaacttttaaataactctgatgaaagacttcaaaacagcagggccaaagatcgaaaagatgtctggtcaagtattcagggacagtggcctaaaaaaacgctgaaagagcttttttcagactctgatactgaggctgcagcttccccaccgcatcctgccccagaggagggggtggcagaggagtcactgcagactgtggctgaagaggagagttgttcacccagtgtagaactagaaaaaccacctccagtcaatgtcgatagtaaacccattgaagaaaaaacagtagaggtcaatgacagaaaagcagaatttccaagtagtggcagtaattcagtgctaaatacccctcctactacacctgaatcgccttcatcagtcactgtaacagaaggcagccggcagcagtcttctgtaacagtatcagaaccactggctccaaaccaagaagaggttcgaagtatcaagagtgaaactgatagcacaattgaggtggatagtgttgctggggagctccaagacctccagtctgaagggaatagctcgccagcaggttttgatgccagtgtgagctcaagcagtagtaatcagccagaaccagaacatcctgaaaaagcctgtacaggtcagaaaagagtgaaagatgctcagggaggaggaagttcatcaaaaaagcagaaaagaagccataaagcaacagtggtaaacaacaaaaagaagggaaaaggcacaaatagtagtgatagtgaagaactttcagctggtgaaagtataactaagagtcagccagtcaaatcagtttccactggaatgaagtctcatagtaccaaatctcccgcaaggacgcagtctccaggaaaatgtggaaagaatggtgataaggatcctgatctcaaggaacccagtaatcgattacccaaagtttacaaatggagttttcagatgtcggacctggaaaatatgacaagtgccgaacgcatcacaattcttcaagaaaaacttcaagaaatcagaaaacattatctgtcattaaaatctgaagtagcttccattgatcggaggagaaagcgtttaaagaagaaagagagagaaagtgctgctacatcctcatcctcctcttcaccttcatccagttccataacagctgctgttatgttaactttagctgaaccgtcaatgtccagcgcatcacaaaatggaatgcttcaaccactcccagaagacgtccttcactcccaaaatgaggcttttctgaaacggcgaggaccaccaaccgacggcgacaaacctgctccctcacccagcgcctcccttcgccgccgcccggcggccgactgccggaggggagggggcgtggccagagagcggaagtgcccggaacccggaagtgcgagctggcgcgcagctgcagtctgggagtctttggagtaagaatggccttggaagggatgagcaaacggaagagaaagagaagtgtccaggagggagagaatcctgacgacggcgttcgcgggagtccgccggaagactacaggcttggacaggtcgccagtagcttatttcgcggcgaacaccattccagaggtggcaccggtcggctggcgtccctcttcagttctctggagccccagattcaacccgtgtacgtgcctgtgcctaaacaaaccatcaaaaaaacgaaacggaatgaggaggaagaaagtacatcccagattgaaagaccactttcgcaagaacctgccaaaaaagtgaaagcgaagaagaaacacactaacgcagaaaaaaagttggcagacagggaaagcgctctagcgagtgctgatttagaagaagaaattcaccagaaacaagggcagaaaaggaaaaattctcaacctggtgttaaagtagcagatagaaaaatacttgatgacacagaagacacagttgtcagtcaaagaaagaaaattcaaatcaaccaagaagaagagagattaaagaatgagagaactgtgtttgttgggaatttgcctgttacatgtaataagaagaagctgaagtcgttttttaaagagtatggacaaatagaatctgtacgatttcgttctctgattccagcagagggaacgctatccaaaaagttggcagcaataaagctggagtgcaatggcgtgatctcagctcaccgtaatctccgcctccctggttcaagtgattctcctgcctcagcctactgagtagctgggattacaggcatgtgcgct

SEQ ID NO: 441350 - DNA, 5341 bp, Homo sapiens
agcgatgtttgcccgtcagtcgagtccggagtgaggagctcggtcgccgaagcggagggagactcttgagcttcatcttgccgccgccacggccaccgcctggacctttgcccggagggagctgcagagggtccatcgccgccgtcctctggagggcagcgcgattgggggcccggacctccagtccgggggggatttttcgtcgtccccctccccccaaccagggagcccgagcggccgccaaacaaaggtaccagtcgccgccgcgggaggaggaggagccggagcctctgcctcagcagccgctggacccgccgcccttcttccccatctctcccccgggcctgctggttttgggggggagaaggagagaggggactctggacgtgccagggtcagatctcgcctccgaggaaggtgcagctgaacctggtgttttagaggataccttggtcccagagtcatcatgaaggcccttgatgagcctccctatttgacagtgggcactgatgtgagtgctaaatacagaggagccttttgtgaagccaagatcaagacagcaaaaagacttgtcaaagtcaaggtgacatttagacatgattcttcaacagtggaagttcaggatgaccacataaagggcccactaaaggtaggagctattgtggaagtgaagaatcttgatggtgcatatcaggaagctgttatcaataaactaacagatgcgagttggtacactgtagtttttgatgacggagatgagaagacactgagacgatcttcactgtgcctgaaaggagagaggcattttgctgaaagtgaaacattagaccagctcccactcaccaaccctgagcattttggcactccagtcataggaaagaaaacaaatagaggaagaagatctaatcatataccagaggaagagtcttcatcatcctccagtgatgaagatgaggatgataggaaacagattgatgagctactaggcaaagttgtatgtgtagattacattagtttggataaaaagaaagcactgtggtttcctgcattggtggtttgtcctgattgtagtgatgagattgctgtaaaaaaggacaatattcttgttcgatctttcaaagatggaaaatttacttcagttccaagaaaagatgtccatgaaattactagtgacactgcaccaaagcctgatgctgttttaaagcaagcctttgaacaggcacttgaatttcacaaaagtagaactattcctgctaactggaagactgaattgaaagaagatagctctagcagtgaagcagaggaagaagaggaggaggaagatgatgaaaaagaaaaggaggataatagcagtgaagaagaagaagaaatagaaccatttccagaagaaagggagaactttcttcagcaattgtacaaatttatggaagatagaggtacacctattaacaaacgacctgtacttggatatcgaaatttgaatctctttaagttattcagacttgtacacaaacttggaggatttgataatattgaaagtggagctgtttggaaacaagtctaccaagatcttggaatccctgtcttaaattcagctgcaggatacaatgttaaatgtgcttataaaaaatacttatatggttttgaggagtactgtagatcagccaacattgaatttcagatggcattgccagagaaagttgttaacaagcaatgtaaggagtgtgaaaatgtaaaagaaataaaagttaaggaggaaaatgaaacagagatcaaagaaataaagatggaggaggagaggaatataataccaagagaagaaaagcctattgaggatgaaattgaaagaaaagaaaatattaagccctctctgggaagtaaaaagaatttattagaatctatacctacacattctgatcaggaaaaagaagttaacattaaaaaaccagaagacaatgaaaatctggatgacaaagatgatgacacaactagggtagatgaatccctcaacataaaggtagaagctgaggaagaaaaagcaaaatctggagatgaaacgaataaagaagaagatgaagatgatgaagaagcagaagaggaggaggaggaggaagaagaagaagaggatgaagatgatgatgacaacaatgaggaagaggagtttgagtgctatccaccaggcatgaaagtccaagtgcggtatggacgagggaaaaatcaaaaaatgtatgaagctagtattaaagattctgatgtcgaaggtggagaggtcctttacttggtgcattactgcggatggaatgtgagatacgatgaatggattaaagcagataaaatagtaagacctgctgataaaaatgtgccaaagataaaacatcggaagaaaataaagaataaattagacaaagaaaaagacaaagatgaaaaatactctccaaaaaactgtaaacttcggcgcttgtccaaaccaccatttcagacaaatccatctcctgaaatggtatccaaactggatctcactgatgccaaaaactctgatactgctcatattaagtccatagaaattacttcgatccttaatggacttcaagcttctgaaagttctgctgaagacagtgagcaggaagatgagagaggtgctcaagacatggataataatggcaaagaggaatctaagattgatcatttgaccaacaacagaaatgatcttatttcaaaggaggaacagaacagttcatctttgctagaagaaaacaaagttcatgcagatttggtaatatccaaaccagtgtcaaaatctccagaaagattaaggaaagatatagaagtattatccgaagatactgattatgaagaagatgaagtcacaaaaaagagaaaggatgtcaagaaggacacaacagataaatcttcaaaaccacaaataaaacgtggtaaaagaaggtattgcaatacagaagagtgtctaaaaactggatcacctggcaaaaaggaagagaaggccaagaacaaagaatcactttgcatggaaaacagtagcaacagctcttcagatgaagatgaagaagaaacaaaagcaaagatgacaccaactaagaaatacaatggtttggaggaaaaaagaaaatctctacggacaactggtttctattcaggattttcagaagtggcagaaaaaaggattaaacttttaaataactctgatgaaagacttcaaaacagcagggccaaagatcgaaaagatgtctggtcaagtattcagggacagtggcctaaaaaaacgctgaaagagcttttttcagactctgatactgaggctgcagcttccccaccgcatcctgccccagaggagggggtggcagaggagtcactgcagactgtggctgaagaggagagttgttcacccagtgtagaactagaaaaaccacctccagtcaatgtcgatagtaaacccattgaagaaaaaacagtagaggtcaatgacagaaaagcagaatttccaagtagtggcagtaattcagtgctaaatacccctcctactacacctgaatcgccttcatcagtcactgtaacagaaggcagccggcagcagtcttctgtaacagtatcagaaccactggctccaaaccaagaagaggttcgaagtatcaagagtgaaactgatagcacaattgaggtggatagtgttgctggggagctccaagacctccagtctgaagggaatagctcgccagcaggttttgatgccagtgtgagctcaagcagtagtaatcagccagaaccagaacatcctgaaaaagcctgtacaggtcagaaaagagtgaaagatgctcagggaggaggaagttcatcaaaaaagcagaaaagaagccataaagcaacagtggtaaacaacaaaaagaagggaaaaggcacaaatagtagtgatagtgaagaactttcagctggtgaaagtataactaagagtcagccagtcaaatcagtttccactggaatgaagtctcatagtaccaaatctcccgcaaggacgcagtctccaggaaaatgtggaaagaatggtgataaggatcctgatctcaaggaacccagtaatcgattacccaaagtttacaaatggagttttcagatgtcggacctggaaaatatgacaagtgccgaacgcatcacaattcttcaagaaaaacttcaagaaatcagaaaacattatctgtcattaaaatctgaagtagcttccattgatcggaggagaaagcgtttaaagaagaaagagagagaaagtgctgctacatcctcatcctcctcttcaccttcatccagttccataacagctgctgttatgttaactttagctgaaccgtcaatgtccagcgcatcacaaaatggaatgcttcaaccactcccagaagacgtccttcactcccaaaatgaggcttttctgaaacggcgaggaccaccaaccgacggcgacaaacctgctccctcacccagcgcctcccttcgccgccgcccggcggccgactgccggaggggagggggcgtggccagagagcggaagtgcccggaacccggaagtgcgagctggcgcgcagctgcagtctgggagtctttggagtaagaatggccttggaagggatgagcaaacggaagagaaagagaagtgtccaggagggagagaatcctgacgacggcgttcgcgggagtccgccggaagactacaggcttggacaggtcgccagtagcttatttcgcggcgaacaccattccagaggtggcaccggtcggctggcgtccctcttcagttctctggagccccagattcaacccgtgtacgtgcctgtgcctaaacaaaccatcaaaaaaacgaaacggaatgaggaggaagaaagtacatcccagattgaaagaccactttcgcaagaacctgccaaaaaagtgaaagcgaagaagaaacacactaacgcagaaaaaaagttggcagacagggaaagcgctctagcgagtgctgatttagaagaagaaattcaccagaaacaagggcagaaaaggaaaaattctcaacctggtgttaaagtagcagatagaaaaatacttgatgacacagaagacacagttgtcagtcaaagaaagaaaattcaaatcaaccaagaagaagagagattaaagaatgagagaactgtgtttgttgggaatttgcctgttacatgtaataagaagaagctgaagtcgttttttaaagagtatggacaaatagaatctgtacgatttcgttctctgattccagcagaggggaacgctatccaaaagttgggagataaacgttaaatcatctgatcgaaatttt

SEQ ID NO: 441351 - DNA, 6571 bp, Homo sapiens
agcgatgtttgcccgtcagtcgagtccggagtgaggagctcggtcgccgaagcggagggagactcttgagcttcatcttgccgccgccacggccaccgcctggacctttgcccggagggagctgcagagggtccatcgccgccgtcctctggagggcagcgcgattgggggcccggacctccagtccgggggggatttttcgtcgtccccctccccccaaccagggagcccgagcggccgccaaacaaaggtaccagtcgccgccgcgggaggaggaggagccggagcctctgcctcagcagccgctggacccgccgcccttcttccccatctctcccccgggcctgctggttttgggggggagaaggagagaggggactctggacgtgccagggtcagatctcgcctccgaggaaggtgcagctgaacctggtgttttagaggataccttggtcccagagtcatcatgaaggcccttgatgagcctccctatttgacagtgggcactgatgtgagtgctaaatacagaggagccttttgtgaagccaagatcaagacagcaaaaagacttgtcaaagtcaaggtgacatttagacatgattcttcaacagtggaagttcaggatgaccacataaagggcccactaaaggtaggagctattgtggaagtgaagaatcttgatggtgcatatcaggaagctgttatcaataaactaacagatgcgagttggtacactgtagtttttgatgacggagatgagaagacactgagacgatcttcactgtgcctgaaaggagagaggcattttgctgaaagtgaaacattagaccagctcccactcaccaaccctgagcattttggcactccagtcataggaaagaaaacaaatagaggaagaagatctaatcatataccagaggaagagtcttcatcatcctccagtgatgaagatgaggatgataggaaacagattgatgagctactaggcaaagttgtatgtgtagattacattagtttggataaaaagaaagcactgtggtttcctgcattggtggtttgtcctgattgtagtgatgagattgctgtaaaaaaggacaatattcttgttcgatctttcaaagatggaaaatttacttcagttccaagaaaagatgtccatgaaattactagtgacactgcaccaaagcctgatgctgttttaaagcaagcctttgaacaggcacttgaatttcacaaaagtagaactattcctgctaactggaagactgaattgaaagaagatagctctagcagtgaagcagaggaagaagaggaggaggaagatgatgaaaaagaaaaggaggataatagcagtgaagaagaagaagaaatagaaccatttccagaagaaagggagaactttcttcagcaattgtacaaatttatggaagatagaggtacacctattaacaaacgacctgtacttggatatcgaaatttgaatctctttaagttattcagacttgtacacaaacttggaggatttgataatattgaaagtggagctgtttggaaacaagtctaccaagatcttggaatccctgtcttaaattcagctgcaggatacaatgttaaatgtgcttataaaaaatacttatatggttttgaggagtactgtagatcagccaacattgaatttcagatggcattgccagagaaagttgttaacaagcaatgtaaggagtgtgaaaatgtaaaagaaataaaagttaaggaggaaaatgaaacagagatcaaagaaataaagatggaggaggagaggaatataataccaagagaagaaaagcctattgaggatgaaattgaaagaaaagaaaatattaagccctctctgggaagtaaaaagaatttattagaatctatacctacacattctgatcaggaaaaagaagttaacattaaaaaaccagaagacaatgaaaatctggatgacaaagatgatgacacaactagggtagatgaatccctcaacataaaggtagaagctgaggaagaaaaagcaaaatctggagatgaaacgaataaagaagaagatgaagatgatgaagaagcagaagaggaggaggaggaggaagaagaagaagaggatgaagatgatgatgacaacaatgaggaagaggagtttgagtgctatccaccaggcatgaaagtccaagtgcggtatggacgagggaaaaatcaaaaaatgtatgaagctagtattaaagattctgatgtcgaaggtggagaggtcctttacttggtgcattactgcggatggaatgtgagatacgatgaatggattaaagcagataaaatagtaagacctgctgataaaaatgtgccaaagataaaacatcggaagaaaataaagaataaattagacaaagaaaaagacaaagatgaaaaatactctccaaaaaactgtaaacttcggcgcttgtccaaaccaccatttcagacaaatccatctcctgaaatggtatccaaactggatctcactgatgccaaaaactctgatactgctcatattaagtccatagaaattacttcgatccttaatggacttcaagcttctgaaagttctgctgaagacagtgagcaggaagatgagagaggtgctcaagacatggataataatggcaaagaggaatctaagattgatcatttgaccaacaacagaaatgatcttatttcaaaggaggaacagaacagttcatctttgctagaagaaaacaaagttcatgcagatttggtaatatccaaaccagtgtcaaaatctccagaaagattaaggaaagatatagaagtattatccgaagatactgattatgaagaagatgaagtcacaaaaaagagaaaggatgtcaagaaggacacaacagataaatcttcaaaaccacaaataaaacgtggtaaaagaaggtattgcaatacagaagagtgtctaaaaactggatcacctggcaaaaaggaagagaaggccaagaacaaagaatcactttgcatggaaaacagtagcaacagctcttcagatgaagatgaagaagaaacaaaagcaaagatgacaccaactaagaaatacaatggtttggaggaaaaaagaaaatctctacggacaactggtttctattcaggattttcagaagtggcagaaaaaaggattaaacttttaaataactctgatgaaagacttcaaaacagcagggccaaagatcgaaaagatgtctggtcaagtattcagggacagtggcctaaaaaaacgctgaaagagcttttttcagactctgatactgaggctgcagcttccccaccgcatcctgccccagaggagggggtggcagaggagtcactgcagactgtggctgaagaggagagttgttcacccagtgtagaactagaaaaaccacctccagtcaatgtcgatagtaaacccattgaagaaaaaacagtagaggtcaatgacagaaaagcagaatttccaagtagtggcagtaattcagtgctaaatacccctcctactacacctgaatcgccttcatcagtcactgtaacagaaggcagccggcagcagtcttctgtaacagtatcagaaccactggctccaaaccaagaagaggttcgaagtatcaagagtgaaactgatagcacaattgaggtggatagtgttgctggggagctccaagacctccagtctgaagggaatagctcgccagcaggttttgatgccagtgtgagctcaagcagtagtaatcagccagaaccagaacatcctgaaaaagcctgtacaggtcagaaaagagtgaaagatgctcagggaggaggaagttcatcaaaaaagcagaaaagaagccataaagcaacagtggtaaacaacaaaaagaagggaaaaggcacaaatagtagtgatagtgaagaactttcagctggtgaaagtataactaagagtcagccagtcaaatcagtttccactggaatgaagtctcatagtaccaaatctcccgcaaggacgcagtctccaggaaaatgtggaaagaatggtgataaggatcctgatctcaaggaacccagtaatcgattacccaaagtttacaaatggagttttcagatgtcggacctggaaaatatgacaagtgccgaacgcatcacaattcttcaagaaaaacttcaagaaatcagaaaacattatctgtcattaaaatctgaagtagcttccattgatcggaggagaaagcgtttaaagaagaaagagagagaaagtgctgctacatcctcatcctcctcttcaccttcatccagttccataacagctgctgttatgttaactttagctgaaccgtcaatgtccagcgcatcacaaaatggaatgcttcaaccactcccagaagacgtccttcactcccaaaatgaggcttttctgaaacggcgaggaccaccaaccgacggcgacaaacctgctccctcacccagcgcctcccttcgccgccgcccggcggccgactgccggaggggagggggcgtggccagagagcggaagtgcccggaacccggaagtgcgagctggcgcgcagctgcagtctgggagtctttggagtaagaatggccttggaagggatgagcaaacggaagagaaagagaagtgtccaggagggagagaatcctgacgacggcgttcgcgggagtccgccggaagactacaggcttggacaggtcgccagtagcttatttcgcggcgaacaccattccagaggtggcaccggtcggctggcgtccctcttcagttctctggagccccagattcaacccgtgtacgtgcctgtgcctaaagtaagtcactgggctttcttcccgaatagctcgttagaaccacttacatacaaagcaatcttcttacctaccgcgtgaagcgtgatttctaaagggggcagacaggattcattttaagtaacctttcatgactcttacataccagtgagagagaagagattctcatttagaaagactgaattatggcttagggtcagaattctagaagtatggggtctcaaatataacttcaaacttttaaaaagcaaaccatcaaaaaaacgaaacggaatgaggaggaagaaagtacatcccagattgaaagaccactttcgcaagaacctgccaaaaaagtgaaagcgaagaagaaacacactaacgcagaaaaaaagttggcagacagggaaagcgctctagcgagtgctgatttagaagaagaaattcaccagaaacaagggcagaaaaggaaaaattctcaacctggtgttaaagtagcagatagaaaaatacttgatgacacagaagacacagttgtcagtcaaagaaagaaaattcaaatcaaccaagaagaagagagattaaagaatgagagaactgtgtttgttgggaatttgcctgttacatgtaataagaagaagctgaagtcgttttttaaagagtatggacaaatagaatctgtacgatttcgttctctgattccagcagagggaacgctatccaaaaagttggcagcaataaaacgtaaaattcatcctgatcagaaaaatattaatgcctatgttgtgtttaaggaggagagtgctgccacgcaagcattgaaaagaaatggggcccagattgcagatggatttcgtattagagttgatctcgcatctgagacctcatctagagacaagagatcggtttttgtggggaatctcccttataaagttgaagaatctgccattgagaagcactttctggactgtggaagtatcatggccgtgaggattgtgagagacaaaatgacaggcatcggcaaagggtttggctatgtgctctttgagaatacagattctgttcatcttgctctgaaattaaataattctgaactcatggggagaaaactcagagtcatgcgttctgttaataaagaaaaatttaaacaacaaaattcaaatccacgattgaagaatgtcagtaaacctaagcagggacttaattttacttccaaaactgcagaaggacatcctaaaagcttatttattggagaaaaagctgttctccttaaaacgaagaagaaaggacagaagaaaagtggacgccctaagaaacagagaaaacagaaataacaaccaggaactgctttttcttttcctgctgagtactgctaataaaagtgctattatctgctgataaaaagctaaaaaagaaaaacattgtgtggcgggcgcgcgccaccaaggagagtttaaacacaactggggtggggcggcgcccaaggatatgacacaggggacacgtgccccctgacacgctgccagccaagggtgggtctcccaaaaaaagccggggcacgacggtagaacaccagagagtggggactggcaagccgcgaaacagcgtgcactcgctgcctctctaccgacactgactcgacacgccatacaagagcagaggcagcatccgaagacgagcacgactagtgaaagacgcgctagagacacactggatacttgatagtcgtcgacgcgaggggagggggggg

SEQ ID NO: 441352 - DNA, 6413 bp, Homo sapiens
agcgatgtttgcccgtcagtcgagtccggagtgaggagctcggtcgccgaagcggagggagactcttgagcttcatcttgccgccgccacggccaccgcctggacctttgcccggagggagctgcagagggtccatcgccgccgtcctctggagggcagcgcgattgggggcccggacctccagtccgggggggatttttcgtcgtccccctccccccaaccagggagcccgagcggccgccaaacaaaggtaccagtcgccgccgcgggaggaggaggagccggagcctctgcctcagcagccgctggacccgccgcccttcttccccatctctcccccgggcctgctggttttgggggggagaaggagagaggggactctggacgtgccagggtcagatctcgcctccgaggaaggtgcagctgaacctggtgttttagaggataccttggtcccagagtcatcatgaaggcccttgatgagcctccctatttgacagtgggcactgatgtgagtgctaaatacagaggagccttttgtgaagccaagatcaagacagcaaaaagacttgtcaaagtcaaggtgacatttagacatgattcttcaacagtggaagttcaggatgaccacataaagggcccactaaaggtaggagctattgtggaagtgaagaatcttgatggtgcatatcaggaagctgttatcaataaactaacagatgcgagttggtacactgtagtttttgatgacggagatgagaagacactgagacgatcttcactgtgcctgaaaggagagaggcattttgctgaaagtgaaacattagaccagctcccactcaccaaccctgagcattttggcactccagtcataggaaagaaaacaaatagaggaagaagatctaatcatataccagaggaagagtcttcatcatcctccagtgatgaagatgaggatgataggaaacagattgatgagctactaggcaaagttgtatgtgtagattacattagtttggataaaaagaaagcactgtggtttcctgcattggtggtttgtcctgattgtagtgatgagattgctgtaaaaaaggacaatattcttgttcgatctttcaaagatggaaaatttacttcagttccaagaaaagatgtccatgaaattactagtgacactgcaccaaagcctgatgctgttttaaagcaagcctttgaacaggcacttgaatttcacaaaagtagaactattcctgctaactggaagactgaattgaaagaagatagctctagcagtgaagcagaggaagaagaggaggaggaagatgatgaaaaagaaaaggaggataatagcagtgaagaagaagaagaaatagaaccatttccagaagaaagggagaactttcttcagcaattgtacaaatttatggaagatagaggtacacctattaacaaacgacctgtacttggatatcgaaatttgaatctctttaagttattcagacttgtacacaaacttggaggatttgataatattgaaagtggagctgtttggaaacaagtctaccaagatcttggaatccctgtcttaaattcagctgcaggatacaatgttaaatgtgcttataaaaaatacttatatggttttgaggagtactgtagatcagccaacattgaatttcagatggcattgccagagaaagttgttaacaagcaatgtaaggagtgtgaaaatgtaaaagaaataaaagttaaggaggaaaatgaaacagagatcaaagaaataaagatggaggaggagaggaatataataccaagagaagaaaagcctattgaggatgaaattgaaagaaaagaaaatattaagccctctctgggaagtaaaaagaatttattagaatctatacctacacattctgatcaggaaaaagaagttaacattaaaaaaccagaagacaatgaaaatctggatgacaaagatgatgacacaactagggtagatgaatccctcaacataaaggtagaagctgaggaagaaaaagcaaaatctggagatgaaacgaataaagaagaagatgaagatgatgaagaagcagaagaggaggaggaggaggaagaagaagaagaggatgaagatgatgatgacaacaatgaggaagaggagtttgagtgctatccaccaggcatgaaagtccaagtgcggtatggacgagggaaaaatcaaaaaatgtatgaagctagtattaaagattctgatgtcgaaggtggagaggtcctttacttggtgcattactgcggatggaatgtgagatacgatgaatggattaaagcagataaaatagtaagacctgctgataaaaatgtgccaaagataaaacatcggaagaaaataaagaataaattagacaaagaaaaagacaaagatgaaaaatactctccaaaaaactgtaaacttcggcgcttgtccaaaccaccatttcagacaaatccatctcctgaaatggtatccaaactggatctcactgatgccaaaaactctgatactgctcatattaagtccatagaaattacttcgatccttaatggacttcaagcttctgaaagttctgctgaagacagtgagcaggaagatgagagaggtgctcaagacatggataataatggcaaagaggaatctaagattgatcatttgaccaacaacagaaatgatcttatttcaaaggaggaacagaacagttcatctttgctagaagaaaacaaagttcatgcagatttggtaatatccaaaccagtgtcaaaatctccagaaagattaaggaaagatatagaagtattatccgaagatactgattatgaagaagatgaagtcacaaaaaagagaaaggatgtcaagaaggacacaacagataaatcttcaaaaccacaaataaaacgtggtaaaagaaggtattgcaatacagaagagtgtctaaaaactggatcacctggcaaaaaggaagagaaggccaagaacaaagaatcactttgcatggaaaacagtagcaacagctcttcagatgaagatgaagaagaaacaaaagcaaagatgacaccaactaagaaatacaatggtttggaggaaaaaagaaaatctctacggacaactggtttctattcaggattttcagaagtggcagaaaaaaggattaaacttttaaataactctgatgaaagacttcaaaacagcagggccaaagatcgaaaagatgtctggtcaagtattcagggacagtggcctaaaaaaacgctgaaagagcttttttcagactctgatactgaggctgcagcttccccaccgcatcctgccccagaggagggggtggcagaggagtcactgcagactgtggctgaagaggagagttgttcacccagtgtagaactagaaaaaccacctccagtcaatgtcgatagtaaacccattgaagaaaaaacagtagaggtcaatgacagaaaagcagaatttccaagtagtggcagtaattcagtgctaaatacccctcctactacacctgaatcgccttcatcagtcactgtaacagaaggcagccggcagcagtcttctgtaacagtatcagaaccactggctccaaaccaagaagaggttcgaagtatcaagagtgaaactgatagcacaattgaggtggatagtgttgctggggagctccaagacctccagtctgaagggaatagctcgccagcaggttttgatgccagtgtgagctcaagcagtagtaatcagccagaaccagaacatcctgaaaaagcctgtacaggtcagaaaagagtgaaagatgctcagggaggaggaagttcatcaaaaaagcagaaaagaagccataaagcaacagtggtaaacaacaaaaagaagggaaaaggcacaaatagtagtgatagtgaagaactttcagctggtgaaagtataactaagagtcagccagtcaaatcagtttccactggaatgaagtctcatagtaccaaatctcccgcaaggacgcagtctccaggaaaatgtggaaagaatggtgataaggatcctgatctcaaggaacccagtaatcgattacccaaagtttacaaatggagttttcagatgtcggacctggaaaatatgacaagtgccgaacgcatcacaattcttcaagaaaaacttcaagaaatcagaaaacattatctgtcattaaaatctgaagtagcttccattgatcggaggagaaagcgtttaaagaagaaagagagagaaagtgctgctacatcctcatcctcctcttcaccttcatccagttccataacagctgctgttatgttaactttagctgaaccgtcaatgtccagcgcatcacaaaatggaatgcttcaaccactcccagaagacgtccttcactcccaaaatgaggcttttctgaaacggcgaggaccaccaaccgacggcgacaaacctgctccctcacccagcgcctcccttcgccgccgcccggcggccgactgccggaggggagggggcgtggccagagagcggaagtgcccggaacccggaagtgcgagctggcgcgcagctgcagtctgggagtctttggagtaagaatggccttggaagggatgagcaaacggaagagaaagagaagtgtccaggagggagagaatcctgacgacggcgttcgcgggagtccgccggaagactacaggcttggacaggtcgccagtagcttatttcgcggcgaacaccattccagaggtggcaccggtcggctggcgtccctcttcagttctctggagccccagattcaacccgtgtacgtgcctgtgcctaaacaaaccatcaaaaaaacgaaacggaatgaggaggaagaaagtacatcccagattgaaagaccactttcgcaagaacctgccaaaaaagtgaaagcgaagaagaaacacactaacgcagaaaaaaagttggcagacagttctcctttcagattgatgctcagaccttgcttatccatatccagcaatactttatattgtatttaccgtttcacaatttacttttgggaaagcgctctagcgagtgctgatttagaagaagaaattcaccagaaacaagggcagaaaaggaaaaattctcaacctggtgttaaagtagcagatagaaaaatacttgatgacacagaagacacagttgtcagtcaaagaaagaaaattcaaatcaaccaagaagaagagagattaaagaatgagagaactgtgtttgttgggaatttgcctgttacatgtaataagaagaagctgaagtcgttttttaaagagtatggacaaatagaatctgtacgatttcgttctctgattccagcagagggaacgctatccaaaaagttggcagcaataaaacgtaaaattcatcctgatcagaaaaatattaatgcctatgttgtgtttaaggaggagagtgctgccacgcaagcattgaaaagaaatggggcccagattgcagatggatttcgtattagagttgatctcgcatctgagacctcatctagagacaagagatcggtttttgtggggaatctcccttataaagttgaagaatctgccattgagaagcactttctggactgtggaagtatcatggccgtgaggattgtgagagacaaaatgacaggcatcggcaaagggtttggctatgtgctctttgagaatacagattctgttcatcttgctctgaaattaaataattctgaactcatggggagaaaactcagagtcatgcgttctgttaataaagaaaaatttaaacaacaaaattcaaatccacgattgaagaatgtcagtaaacctaagcagggacttaattttacttccaaaactgcagaaggacatcctaaaagcttatttattggagaaaaagctgttctccttaaaacgaagaagaaaggacagaagaaaagtggacgccctaagaaacagagaaaacagaaataacaaccaggaactgctttttcttttcctgctgagtactgctaataaaagtgctattatctgctgataaaaagctaaaaaagaaaaacattgtgtggcgggcgcgcgccaccaaggagagtttaaacacaactggggtggggcggcgcccaaggatatgacacaggggacacgtgccccctgacacgctgccagccaagggtgggtctcccaaaaaaagccggggcacgacggtagaacaccagagagtggggactggcaagccgcgaaacagcgtgcactcgctgcctctctaccgacactgactcgacacgccatacaagagcagaggcagcatccgaagacgagcacgactagtgaaagacgcgctagagacacactggatacttgatagtcgtcgacgcgaggggagggggggg

SEQ ID NO: 441353 - DNA, 5448 bp, Homo sapiens
  misc_feature (5321)..(5321): n is a, c, g, or t
  misc_feature (5331)..(5331): n is a, c, g, or t
  misc_feature (5335)..(5336): n is a, c, g, or t
  misc_feature (5338)..(5338): n is a, c, g, or t
  misc_feature (5349)..(5349): n is a, c, g, or t
  misc_feature (5353)..(5353): n is a, c, g, or t
agcgatgtttgcccgtcagtcgagtccggagtgaggagctcggtcgccgaagcggagggagactcttgagcttcatcttgccgccgccacggccaccgcctggacctttgcccggagggagctgcagagggtccatcgccgccgtcctctggagggcagcgcgattgggggcccggacctccagtccgggggggatttttcgtcgtccccctccccccaaccagggagcccgagcggccgccaaacaaaggtaccagtcgccgccgcgggaggaggaggagccggagcctctgcctcagcagccgctggacccgccgcccttcttccccatctctcccccgggcctgctggttttgggggggagaaggagagaggggactctggacgtgccagggtcagatctcgcctccgaggaaggtgcagctgaacctggtgttttagaggataccttggtcccagagtcatcatgaaggcccttgatgagcctccctatttgacagtgggcactgatgtgagtgctaaatacagaggagccttttgtgaagccaagatcaagacagcaaaaagacttgtcaaagtcaaggtgacatttagacatgattcttcaacagtggaagttcaggatgaccacataaagggcccactaaaggtaggagctattgtggaagtgaagaatcttgatggtgcatatcaggaagctgttatcaataaactaacagatgcgagttggtacactgtagtttttgatgacggagatgagaagacactgagacgatcttcactgtgcctgaaaggagagaggcattttgctgaaagtgaaacattagaccagctcccactcaccaaccctgagcattttggcactccagtcataggaaagaaaacaaatagaggaagaagatctaatcatataccagaggaagagtcttcatcatcctccagtgatgaagatgaggatgataggaaacagattgatgagctactaggcaaagttgtatgtgtagattacattagtttggataaaaagaaagcactgtggtttcctgcattggtggtttgtcctgattgtagtgatgagattgctgtaaaaaaggacaatattcttgttcgatctttcaaagatggaaaatttacttcagttccaagaaaagatgtccatgaaattactagtgacactgcaccaaagcctgatgctgttttaaagcaagcctttgaacaggcacttgaatttcacaaaagtagaactattcctgctaactggaagactgaattgaaagaagatagctctagcagtgaagcagaggaagaagaggaggaggaagatgatgaaaaagaaaaggaggataatagcagtgaagaagaagaagaaatagaaccatttccagaagaaagggagaactttcttcagcaattgtacaaatttatggaagatagaggtacacctattaacaaacgacctgtacttggatatcgaaatttgaatctctttaagttattcagacttgtacacaaacttggaggatttgataatattgaaagtggagctgtttggaaacaagtctaccaagatcttggaatccctgtcttaaattcagctgcaggatacaatgttaaatgtgcttataaaaaatacttatatggttttgaggagtactgtagatcagccaacattgaatttcagatggcattgccagagaaagttgttaacaagcaatgtaaggagtgtgaaaatgtaaaagaaataaaagttaaggaggaaaatgaaacagagatcaaagaaataaagatggaggaggagaggaatataataccaagagaagaaaagcctattgaggatgaaattgaaagaaaagaaaatattaagccctctctgggaagtaaaaagaatttattagaatctatacctacacattctgatcaggaaaaagaagttaacattaaaaaaccagaagacaatgaaaatctggatgacaaagatgatgacacaactagggtagatgaatccctcaacataaaggtagaagctgaggaagaaaaagcaaaatctggagatgaaacgaataaagaagaagatgaagatgatgaagaagcagaagaggaggaggaggaggaagaagaagaagaggatgaagatgatgatgacaacaatgaggaagaggagtttgagtgctatccaccaggcatgaaagtccaagtgcggtatggacgagggaaaaatcaaaaaatgtatgaagctagtattaaagattctgatgtcgaaggtggagaggtcctttacttggtgcattactgcggatggaatgtgagatacgatgaatggattaaagcagataaaatagtaagacctgctgataaaaatgtgccaaagataaaacatcggaagaaaataaagaataaattagacaaagaaaaagacaaagatgaaaaatactctccaaaaaactgtaaacttcggcgcttgtccaaaccaccatttcagacaaatccatctcctgaaatggtatccaaactggatctcactgatgccaaaaactctgatactgctcatattaagtccatagaaattacttcgatccttaatggacttcaagcttctgaaagttctgctgaagacagtgagcaggaagatgagagaggtgctcaagacatggataataatggcaaagaggaatctaagattgatcatttgaccaacaacagaaatgatcttatttcaaaggaggaacagaacagttcatctttgctagaagaaaacaaagttcatgcagatttggtaatatccaaaccagtgtcaaaatctccagaaagattaaggaaagatatagaagtattatccgaagatactgattatgaagaagatgaagtcacaaaaaagagaaaggatgtcaagaaggacacaacagataaatcttcaaaaccacaaataaaacgtggtaaaagaaggtattgcaatacagaagagtgtctaaaaactggatcacctggcaaaaaggaagagaaggccaagaacaaagaatcactttgcatggaaaacagtagcaacagctcttcagatgaagatgaagaagaaacaaaagcaaagatgacaccaactaagaaatacaatggtttggaggaaaaaagaaaatctctacggacaactggtttctattcaggattttcagaagtggcagaaaaaaggattaaacttttaaataactctgatgaaagacttcaaaacagcagggccaaagatcgaaaagatgtctggtcaagtattcagggacagtggcctaaaaaaacgctgaaagagcttttttcagactctgatactgaggctgcagcttccccaccgcatcctgccccagaggagggggtggcagaggagtcactgcagactgtggctgaagaggagagttgttcacccagtgtagaactagaaaaaccacctccagtcaatgtcgatagtaaacccattgaagaaaaaacagtagaggtcaatgacagaaaagcagaatttccaagtagtggcagtaattcagtgctaaatacccctcctactacacctgaatcgccttcatcagtcactgtaacagaaggcagccggcagcagtcttctgtaacagtatcagaaccactggctccaaaccaagaagaggttcgaagtatcaagagtgaaactgatagcacaattgaggtggatagtgttgctggggagctccaagacctccagtctgaagggaatagctcgccagcaggttttgatgccagtgtgagctcaagcagtagtaatcagccagaaccagaacatcctgaaaaagcctgtacaggtcagaaaagagtgaaagatgctcagggaggaggaagttcatcaaaaaagcagaaaagaagccataaagcaacagtggtaaacaacaaaaagaagggaaaaggcacaaatagtagtgatagtgaagaactttcagctggtgaaagtataactaagagtcagccagtcaaatcagtttccactggaatgaagtctcatagtaccaaatctcccgcaaggacgcagtctccaggaaaatgtggaaagaatggtgataaggatcctgatctcaaggaacccagtaatcgattacccaaagtttacaaatggagttttcagatgtcggacctggaaaatatgacaagtgccgaacgcatcacaattcttcaagaaaaacttcaagaaatcagaaaacattatctgtcattaaaatctgaagtagcttccattgatcggaggagaaagcgtttaaagaagaaagagagagaaagtgctgctacatcctcatcctcctcttcaccttcatccagttccataacagctgctgttatgttaactttagctgaaccgtcaatgtccagcgcatcacaaaatggaatgcttcaaccactcccagaagacgtccttcactcccaaaatgaggcttttctgaaacggcgaggaccaccaaccgacggcgacaaacctgctccctcacccagcgcctcccttcgccgccgcccggcggccgactgccggaggggagggggcgtggccagagagcggaagtgcccggaacccggaagtgcgagctggcgcgcagctgcagtctgggagtctttggagtaagaatggccttggaagggatgagcaaacggaagagaaagagaagtgtccaggagggggagtggcgcgcggcacgagtacctggggagggatgtgtacgttccctcgtgctggcgaagcggtggtgcgtggcgtggctgagtttctgtcgtccatttctagagagaatcctgacgacggcgttcgcgggagtccgccggaagactacaggcttggacaggtcgccagtagcttatttcgcggcgaacaccattccagaggtggcaccggtcggctggcgtccctcttcagttctctggagccccagattcaacccgtgtacgtgcctgtgcctaaacaaaccatcaaaaaaacgaaacggaatgaggaggaagaaagtacatcccagattgaaagaccactttcgcaagaacctgccaaaaaagtgaaagcgaagaagaaacacactaacgcagaaaaaaagttggcagacagggaaagcgctctagcgagtgctgatttagaagaagaaattcaccagaaacaagggcagaaaaggaaaaattctcaacctggtgttaaagtagcagatagaaaaatacttgatgacacagaagacacagttgtcagtcaaagaaagaaaattcaaatcaaccaagaagaagagagattaaagaatgagagaactgtgtttgttgggaatttgcctgttacatgtaataagaagaantgaagtcgtntcanngnagttggacaantganctggcgaccgcggcccgatcagaggaggccctatccaaaagtggcgacacaaacgaaatcacggacagaaattacgcccggggcacggcaggccc

SEQ ID NO: 441354 - DNA, 5085 bp, Homo sapiens
agcgatgtttgcccgtcagtcgagtccggagtgaggagctcggtcgccgaagcggagggagactcttgagcttcatcttgccgccgccacggccaccgcctggacctttgcccggagggagctgcagagggtccatcgccgccgtcctctggagggcagcgcgattgggggcccggacctccagtccgggggggatttttcgtcgtccccctccccccaaccagggagcccgagcggccgccaaacaaaggtaccagtcgccgccgcgggaggaggaggagccggagcctctgcctcagcagccgctggacccgccgcccttcttccccatctctcccccgggcctgctggttttgggggggagaaggagagaggggactctggacgtgccagggtcagatctcgcctccgaggaaggtgcagctgaacctggtgttttagaggataccttggtcccagagtcatcatgaaggcccttgatgagcctccctatttgacagtgggcactgatgtgagtgctaaatacagaggagccttttgtgaagccaagatcaagacagcaaaaagacttgtcaaagtcaaggtgacatttagacatgattcttcaacagtggaagttcaggatgaccacataaagggcccactaaaggtaggagctattgtggaagtgaagaatcttgatggtgcatatcaggaagctgttatcaataaactaacagatgcgagttggtacactgtagtttttgatgacggagatgagaagacactgagacgatcttcactgtgcctgaaaggagagaggcattttgctgaaagtgaaacattagaccagctcccactcaccaaccctgagcattttggcactccagtcataggaaagaaaacaaatagaggaagaagatctaatcatataccagaggaagagtcttcatcatcctccagtgatgaagatgaggatgataggaaacagattgatgagctactaggcaaagttgtatgtgtagattacattagtttggataaaaagaaagcactgtggtttcctgcattggtggtttgtcctgattgtagtgatgagattgctgtaaaaaaggacaatattcttgttcgatctttcaaagatggaaaatttacttcagttccaagaaaagatgtccatgaaattactagtgacactgcaccaaagcctgatgctgttttaaagcaagcctttgaacaggcacttgaatttcacaaaagtagaactattcctgctaactggaagactgaattgaaagaagatagctctagcagtgaagcagaggaagaagaggaggaggaagatgatgaaaaagaaaaggaggataatagcagtgaagaagaagaagaaatagaaccatttccagaagaaagggagaactttcttcagcaattgtacaaatttatggaagatagaggtacacctattaacaaacgacctgtacttggatatcgaaatttgaatctctttaagttattcagacttgtacacaaacttggaggatttgataatattgaaagtggagctgtttggaaacaagtctaccaagatcttggaatccctgtcttaaattcagctgcaggatacaatgttaaatgtgcttataaaaaatacttatatggttttgaggagtactgtagatcagccaacattgaatttcagatggcattgccagagaaagttgttaacaagcaatgtaaggagtgtgaaaatgtaaaagaaataaaagttaaggaggaaaatgaaacagagatcaaagaaataaagatggaggaggagaggaatataataccaagagaagaaaagcctattgaggatgaaattgaaagaaaagaaaatattaagccctctctgggaagtaaaaagaatttattagaatctatacctacacattctgatcaggaaaaagaagttaacattaaaaaaccagaagacaatgaaaatctggatgacaaagatgatgacacaactagggtagatgaatccctcaacataaaggtagaagctgaggaagaaaaagcaaaatctggagatgaaacgaataaagaagaagatgaagatgatgaagaagcagaagaggaggaggaggaggaagaagaagaagaggatgaagatgatgatgacaacaatgaggaagaggagtttgagtgctatccaccaggcatgaaagtccaagtgcggtatggacgagggaaaaatcaaaaaatgtatgaagctagtattaaagattctgatgtcgaaggtggagaggtcctttacttggtgcattactgcggatggaatgtgagatacgatgaatggattaaagcagataaaatagtaagacctgctgataaaaatgtgccaaagataaaacatcggaagaaaataaagaataaattagacaaagaaaaagacaaagatgaaaaatactctccaaaaaactgtaaacttcggcgcttgtccaaaccaccatttcagacaaatccatctcctgaaatggtatccaaactggatctcactgatgccaaaaactctgatactgctcatattaagtccatagaaattacttcgatccttaatggacttcaagcttctgaaagttctgctgaagacagtgagcaggaagatgagagaggtgctcaagacatggataataatggcaaagaggaatctaagattgatcatttgaccaacaacagaaatgatcttatttcaaaggaggaacagaacagttcatctttgctagaagaaaacaaagttcatgcagatttggtaatatccaaaccagtgtcaaaatctccagaaagattaaggaaagatatagaagtattatccgaagatactgattatgaagaagatgaagtcacaaaaaagagaaaggatgtcaagaaggacacaacagataaatcttcaaaaccacaaataaaacgtggtaaaagaaggtattgcaatacagaagagtgtctaaaaactggatcacctggcaaaaaggaagagaaggccaagaacaaagaatcactttgcatggaaaacagtagcaacagctcttcagatgaagatgaagaagaaacaaaagcaaagatgacaccaactaagaaatacaatggtttggaggaaaaaagaaaatctctacggacaactggtttctattcaggattttcagaagtggcagaaaaaaggattaaacttttaaataactctgatgaaagacttcaaaacagcagggccaaagatcgaaaagatgtctggtcaagtattcagggacagtggcctaaaaaaacgctgaaagagcttttttcagactctgatactgaggctgcagcttccccaccgcatcctgccccagaggagggggtggcagaggagtcactgcagactgtggctgaagaggagagttgttcacccagtgtagaactagaaaaaccacctccagtcaatgtcgatagtaaacccattgaagaaaaaacagtagaggtcaatgacagaaaagcagaatttccaagtagtggcagtaattcagtgctaaatacccctcctactacacctgaatcgccttcatcagtcactgtaacagaaggcagccggcagcagtcttctgtaacagtatcagaaccactggctccaaaccaagaagaggttcgaagtatcaagagtgaaactgatagcacaattgaggtggatagtgttgctggggagctccaagacctccagtctgaagggaatagctcgccagcaggttttgatgccagtgtgagctcaagcagtagtaatcagccagaaccagaacatcctgaaaaagcctgtacaggtcagaaaagagtgaaagatgctcagggaggaggaagttcatcaaaaaagcagaaaagaagccataaagcaacagtggtaaacaacaaaaagaagggaaaaggcacaaatagtagtgatagtgaagaactttcagctggtgaaagtataactaagagtcagccagtcaaatcagtttccactggaatgaagtctcatagtaccaaatctcccgcaaggacgcagtctccaggaaaatgtggaaagaatggtgataaggatcctgatctcaaggaacccagtaatcgattacccaaagtttacaaatggagttttcagatgtcggacctggaaaatatgacaagtgccgaacgcatcacaattcttcaagaaaaacttcaagaaatcagaaaacattatctgtcattaaaatctgaagtagcttccattgatcggaggagaaagcgtttaaagaagaaagagagagaaagtgctgctacatcctcatcctcctcttcaccttcatccagttccataacagctgctgttatgttaactttagctgaaccgtcaatgtccagcgcatcacaaaatggaatgcttcaaccactcccagaagacgtccttcactcccaaaatgaggcttttctgaaacggcgaggaccaccaaccgacggcgacaaacctgctccctcacccagcgcctcccttcgccgccgcccggcggccgactgccggaggggagggggcgtggccagagagcggaagtgcccggaacccggaagtgcgagctggcgcgcagctgcagtctgggagtctttggagtaagaatggccttggaagggatgagcaaacggaagagaaagagaagtgtccaggagggagagaatcctgacgacggcgttcgcgggagtccgccggaagactacaggcttggacaggtcgccagtagcttatttcgcggcgaacaccattccagaggtggcaccggtcggctggcgtccctcttcagttctctggagccccagattcaacccgtgtacgtgcctgtgcctaaacaaaccatcaaaaaaacgaaacggaatgaggaggaagaaagtacatcccagattgaaagaccactttcgcaagaacctgccaaaaaagtgaaagcgaagaagaaacacactaacgcagaaaaaaagttggcagacagatggagtcttgatgccacgcccaggctgcagtagagtgcagtgatctcagctcactgcaacctccgcttcccaggttcaagcgattctcctgcctcggccctg

SEQ ID NO: 441355 - DNA, 5225 bp, Homo sapiens
  misc_feature (4206)..(4206): n is a, c, g, or t
  misc_feature (4920)..(4920): n is a, c, g, or t
  misc_feature (4967)..(4967): n is a, c, g, or t
  misc_feature (4985)..(4985): n is a, c, g, or t
agcgatgtttgcccgtcagtcgagtccggagtgaggagctcggtcgccgaagcggagggagactcttgagcttcatcttgccgccgccacggccaccgcctggacctttgcccggagggagctgcagagggtccatcgccgccgtcctctggagggcagcgcgattgggggcccggacctccagtccgggggggatttttcgtcgtccccctccccccaaccagggagcccgagcggccgccaaacaaaggtaccagtcgccgccgcgggaggaggaggagccggagcctctgcctcagcagccgctggacccgccgcccttcttccccatctctcccccgggcctgctggttttgggggggagaaggagagaggggactctggacgtgccagggtcagatctcgcctccgaggaaggtgcagctgaacctggtgttttagaggataccttggtcccagagtcatcatgaaggcccttgatgagcctccctatttgacagtgggcactgatgtgagtgctaaatacagaggagccttttgtgaagccaagatcaagacagcaaaaagacttgtcaaagtcaaggtgacatttagacatgattcttcaacagtggaagttcaggatgaccacataaagggcccactaaaggtaggagctattgtggaagtgaagaatcttgatggtgcatatcaggaagctgttatcaataaactaacagatgcgagttggtacactgtagtttttgatgacggagatgagaagacactgagacgatcttcactgtgcctgaaaggagagaggcattttgctgaaagtgaaacattagaccagctcccactcaccaaccctgagcattttggcactccagtcataggaaagaaaacaaatagaggaagaagatctaatcatataccagaggaagagtcttcatcatcctccagtgatgaagatgaggatgataggaaacagattgatgagctactaggcaaagttgtatgtgtagattacattagtttggataaaaagaaagcactgtggtttcctgcattggtggtttgtcctgattgtagtgatgagattgctgtaaaaaaggacaatattcttgttcgatctttcaaagatggaaaatttacttcagttccaagaaaagatgtccatgaaattactagtgacactgcaccaaagcctgatgctgttttaaagcaagcctttgaacaggcacttgaatttcacaaaagtagaactattcctgctaactggaagactgaattgaaagaagatagctctagcagtgaagcagaggaagaagaggaggaggaagatgatgaaaaagaaaaggaggataatagcagtgaagaagaagaagaaatagaaccatttccagaagaaagggagaactttcttcagcaattgtacaaatttatggaagatagaggtacacctattaacaaacgacctgtacttggatatcgaaatttgaatctctttaagttattcagacttgtacacaaacttggaggatttgataatattgaaagtggagctgtttggaaacaagtctaccaagatcttggaatccctgtcttaaattcagctgcaggatacaatgttaaatgtgcttataaaaaatacttatatggttttgaggagtactgtagatcagccaacattgaatttcagatggcattgccagagaaagttgttaacaagcaatgtaaggagtgtgaaaatgtaaaagaaataaaagttaaggaggaaaatgaaacagagatcaaagaaataaagatggaggaggagaggaatataataccaagagaagaaaagcctattgaggatgaaattgaaagaaaagaaaatattaagccctctctgggaagtaaaaagaatttattagaatctatacctacacattctgatcaggaaaaagaagttaacattaaaaaaccagaagacaatgaaaatctggatgacaaagatgatgacacaactagggtagatgaatccctcaacataaaggtagaagctgaggaagaaaaagcaaaatctggagatgaaacgaataaagaagaagatgaagatgatgaagaagcagaagaggaggaggaggaggaagaagaagaagaggatgaagatgatgatgacaacaatgaggaagaggagtttgagtgctatccaccaggcatgaaagtccaagtgcggtatggacgagggaaaaatcaaaaaatgtatgaagctagtattaaagattctgatgtcgaaggtggagaggtcctttacttggtgcattactgcggatggaatgtgagatacgatgaatggattaaagcagataaaatagtaagacctgctgataaaaatgtgccaaagataaaacatcggaagaaaataaagaataaattagacaaagaaaaagacaaagatgaaaaatactctccaaaaaactgtaaacttcggcgcttgtccaaaccaccatttcagacaaatccatctcctgaaatggtatccaaactggatctcactgatgccaaaaactctgatactgctcatattaagtccatagaaattacttcgatccttaatggacttcaagcttctgaaagttctgctgaagacagtgagcaggaagatgagagaggtgctcaagacatggataataatggcaaagaggaatctaagattgatcatttgaccaacaacagaaatgatcttatttcaaaggaggaacagaacagttcatctttgctagaagaaaacaaagttcatgcagatttggtaatatccaaaccagtgtcaaaatctccagaaagattaaggaaagatatagaagtattatccgaagatactgattatgaagaagatgaagtcacaaaaaagagaaaggatgtcaagaaggacacaacagataaatcttcaaaaccacaaataaaacgtggtaaaagaaggtattgcaatacagaagagtgtctaaaaactggatcacctggcaaaaaggaagagaaggccaagaacaaagaatcactttgcatggaaaacagtagcaacagctcttcagatgaagatgaagaagaaacaaaagcaaagatgacaccaactaagaaatacaatggtttggaggaaaaaagaaaatctctacggacaactggtttctattcaggattttcagaagtggcagaaaaaaggattaaacttttaaataactctgatgaaagacttcaaaacagcagggccaaagatcgaaaagatgtctggtcaagtattcagggacagtggcctaaaaaaacgctgaaagagcttttttcagactctgatactgaggctgcagcttccccaccgcatcctgccccagaggagggggtggcagaggagtcactgcagactgtggctgaagaggagagttgttcacccagtgtagaactagaaaaaccacctccagtcaatgtcgatagtaaacccattgaagaaaaaacagtagaggtcaatgacagaaaagcagaatttccaagtagtggcagtaattcagtgctaaatacccctcctactacacctgaatcgccttcatcagtcactgtaacagaaggcagccggcagcagtcttctgtaacagtatcagaaccactggctccaaaccaagaagaggttcgaagtatcaagagtgaaactgatagcacaattgaggtggatagtgttgctggggagctccaagacctccagtctgaagggaatagctcgccagcaggttttgatgccagtgtgagctcaagcagtagtaatcagccagaaccagaacatcctgaaaaaggtgagaaggaaaatgtgtatgttgacttattttagggtttcccctcttaaagtttcaatgatttcacagtatctcttgttataacctgaggcgattaagtgtcatatttgtgtgaacatggtaaaaatggaaattttaaaggtaatttgaaaatgaatagtggaatgcatttaaaagcttgagaaggctttaatgtgctttgcttgagccatccatggcattttattgtggaccagaacacatgctagaaattgcacccaggcccaaatccaaacctgtttgagaattcattatatgcagtggttgactatatggcatgagcagcttaaatctatttctgtaacattgtttttgcaattgtaatgtgcagtttctcacgaacattttgatttattgacagaccccnccacccttaaccaaatactgtatgtaggggtttggagcaaccaactgtccaggcactgctttcctcagacaaccgtgtcaaactgattttcaagcctgactaacttgtgtgagtttgtaaaggaatttgatgctttcttagatgcatagcttccaaattgaaggaccaatgtgtacgttaataacctacagtaatacttttttgattttccgtgaaattgttaaaagtggaaattcaaatcggtaccttcccaaagtattagtgcctttcgatggtgccatagccatacttctgtcatcatttttcttataaaccacttcattcaggtatctttaaatcagtatactctaggctgacacctggctttggaacacacttttccatcgtaaagacagagcactggagtatgttttttatataccgtaaaagattttagaatgctagctttaggttttcagcaaagcttaaagagatatggtctagatcaaattagttaattctatgttttctcaggaatcttgacttaaaacatttctgttttaaaataaattaaaaaaatacttgcaattaaattgaaatgttctttgctttttttcacatttacaagtataactactatgattttatctgtgccatactatctcatgcaactgaactatccaggcatgactaatcttcaaaatgaaagaatcctttatttcagaatattaggcnttcaacagtaagattttactggccaggtgtggtcactcacacctgtnatcccagcaatttgggangtctgggaggtcaaggcggtggatcgcttgagtccaggagttcaagaccagcctggacaacatggcaaaaccccatctctaccaaaaatacaaacgtcagccagctgtggtggcgcatgcctgtagtcccagctaccttgggggctgatgagggagaatcacttgatcccggaaaggctgcagtgagccaagatcacgccactgcactccagcctgggtgataaaacaagaccctgtctc

SEQ ID NO: 441356 - DNA, 2357 bp, Homo sapiens
agcgatgtttgcccgtcagtcgagtccggagtgaggagctcggtcgccgaagcggagggagactcttgagcttcatcttgccgccgccacggccaccgcctggacctttgcccggagggagctgcagagggtccatcgccgccgtcctctggagggcagcgcgattgggggcccggacctccagtccgggggggatttttcgtcgtccccctccccccaaccagggagcccgagcggccgccaaacaaaggtaccagtcgccgccgcgggaggaggaggagccggagcctctgcctcagcagccgctggacccgccgcccttcttccccatctctcccccgggcctgctggttttgggggggagaaggagagaggggactctggacgtgccagggtcagatctcgcctccgaggaaggtgcagctgaacctggtgttttagaggataccttggtcccagagtcatcatgaaggcccttgatgagcctccctatttgacagtgggcactgatgtgagtgctaaatacagaggagccttttgtgaagccaagatcaagacagcaaaaagacttgtcaaagtcaaggtgacatttagacatgattcttcaacagtggaagttcaggatgaccacataaagggcccactaaaggtaggagctattgtggaagtgaagaatcttgatggtgcatatcaggaagctgttatcaataaactaacagatgcgagttggtacactgtagtttttgatgacggagatgagaagacactgagacgatcttcactgtgcctgaaaggagagaggcattttgctgaaagtgaaacattagaccagctcccactcaccaaccctgagcattttggcactccagtcataggaaagaaaacaaatagaggaagaagatctaatcatataccagaggaagagtcttcatcatcctccagtgatgaagatgaggatgataggaaacagattgatgagctactaggcaaagttgtatgtgtagattacattagtttggataaaaagaaagcactgtggtttcctgcattggtggtttgtcctgattgtagtgatgagattgctgtaaaaaaggacaatattcttgttcgatctttcaaagatggaaaatttacttcagttccaagaaaagatgtccatgaaattactagtgacactgcaccaaagcctgatgctgttttaaagcaagcctttgaacaggcacttgaatttcacaaaagtagaactattcctgctaactggaagactgaattgaaagaagatagctctagcagtgaagcagaggaagaagaggaggaggaagatgatgaaaaagaaaaggaggataatagcagtgaagaagaagaagaaatagaaccatttccagaagaaagggagaactttcttcagcaattgtacaaatttatggaagatagaggtacacctattaacaaacgacctgtacttggatatcgaaatttgaatctctttaagttattcagacttgtacacaaacttggaggatttgataatattgaaagtggagctgtttggaaacaagtctaccaagatcttggaatccctgtcttaaattcagctgcaggatacaatgttaaatgtgcttataaaaaatacttatatggttttgaggagtactgtagatcagccaacattgaatttcagatggcattgccagagaaagttgttaacaagcaatgtaaggagtgtgaaaatgtaaaagaaataaaagttaaggaggaaaatgaaacagagatcaaagaaataaagatggaggaggagaggaatataataccaagagaagaaaagcctattgaggatgaaattgaaagaaaagaaaatattaagccctctctgggaagtaaaaagaatttattagaatctatacctacacattctgatcaggaaaaagaagttaacattaaaaaaccagaagacaatgaaaatctggatgacaaagatgatgacacaactagggtagatgaatccctcaacataaaggtagaagctgaggaagaaaaagcaaaatctggagatgaaacgaataaagaagaagatgaagatgatgaagaagcagaagaggaggaggaggaggaagaagaagaagaggatgaagatgatgatgacaacaatgaggaagaggagtttgagtgctatccaccaggcatgaaaggcataattaaactttacttcctctctttcttcttcccactcatcctaaccctactcctaatcacataacctattcccccgagcaatctcaattacaatatataccccaacaaacaatgttcaaccagtaactactactaatcaacgcccataatcatacaaagccccc

SEQ ID NO: 441357 - DNA, 1795 bp, Homo sapiens
agcgatgtttgcccgtcagtcgagtccggagtgaggagctcggtcgccgaagcggagggagactcttgagcttcatcttgccgccgccacggccaccgcctggacctttgcccggagggagctgcagagggtccatcgccgccgtcctctggagggcagcgcgattgggggcccggacctccagtccgggggggatttttcgtcgtccccctccccccaaccagggagcccgagcggccgccaaacaaaggtaccagtcgccgccgcgggaggaggaggagccggagcctctgcctcagcagccgctggacccgccgcccttcttccccatctctcccccgggcctgctggttttgggggggagaaggagagaggggactctggacgtgccagggtcagatctcgcctccgaggaaggtgcagctgaacctggtgttttagaggataccttggtcccagagtcatcatgaaggcccttgatgagcctccctatttgacagtgggcactgatgtgagtgctaaatacagaggagccttttgtgaagccaagatcaagacagcaaaaagacttgtcaaagtcaaggtgacatttagacatgattcttcaacagtggaagttcaggatgaccacataaagggcccactaaaggtaggagctattgtggaagtgaagaatcttgatggtgcatatcaggaagctgttatcaataaactaacagatgcgagttggtacactgtagtttttgatgacggagatgagaagacactgagacgatcttcactgtgcctgaaaggagagaggcattttgctgaaagtgaaacattagaccagctcccactcaccaaccctgagcattttggcactccagtcataggaaagaaaacaaatagaggaagaagatctaatcatataccagaggaagagtcttcatcatcctccagtgatgaagatgaggatgataggaaacagattgatgagctactaggcaaagttgtatgtgtagattacattagtttggataaaaagaaagcactgtggtttcctgcattggtggtttgtcctgattgtagtgatgagattgctgtaaaaaaggacaatattcttgttcgatctttcaaagatggaaaatttacttcagttccaagaaaagatgtccatgaaattactagtgacactgcaccaaagcctgatgctgttttaaagcaagcctttgaacaggcacttgaatttcacaaaagtagaactattcctgctaactggaagactgaattgaaagaagatagctctagcagtgaagcagaggaagaagaggaggaggaagatgatgaaaaagaaaaggaggataatagcagtgaagaagaagaagaaatagaaccatttccagaagaaagggagaactttcttcagcaattgtacaaatttatggaagatagaggtacacctattaacaaacgacctgtacttggatatcgaaatttgaatctctttaagttattcagacttgtacacaaacttggaggatttgataatattgaaagtggagctgtttggaaacaagtctaccaagatcttggaatccctgtcttaaattcagctgcaggatacaatgttaaatgtgcttataaaaaatacttatatggttttgaggagtactgtagatcagccaacattgaatttcagatggcattgccagagaaagttgttaacaagcaatgtaaggaagtgctaggtaagaagtgtagggggggtatacctctagagacgactatgcacccagacacgatgcactgccgt

SEQ ID NO: 441358 - DNA, 956 bp, Homo sapiens
agcgatgtttgcccgtcagtcgagtccggagtgaggagctcggtcgccgaagcggagggagactcttgagcttcatcttgccgccgccacggccaccgcctggacctttgcccggagggagctgcagagggtccatcgccgccgtcctctggagggcagcgcgattgggggcccggacctccagtccgggggggatttttcgtcgtccccctccccccaaccagggagcccgagcggccgccaaacaaaggtaccagtcgccgccgcgggaggaggaggagccggagcctctgcctcagcagccgctggacccgccgcccttcttccccatctctcccccgggcctgctggttttgggggggagaaggagagaggggactctggacgtgccagggtcagatctcgcctccgaggaaggtgcagctgaacctggtgttttagaggataccttggtcccagagtcatcatgaaggcccttgatgagcctccctatttgacagtgggcactgatgtgagtgctaaatacagaggagccttttgtgaagccaagatcaagacagcaaaaagacttgtcaaagtcaaggtgacatttagacatgattcttcaacagtggaagttcaggatgaccacataaagggcccactaaaggtaggagctattgtggaagtgaagaatcttgatggtgcatatcaggaagctgttatcaataaactaacagatgcgagttggtacactgtagtttttgatgacggagatgagaagacactgagacgatcttcactgtgcctgaaaggagagaggcattttgctgaaagtgaaacattagaccagctcccactcaccaaccctgagcattttggcactccagtcataggaaagaaaacaaatagaggaagaagatctaatcatataccagaggaaggagaggagggagggagggagagggagagaggtg

SEQ ID NO: 441359 - DNA, 532 bp, Homo sapiens
gttaatacacagtactttattgtacagactgtgtattaacagtgccagatattaaatagcttgaatgaacacatccacaatatacaaatgtcttacaaaggtgaagaatgttaatacacagtactttattgtacagactgttttactgttttaattgtagttctgtgtactttttttggatggggctggcatgttttctttgtttcctggcaatacgacgtgggaatttcaatgcgttttgttgtagatgctaacgtgtcagaatcctttacattcaacttttctaagaaaagcattttcagtcttgtagtgtgtgcttacagtaactaattttgttgaaaatggtttcaagttattcaaatttgtacaggactgtaaagatttgttgacagcaaaatgttgaagaaaaaagcttatagaataaaagctataaagtatatattaggatctgcaaacaatgaagaattatgtaatatattgtacaaatgtaagcaaaggctctgaaataaaatgccatagtttgtgaatcctt

SEQ ID NO: 441360 - DNA, 595 bp, Homo sapiens
agcgatgtttgcccgtcagtcgagtccggagtgaggagctcggtcgccgaagcggagggagactcttgagcttcatcttgccgccgccacggccaccgcctggacctttgcccggagggagctgcagagggtccatcgccgccgtcctctggagggcagcgcgattgggggcccggacctccagtccgggggggatttttcgtcgtccccctccccccaaccagggagcccgagcggccgccaaacaaaggtaccagtcgccgccgcgggaggaggaggagccggagcctctgcctcagcagccgctggacccgccgcccttcttccccatctctcccccgggcctgctggttttgggggggagaaggagagaggggactctggacgtgccagggtcagatctcgcctccgaggaaggtgcagctgaacctggtgttttagaggataccttggtcccagagtcatcatgaaggtaagattgcctgcggaaaacgaatctctggggttatcgaattcaggaagtaggaggtttcgacgaggtcgtcgtgtggggcttccgagttttgcagaggaaggtgtgtttggtgacttggtg

SEQ ID NO: 441361 - DNA, 786 bp, Homo sapiens
gacagagcgagactttgtctcaaaaaacaaacaaacaaaaaaaaacgaaaaaaggaaacagtgagagacttcctctgatgaaaataactaatgtgttatttgctttgtaaacctagtggcggagaatgcaacagttgagctatgcactgttttgatccaacttgaagaagcaattaagcctcccactcttgtcaccatttacatgtacaagaaaactcctaagtacagaaagatggagggattaggaggggacaaatgatttttggatggattgcagatttttcctgttttgatacttgtttcactgttacaaaaagtgtattctgtattttatttctgtgtcttgtagactaggcacagttctttccctctttgacccacgcaggagccttccctggtctgtccttttcattacttctgtagttgggcactgtctagcttcttgagctacactagcttttcctttcttcacatcgtagaactgtgagaattgaccactgttgttgtaagctaaatgattttggacaatatagcggaattttagttcagaggactagtattttctgtctattgttagacataaatttttattaagctcttggtttggtctcccttttccttaggtgctgctacatcctcatcctcctcttcaccttcatccagttccataacagctgctgttatgttaactttagctgaaccgtcaatgtccagcgcatcacaaaatggaatgtcagttgagtgcaggtgacagcaggacttgctaaagcactttgcacttaatgg

SEQ ID NO: 441362 - DNA, 380 bp, Homo sapiens
aaagagtaactttgattacgtaaaaagcctttgaagtattttaatgaacactagtctttgctattggtaagaaatctgcttgttttattaaaatgcttaattgaagaaaataatattcttctgtgattaaaattaggaagaaatagaaccatttccagaagaaagggagaactttcttcagcaattgtacaaatttatggaagatagaggtgagtattttttatttatcattaacgtggtaagttttggacagataattagtatcttaaaaataagaatagaattttgtttactgaactttatgtcatcagtaattatggctgtctttttgactctgatatcaccagcacctagcatagcgcctgtcacgtaacaagtag

SEQ ID NO: 441363 - DNA, 5775 bp, Homo sapiens
agcgatgtttgcccgtcagtcgagtccggagtgaggagctcggtcgccgaagcggagggagactcttgagcttcatcttgccgccgccacggccaccgcctggacctttgcccggagggagctgcagagggtccatcgccgccgtcctctggagggcagcgcgattgggggcccggacctccagtccgggggggatttttcgtcgtccccctccccccaaccagggagcccgagcggccgccaaacaaaggtaccagtcgccgccgcgggaggaggaggagccggagcctctgcctcagcagccgctggacccgccgcccttcttccccatctctcccccgggcctgctggttttgggggggagaaggagagaggggactctggacgtgccagggtcagatctcgcctccgaggaaggtgcagctgaacctggtgttttagaggataccttggtcccagagtcatcatgaaggcccttgatgagcctccctatttgacagtgggcactgatgtgagtgctaaatacagaggagccttttgtgaagccaagatcaagacagcaaaaagacttgtcaaagtcaaggtgacatttagacatgattcttcaacagtggaagttcaggatgaccacataaagggcccactaaaggtaggagctattgtggaagtgaagaatcttgatggtgcatatcaggaagctgttatcaataaactaacagatgcgagttggtacactgtagtttttgatgacggagatgagaagacactgagacgatcttcactgtgcctgaaaggagagaggcattttgctgaaagtgaaacattagaccagctcccactcaccaaccctgagcattttggcactccagtcataggaaagaaaacaaatagaggaagaagatctaatcatataccagaggaagagtcttcatcatcctccagtgatgaagatgaggatgataggaaacagattgatgagctactaggcaaagttgtatgtgtagattacattagtttggataaaaagaaagcactgtggtttcctgcattggtggtttgtcctgattgtagtgatgagattgctgtaaaaaaggacaatattcttgttcgatctttcaaagatggaaaatttacttcagttccaagaaaagatgtccatgaaattactagtgacactgcaccaaagcctgatgctgttttaaagcaagcctttgaacaggcacttgaatttcacaaaagtagaactattcctgctaactggaagactgaattgaaagaagatagctctagcagtgaagcagaggaagaagaggaggaggaagatgatgaaaaagaaaaggaggataatagcagtgaagaagaagaagaaatagaaccatttccagaagaaagggagaactttcttcagcaattgtacaaatttatggaagatagaggtacacctattaacaaacgacctgtacttggatatcgaaatttgaatctctttaagttattcagacttgtacacaaacttggaggatttgataatattgaaagtggagctgtttggaaacaagtctaccaagatcttggaatccctgtcttaaattcagctgcaggatacaatgttaaatgtgcttataaaaaatacttatatggttttgaggagtactgtagatcagccaacattgaatttcagatggcattgccagagaaagttgttaacaagcaatgtaaggagtgtgaaaatgtaaaagaaataaaagttaaggaggaaaatgaaacagagatcaaagaaataaagatggaggaggagaggaatataataccaagagaagaaaagcctattgaggatgaaattgaaagaaaagaaaatattaagccctctctgggaagtaaaaagaatttattagaatctatacctacacattctgatcaggaaaaagaagttaacattaaaaaaccagaagacaatgaaaatctggatgacaaagatgatgacacaactagggtagatgaatccctcaacataaaggtagaagctgaggaagaaaaagcaaaatctggatacgatgaatggattaaagcagataaaatagtaagacctgctgataaaaatgtgccaaagataaaacatcggaagaaaataaagaataaattagacaaagaaaaagacaaagatgaaaaatactctccaaaaaactgtaaacttcggcgcttgtccaaaccaccatttcagacaaatccatctcctgaaatggtatccaaactggatctcactgatgccaaaaactctgatactgctcatattaagtccatagaaattacttcgatccttaatggacttcaagcttctgaaagttctgctgaagacagtgagcaggaagatgagagaggtgctcaagacatggataataatggcaaagaggaatctaagattgatcatttgaccaacaacagaaatgatcttatttcaaaggaggaacagaacagttcatctttgctagaagaaaacaaagttcatgcagatttggtaatatccaaaccagtgtcaaaatctccagaaagattaaggaaagatatagaagtattatccgaagatactgattatgaagaagatgaagtcacaaaaaagagaaaggatgtcaagaaggacacaacagataaatcttcaaaaccacaaataaaacgtggtaaaagaaggtattgcaatacagaagagtgtctaaaaactggatcacctggcaaaaaggaagagaaggccaagaacaaagaatcactttgcatggaaaacagtagcaacagctcttcagatgaagatgaagaagaaacaaaagcaaagatgacaccaactaagaaatacaatggtttggaggaaaaaagaaaatctctacggacaactggtttctattcaggattttcagaagtggcagaaaaaaggattaaacttttaaataactctgatgaaagacttcaaaacagcagggccaaagatcgaaaagatgtctggtcaagtattcagggacagtggcctaaaaaaacgctgaaagagcttttttcagactctgatactgaggctgcagcttccccaccgcatcctgccccagaggagggggtggcagaggagtcactgcagactgtggctgaagaggagagttgttcacccagtgtagaactagaaaaaccacctccagtcaatgtcgatagtaaacccattgaagaaaaaacagtagaggtcaatgacagaaaagcagaatttccaagtagtggcagtaattcagtgctaaatacccctcctactacacctgaatcgccttcatcagtcactgtaacagaaggcagccggcagcagtcttctgtaacagtatcagaaccactggctccaaaccaagaagaggttcgaagtatcaagagtgaaactgatagcacaattgaggtggatagtgttgctggggagctccaagacctccagtctgaagggaatagctcgccagcaggttttgatgccagtgtgagctcaagcagtagtaatcagccagaaccagaacatcctgaaaaagcctgtacaggtcagaaaagagtgaaagatgctcagggaggaggaagttcatcaaaaaagcagaaaagaagccataaagcaacagtggtaaacaacaaaaagaagggaaaaggcacaaatagtagtgatagtgaagaactttcagctggtgaaagtataactaagagtcagccagtcaaatcagtttccactggaatgaagtctcatagtaccaaatctcccgcaaggacgcagtctccaggaaaatgtggaaagaatggtgataaggatcctgatctcaaggaacccagtaatcgattacccaaagtttacaaatggagttttcagatgtcggacctggaaaatatgacaagtgccgaacgcatcacaattcttcaagaaaaacttcaagaaatcagaaaacattatctgtcattaaaatctgaagtagcttccattgatcggaggagaaagcgtttaaagaagaaagagagagaaagtgctgctacatcctcatcctcctcttcaccttcatccagttccataacagctgctgttatgttaactttagctgaaccgtcaatgtccagcgcatcacaaaatggaatgtcagttgagtgcaggtgacagcaggacttgctaaagcactttgcacttaatggctgttgagggccactttttttttatactgcacagtggcacaaaaaaatatcagacaagcactattttatatttaaaaattgtttcttgacaagctgacttggcacttaagtgcacttttttatgaagaaaaagtacaatgaactgcttttcctcaagcaataattgtttccaacttgtctgggaattgtgtgtctggtaactggaaggccttccactgtggcaaatggaggcttttcactgcctgtagagacaatacagtaagcatagttaaggggtgggtcagaacatgttaagataacttactgtatatgtattcccttgtattttgttaaagctggaacatttgatatttttccatttatttatgaaaaaatatgaacctattttcatttgtacaaggtaattgttttttaaagcaagtcaccttagggtggctttaattgtataagtcaagcacatgtaataaattcaaaacctgcagttaacaggatattagacatcaatcctggtaaccaaatattaaagattctctttaaaaaagactgaacatgtttacaggtttgaattaggctaaaaggtcttgcagtggcttttcatggcccttcaaattggaatggaactactgtactttgccatttttctataaatcagtatttttttttaattttgatatacattgtgtgaaaaaagaaaatggctaataaactgtattaaatcttaaacaatgtataaagattgtacttagccagttcaaagtgtatatttattcataatgaattataacagttatatttttgtgttttcttgtaaatgtttcttttcccttaaatacagataattcatttgtattgcttattttattatgagctacaacaaaaggacttcaggaacaagtaatgtattagtatggttcaagattgttgataggaactgtctcaaaaggatggtggttattttaaatataaatagctaatgggggtggtaggcctataaaattaaatgccttgtataaaatccaaaatgaatgcaaaattgttttcacttgtattgactttatgttgtatgattccaatctctgttctgtttggcacttgtatttaattcttcacctttgtaagacatttgtatattgtggatgtgttcattcaagctatttaatatctggcactgttaatacacagtactttattgtacagactgttttactgttttaattgtagttctgtgtactttttttggatggggctggcatgttttctttgtttcctggcaatacgacgtgggaatttcaatgcgttttgttgtagatgctaacgtgtcagaatcctttacattcaacttttctaagaaaagcattttcagtcttgtagtgtgtgcttacagtaactaattttgttgaaaatggtttcaagttattcaaatttgtacaggactgtaaagatttgttgacagcaaaatgttgaagaaaaaagcttatagaataaaagctataaagtatatattaggatctgcaaacaatgaagaattatgtaatatattgtacaaatgtaagcaaaggctctgaaataaaatgccatagtttgtgaatcctt

SEQ ID NO: 441364 - DNA, 4384 bp, Homo sapiens
  misc_feature (3365)..(3365): n is a, c, g, or t
  misc_feature (4079)..(4079): n is a, c, g, or t
  misc_feature (4126)..(4126): n is a, c, g, or t
  misc_feature (4144)..(4144): n is a, c, g, or t
ctgggaataggggaaatcagtgaatgaagcctcctatgatggcaaatacagctcctattgataggacatagtggaagtgagctacaacgtagtacgtgtcgtgtagtacgatgtctagtgatgagtttgctaatacaatgccagtcaggccacctacggtgaaaagaaagatgaatcctagggctcagagcactgtggtttcctgcattggtggtttgtcctgattgtagtgatgagattgctgtaaaaaaggacaatattcttgttcgatctttcaaagatggaaaatttacttcagttccaagaaaagatgtccatgaaattactagtgacactgcaccaaagcctgatgctgttttaaagcaagcctttgaacaggcacttgaatttcacaaaagtagaactattcctgctaactggaagactgaattgaaagaagatagctctagcagtgaagcagaggaagaagaggaggaggaagatgatgaaaaagaaaaggaggataatagcagtgaagaagaagaagaaatagaaccatttccagaagaaagggagaactttcttcagcaattgtacaaatttatggaagatagaggtacacctattaacaaacgacctgtacttggatatcgaaatttgaatctctttaagttattcagacttgtacacaaacttggaggatttgataatattgaaagtggagctgtttggaaacaagtctaccaagatcttggaatccctgtcttaaattcagctgcaggatacaatgttaaatgtgcttataaaaaatacttatatggttttgaggagtactgtagatcagccaacattgaatttcagatggcattgccagagaaagttgttaacaagcaatgtaaggagtgtgaaaatgtaaaagaaataaaagttaaggaggaaaatgaaacagagatcaaagaaataaagatggaggaggagaggaatataataccaagagaagaaaagcctattgaggatgaaattgaaagaaaagaaaatattaagccctctctgggaagtaaaaagaatttattagaatctatacctacacattctgatcaggaaaaagaagttaacattaaaaaaccagaagacaatgaaaatctggatgacaaagatgatgacacaactagggtagatgaatccctcaacataaaggtagaagctgaggaagaaaaagcaaaatctggagatgaaacgaataaagaagaagatgaagatgatgaagaagcagaagaggaggaggaggaggaagaagaagaagaggatgaagatgatgatgacaacaatgaggaagaggagtttgagtgctatccaccaggcatgaaagtccaagtgcggtatggacgagggaaaaatcaaaaaatgtatgaagctagtattaaagattctgatgtcgaaggtggagaggtcctttacttggtgcattactgcggatggaatgtgagatacgatgaatggattaaagcagataaaatagtaagacctgctgataaaaatgtgccaaagataaaacatcggaagaaaataaagaataaattagacaaagaaaaagacaaagatgaaaaatactctccaaaaaactgtaaacttcggcgcttgtccaaaccaccatttcagacaaatccatctcctgaaatggtatccaaactggatctcactgatgccaaaaactctgatactgctcatattaagtccatagaaattacttcgatccttaatggacttcaagcttctgaaagttctgctgaagacagtgagcaggaagatgagagaggtgctcaagacatggataataatggcaaagaggaatctaagattgatcatttgaccaacaacagaaatgatcttatttcaaaggaggaacagaacagttcatctttgctagaagaaaacaaagttcatgcagatttggtaatatccaaaccagtgtcaaaatctccagaaagattaaggaaagatatagaagtattatccgaagatactgattatgaagaagatgaagtcacaaaaaagagaaaggatgtcaagaaggacacaacagataaatcttcaaaaccacaaataaaacgtggtaaaagaaggtattgcaatacagaagagtgtctaaaaactggatcacctggcaaaaaggaagagaaggccaagaacaaagaatcactttgcatggaaaacagtagcaacagctcttcagatgaagatgaagaagaaacaaaagcaaagatgacaccaactaagaaatacaatggtttggaggaaaaaagaaaatctctacggacaactggtttctattcaggattttcagaagtggcagaaaaaaggattaaacttttaaataactctgatgaaagacttcaaaacagcagggccaaagatcgaaaagatgtctggtcaagtattcagggacagtggcctaaaaaaacgctgaaagagcttttttcagactctgatactgaggctgcagcttccccaccgcatcctgccccagaggagggggtggcagaggagtcactgcagactgtggctgaagaggagagttgttcacccagtgtagaactagaaaaaccacctccagtcaatgtcgatagtaaacccattgaagaaaaaacagtagaggtcaatgacagaaaagcagaatttccaagtagtggcagtaattcagtgctaaatacccctcctactacacctgaatcgccttcatcagtcactgtaacagaaggcagccggcagcagtcttctgtaacagtatcagaaccactggctccaaaccaagaagaggttcgaagtatcaagagtgaaactgatagcacaattgaggtggatagtgttgctggggagctccaagacctccagtctgaagggaatagctcgccagcaggttttgatgccagtgtgagctcaagcagtagtaatcagccagaaccagaacatcctgaaaaaggtgagaaggaaaatgtgtatgttgacttattttagggtttcccctcttaaagtttcaatgatttcacagtatctcttgttataacctgaggcgattaagtgtcatatttgtgtgaacatggtaaaaatggaaattttaaaggtaatttgaaaatgaatagtggaatgcatttaaaagcttgagaaggctttaatgtgctttgcttgagccatccatggcattttattgtggaccagaacacatgctagaaattgcacccaggcccaaatccaaacctgtttgagaattcattatatgcagtggttgactatatggcatgagcagcttaaatctatttctgtaacattgtttttgcaattgtaatgtgcagtttctcacgaacattttgatttattgacagaccccnccacccttaaccaaatactgtatgtaggggtttggagcaaccaactgtccaggcactgctttcctcagacaaccgtgtcaaactgattttcaagcctgactaacttgtgtgagtttgtaaaggaatttgatgctttcttagatgcatagcttccaaattgaaggaccaatgtgtacgttaataacctacagtaatacttttttgattttccgtgaaattgttaaaagtggaaattcaaatcggtaccttcccaaagtattagtgcctttcgatggtgccatagccatacttctgtcatcatttttcttataaaccacttcattcaggtatctttaaatcagtatactctaggctgacacctggctttggaacacacttttccatcgtaaagacagagcactggagtatgttttttatataccgtaaaagattttagaatgctagctttaggttttcagcaaagcttaaagagatatggtctagatcaaattagttaattctatgttttctcaggaatcttgacttaaaacatttctgttttaaaataaattaaaaaaatacttgcaattaaattgaaatgttctttgctttttttcacatttacaagtataactactatgattttatctgtgccatactatctcatgcaactgaactatccaggcatgactaatcttcaaaatgaaagaatcctttatttcagaatattaggcnttcaacagtaagattttactggccaggtgtggtcactcacacctgtnatcccagcaatttgggangtctgggaggtcaaggcggtggatcgcttgagtccaggagttcaagaccagcctggacaacatggcaaaaccccatctctaccaaaaatacaaacgtcagccagctgtggtggcgcatgcctgtagtcccagctaccttgggggctgatgagggagaatcacttgatcccggaaaggctgcagtgagccaagatcacgccactgcactccagcctgggtgataaaacaagaccctgtctc

SEQ ID NO: 441365 - DNA, 869 bp, Homo sapiens
tgggaaaatgatgtgctttcctctcatgataaactcttgctgttattttttagaaatttagaaaatgatttaagatttaaattagccattttacaggtcttaggaaatgtaataagagtttgggaatacctatattcatcattggcatgcttattctttgtgaggataaatggaaatattttatttttttctctccctagaccagaggaagagtcttcatcatcctccagtgatgaagatgaggatgataggaaacagattgatgagctactaggcaaagttgtatgtgtagattacattagtttggataaaaagaaagcactgtggtttcctgcattggtgagtagcttcagtatacaagagtttaatttcaaactttataagtttatgaagaaaacaattttcttactaatgtttttcataggtacaaaatgaggaaatgtttttagcattatttagttcacactaagcttactttcaacgttgtctttgaatacaaagaactcttgatgtcattcaggaaaggcaaaatcttgataatcttagaggtttagctatgtggaagttgaattctctctctctcggtagaaaattcatgatgcaaacttttaaagctcctaagtccatgtaggtctagattgcaaaagaacaacagaatctttcttggttgacagggataactagaccttttcctcatacttagtgaatcagggtgtttccatccttgatcttaatcttgccttttaggtactccctatataatcatgactgcaattatacattaccccactcttcaattttctctacagtagattgttaattctacctactttttaatgtttttctctccaaaagattgcaattcctta

SEQ ID NO: 441366 - DNA, 4801 bp, Homo sapiens
gaacgcaccgggaggtttccgaagaggagattccgggctcatccaaataacacaaatatgaatatataatataagaagaggaggaggaagatgatgaaaaagaaaaggaggataatagcagtgaagaagaagaagaaatagaaccatttccagaagaaagggagaactttcttcagcaattgtacaaatttatggaagatagaggtacacctattaacaaacgacctgtacttggatatcgaaatttgaatctctttaagttattcagacttgtacacaaacttggaggatttgataatattgaaagtggagctgtttggaaacaagtctaccaagatcttggaatccctgtcttaaattcagctgcaggatacaatgttaaatgtgcttataaaaaatacttatatggttttgaggagtactgtagatcagccaacattgaatttcagatggcattgccagagaaagttgttaacaagcaatgtaaggagtgtgaaaatgtaaaagaaataaaagttaaggaggaaaatgaaacagagatcaaagaaataaagatggaggaggagaggaatataataccaagagaagaaaagcctattgaggatgaaattgaaagaaaagaaaatattaagccctctctgggaagtaaaaagaatttattagaatctatacctacacattctgatcaggaaaaagaagttaacattaaaaaaccagaagacaatgaaaatctggatgacaaagatgatgacacaactagggtagatgaatccctcaacataaaggtagaagctgaggaagaaaaagcaaaatctggagatgaaacgaataaagaagaagatgaagatgatgaagaagcagaagaggaggaggaggaggaagaagaagaagaggatgaagatgatgatgacaacaatgaggaagaggagtttgagtgctatccaccaggcatgaaagtccaagtgcggtatggacgagggaaaaatcaaaaaatgtatgaagctagtattaaagattctgatgtcgaaggtggagaggtcctttacttggtgcattactgcggatggaatgtgagatacgatgaatggattaaagcagataaaatagtaagacctgctgataaaaatgtgccaaagataaaacatcggaagaaaataaagaataaattagacaaagaaaaagacaaagatgaaaaatactctccaaaaaactgtaaacttcggcgcttgtccaaaccaccatttcagacaaatccatctcctgaaatggtatccaaactggatctcactgatgccaaaaactctgatactgctcatattaagtccatagaaattacttcgatccttaatggacttcaagcttctgaaagttctgctgaagacagtgagcaggaagatgagagaggtgctcaagacatggataataatggcaaagaggaatctaagattgatcatttgaccaacaacagaaatgatcttatttcaaaggaggaacagaacagttcatctttgctagaagaaaacaaagttcatgcagatttggtaatatccaaaccagtgtcaaaatctccagaaagattaaggaaagatatagaagtattatccgaagatactgattatgaagaagatgaagtcacaaaaaagagaaaggatgtcaagaaggacacaacagataaatcttcaaaaccacaaataaaacgtggtaaaagaaggtattgcaatacagaagagtgtctaaaaactggatcacctggcaaaaaggaagagaaggccaagaacaaagaatcactttgcatggaaaacagtagcaacagctcttcagatgaagatgaagaagaaacaaaagcaaagatgacaccaactaagaaatacaatggtttggaggaaaaaagaaaatctctacggacaactggtttctattcaggattttcagaagtggcagaaaaaaggattaaacttttaaataactctgatgaaagacttcaaaacagcagggccaaagatcgaaaagatgtctggtcaagtattcagggacagtggcctaaaaaaacgctgaaagagcttttttcagactctgatactgaggctgcagcttccccaccgcatcctgccccagaggagggggtggcagaggagtcactgcagactgtggctgaagaggagagttgttcacccagtgtagaactagaaaaaccacctccagtcaatgtcgatagtaaacccattgaagaaaaaacagtagaggtcaatgacagaaaagcagaatttccaagtagtggcagtaattcagtgctaaatacccctcctactacacctgaatcgccttcatcagtcactgtaacagaaggcagccggcagcagtcttctgtaacagtatcagaaccactggctccaaaccaagaagaggttcgaagtatcaagagtgaaactgatagcacaattgaggtggatagtgttgctggggagctccaagacctccagtctgaagggaatagctcgccagcaggttttgatgccagtgtgagctcaagcagtagtaatcagccagaaccagaacatcctgaaaaagcctgtacaggtcagaaaagagtgaaagatgctcagggaggaggaagttcatcaaaaaagcagaaaagaagccataaagcaacagtggtaaacaacaaaaagaagggaaaaggcacaaatagtagtgatagtgaagaactttcagctggtgaaagtataactaagagtcagccagtcaaatcagtttccactggaatgaagtctcatagtaccaaatctcccgcaaggacgcagtctccaggaaaatgtggaaagaatggtgataaggatcctgatctcaaggaacccagtaatcgattacccaaagtttacaaatggagttttcagatgtcggacctggaaaatatgacaagtgccgaacgcatcacaattcttcaagaaaaacttcaagaaatcagaaaacattatctgtcattaaaatctgaagtagcttccattgatcggaggagaaagcgtttaaagaagaaagagagagaaagtgctgctacatcctcatcctcctcttcaccttcatccagttccataacagctgctgttatgttaactttagctgaaccgtcaatgtccagcgcatcacaaaatggaatgtcagttgagtgcaggtgacagcaggacttgctaaagcactttgcacttaatggctgttgagggccactttttttttatactgcacagtggcacaaaaaaatatcagacaagcactattttatatttaaaaattgtttcttgacaagctgacttggcacttaagtgcacttttttatgaagaaaaagtacaatgaactgcttttcctcaagcaataattgtttccaacttgtctgggaattgtgtgtctggtaactggaaggccttccactgtggcaaatggaggcttttcactgcctgtagagacaatacagtaagcatagttaaggggtgggtcagaacatgttaagataacttactgtatatgtattcccttgtattttgttaaagctggaacatttgatatttttccatttatttatgaaaaaatatgaacctattttcatttgtacaaggtaattgttttttaaagcaagtcaccttagggtggctttaattgtataagtcaagcacatgtaataaattcaaaacctgcagttaacaggatattagacatcaatcctggtaaccaaatattaaagattctctttaaaaaagactgaacatgtttacaggtttgaattaggctaaaaggtcttgcagtggcttttcatggcccttcaaattggaatggaactactgtactttgccatttttctataaatcagtatttttttttaattttgatatacattgtgtgaaaaaagaaaatggctaataaactgtattaaatcttaaacaatgtataaagattgtacttagccagttcaaagtgtatatttattcataatgaattataacagttatatttttgtgttttcttgtaaatgtttcttttcccttaaatacagataattcatttgtattgcttattttattatgagctacaacaaaaggacttcaggaacaagtaatgtattagtatggttcaagattgttgataggaactgtctcaaaaggatggtggttattttaaatataaatagctaatgggggtggtaggcctataaaattaaatgccttgtataaaatccaaaatgaatgcaaaattgttttcacttgtattgactttatgttgtatgattccaatctctgttctgtttggcacttgtatttaattcttcacctttgtaagacatttgtatattgtggatgtgttcattcaagctatttaatatctggcactgttaatacacagtactttattgtacagactgttttactgttttaattgtagttctgtgtactttttttggatggggctggcatgttttctttgtttcctggcaatacgacgtgggaatttcaatgcgttttgttgtagatgctaacgtgtcagaatcctttacattcaacttttctaagaaaagcattttcagtcttgtagtgtgtgcttacagtaactaattttgttgaaaatggtttcaagttattcaaatttgtacaggactgtaaagatttgttgacagcaaaatgttgaagaaaaaagcttatagaataaaagctataaagtatatattaggatctgcaaacaatgaagaattatgtaatatattgtacaaatgtaagcaaaggctctgaaataaaatgccatagtttgtgaatcctt

SEQ ID NO: 441367 - DNA, 6088 bp, Homo sapiens
agcgatgtttgcccgtcagtcgagtccggagtgaggagctcggtcgccgaagcggagggagactcttgagcttcatcttgccgccgccacggccaccgcctggacctttgcccggagggagctgcagagggtccatcgccgccgtcctctggagggcagcgcgattgggggcccggacctccagtccgggggggatttttcgtcgtccccctccccccaaccagggagcccgagcggccgccaaacaaaggtaccagtcgccgccgcgggaggaggaggagccggagcctctgcctcagcagccgctggacccgccgcccttcttccccatctctcccccgggcctgctggttttgggggggagaaggagagaggggactctggacgtgccagggtcagatctcgcctccgaggaaggtgcagctgaacctggtgttttagaggataccttggtcccagagtcatcatgaaggcccttgatgagcctccctatttgacagtgggcactgatgtgagtgctaaatacagaggagccttttgtgaagccaagatcaagacagcaaaaagacttgtcaaagtcaaggtgacatttagacatgattcttcaacagtggaagttcaggatgaccacataaagggcccactaaaggtaggagctattgtggaagtgaagaatcttgatggtgcatatcaggaagctgttatcaataaactaacagatgcgagttggtacactgtagtttttgatgacggagatgagaagacactgagacgatcttcactgtgcctgaaaggagagaggcattttgctgaaagtgaaacattagaccagctcccactcaccaaccctgagcattttggcactccagtcataggaaagaaaacaaatagaggaagaagatctaatcatataccagaggaagagtcttcatcatcctccagtgatgaagatgaggatgataggaaacagattgatgagctactaggcaaagttgtatgtgtagattacattagtttggataaaaagaaagcactgtggtttcctgcattggtggtttgtcctgattgtagtgatgagattgctgtaaaaaaggacaatattcttgttcgatctttcaaagatggaaaatttacttcagttccaagaaaagatgtccatgaaattactagtgacactgcaccaaagcctgatgctgttttaaagcaagcctttgaacaggcacttgaatttcacaaaagtagaactattcctgctaactggaagactgaattgaaagaagatagctctagcagtgaagcagaggaagaagaggaggaggaagatgatgaaaaagaaaaggaggataatagcagtgaagaagaagaagaaatagaaccatttccagaagaaagggagaactttcttcagcaattgtacaaatttatggaagatagaggtacacctattaacaaacgacctgtacttggatatcgaaatttgaatctctttaagttattcagacttgtacacaaacttggaggatttgataatattgaaagtggagctgtttggaaacaagtctaccaagatcttggaatccctgtcttaaattcagctgcaggatacaatgttaaatgtgcttataaaaaatacttatatggttttgaggagtactgtagatcagccaacattgaatttcagatggcattgccagagaaagttgttaacaagcaatgtaaggagtgtgaaaatgtaaaagaaataaaagttaaggaggaaaatgaaacagagatcaaagaaataaagatggaggaggagaggaatataataccaagagaagaaaagcctattgaggatgaaattgaaagaaaagaaaatattaagccctctctgggaagtaaaaagaatttattagaatctatacctacacattctgatcaggaaaaagaagttaacattaaaaaaccagaagacaatgaaaatctggatgacaaagatgatgacacaactagggtagatgaatccctcaacataaaggtagaagctgaggaagaaaaagcaaaatctggagatgaaacgaataaagaagaagatgaagatgatgaagaagcagaagaggaggaggaggaggaagaagaagaagaggatgaagatgatgatgacaacaatgaggaagaggagtttgagtgctatccaccaggcatgaaagtccaagtgcggtatggacgagggaaaaatcaaaaaatgtatgaagctagtattaaagattctgatgtcgaaggtggagaggtcctttacttggtgcattactgcggatggaatgtgagatacgatgaatggattaaagcagataaaatagtaagacctgctgataaaaatgtgccaaagataaaacatcggaagaaaataaagaataaattagacaaagaaaaagacaaagatgaaaaatactctccaaaaaactgtaaacttcggcgcttgtccaaaccaccatttcagacaaatccatctcctgaaatggtatccaaactggatctcactgatgccaaaaactctgatactgctcatattaagtccatagaaattacttcgatccttaatggacttcaagcttctgaaagttctgctgaagacagtgagcaggaagatgagagaggtgctcaagacatggataataatggcaaagaggaatctaagattgatcatttgaccaacaacagaaatgatcttatttcaaaggaggaacagaacagttcatctttgctagaagaaaacaaagttcatgcagatttggtaatatccaaaccagtgtcaaaatctccagaaagattaaggaaagatatagaagtattatccgaagatactgattatgaagaagatgaagtcacaaaaaagagaaaggatgtcaagaaggacacaacagataaatcttcaaaaccacaaataaaacgtggtaaaagaaggtattgcaatacagaagagtgtctaaaaactggatcacctggcaaaaaggaagagaaggccaagaacaaagaatcactttgcatggaaaacagtagcaacagctcttcagatgaagatgaagaagaaacaaaagcaaagatgacaccaactaagaaatacaatggtttggaggaaaaaagaaaatctctacggacaactggtttctattcaggattttcagaagtggcagaaaaaaggattaaacttttaaataactctgatgaaagacttcaaaacagcagggccaaagatcgaaaagatgtctggtcaagtattcagggacagtggcctaaaaaaacgctgaaagagcttttttcagactctgatactgaggctgcagcttccccaccgcatcctgccccagaggagggggtggcagaggagtcactgcagactgtggctgaagaggagagttgttcacccagtgtagaactagaaaaaccacctccagtcaatgtcgatagtaaacccattgaagaaaaaacagtagaggtcaatgacagaaaagcagaatttccaagtagtggcagtaattcagtgctaaatacccctcctactacacctgaatcgccttcatcagtcactgtaacagaaggcagccggcagcagtcttctgtaacagtatcagaaccactggctccaaaccaagaagaggttcgaagtatcaagagtgaaactgatagcacaattgaggtggatagtgttgctggggagctccaagacctccagtctgaagggaatagctcgccagcaggttttgatgccagtgtgagctcaagcagtagtaatcagccagaaccagaacatcctgaaaaagcctgtacaggtcagaaaagagtgaaagatgctcagggaggaggaagttcatcaaaaaagcagaaaagaagccataaagcaacagtggtaaacaacaaaaagaagggaaaaggcacaaatagtagtgatagtgaagaactttcagctggtgaaagtataactaagagtcagccagtcaaatcagtttccactggaatgaagtctcatagtaccaaatctcccgcaaggacgcagtctccaggaaaatgtggaaagaatggtgataaggatcctgatctcaaggaacccagtaatcgattacccaaagtttacaaatggagttttcagatgtcggacctggaaaatatgacaagtgccgaacgcatcacaattcttcaagaaaaacttcaagaaatcagaaaacattatctgtcattaaaatctgaagtagcttccattgatcggaggagaaagcgtttaaagaagaaagagagagaaagtgctgctacatcctcatcctcctcttcaccttcatccagttccataacagctgctgttatgttaactttagctgaaccgtcaatgtccagcgcatcacaaaatggaatgtcagttgagtgcaggtgacagcaggacttgctaaagcactttgcacttaatggctgttgagggccactttttttttatactgcacagtggcacaaaaaaatatcagacaagcactattttatatttaaaaattgtttcttgacaagctgacttggcacttaagtgcacttttttatgaagaaaaagtacaatgaactgcttttcctcaagcaataattgtttccaacttgtctgggaattgtgtgtctggtaactggaaggccttccactgtggcaaatggaggcttttcactgcctgtagagacaatacagtaagcatagttaaggggtgggtcagaacatgttaagataacttactgtatatgtattcccttgtattttgttaaagctggaacatttgatatttttccatttatttatgaaaaaatatgaacctattttcatttgtacaaggtaattgttttttaaagcaagtcaccttagggtggctttaattgtataagtcaagcacatgtaataaattcaaaacctgcagttaacaggatattagacatcaatcctggtaaccaaatattaaagattctctttaaaaaagactgaacatgtttacaggtttgaattaggctaaaaggtcttgcagtggcttttcatggcccttcaaattggaatggaactactgtactttgccatttttctataaatcagtatttttttttaattttgatatacattgtgtgaaaaaagaaaatggctaataaactgtattaaatcttaaacaatgtataaagattgtacttagccagttcaaagtgtatatttattcataatgaattataacagttatatttttgtgttttcttgtaaatgtttcttttcccttaaatacagataattcatttgtattgcttattttattatgagctacaacaaaaggacttcaggaacaagtaatgtattagtatggttcaagattgttgataggaactgtctcaaaaggatggtggttattttaaatataaatagctaatgggggtggtaggcctataaaattaaatgccttgtataaaatccaaaatgaatgcaaaattgttttcacttgtattgactttatgttgtatgattccaatctctgttctgtttggcacttgtatttaattcttcacctttgtaagacatttgtatattgtggatgtgttcattcaagctatttaatatctggcactgttaatacacagtactttattgtacagactgttttactgttttaattgtagttctgtgtactttttttggatggggctggcatgttttctttgtttcctggcaatacgacgtgggaatttcaatgcgttttgttgtagatgctaacgtgtcagaatcctttacattcaacttttctaagaaaagcattttcagtcttgtagtgtgtgcttacagtaactaattttgttgaaaatggtttcaagttattcaaatttgtacaggactgtaaagatttgttgacagcaaaatgttgaagaaaaaagcttatagaataaaagctataaagtatatattaggatctgcaaacaatgaagaattatgtaatatattgtacaaatgtaagcaaaggctctgaaataaaatgccatagtttgtgaatccttgaatttttgtttctaaaagatttagtaattttagttcatttctgtatgtgatgac

SEQ ID NO: 441368 - DNA, 3835 bp, Homo sapiens
atagaggatcccattctacgctgcacgtgtctgccatcgctcaaatcctcaaggcagaatgtttagcaatgctgggtcgttatccagaagcacagtctgtggctagtgacattctacgaatggatccaccaatgcagatgctctgtatgtacgaggtctttgcctttatacgatgaatggattaaagcagataaaatagtaagacctgctgataaaaatgtgccaaagataaaacatcggaagaaaataaagaataaattagacaaagaaaaagacaaagatgaaaaatactctccaaaaaactgtaaacttcggcgcttgtccaaaccaccatttcagacaaatccatctcctgaaatggtatccaaactggatctcactgatgccaaaaactctgatactgctcatattaagtccatagaaattacttcgatccttaatggacttcaagcttctgaaagttctgctgaagacagtgagcaggaagatgagagaggtgctcaagacatggataataatggcaaagaggaatctaagattgatcatttgaccaacaacagaaatgatcttatttcaaaggaggaacagaacagttcatctttgctagaagaaaacaaagttcatgcagatttggtaatatccaaaccagtgtcaaaatctccagaaagattaaggaaagatatagaagtattatccgaagatactgattatgaagaagatgaagtcacaaaaaagagaaaggatgtcaagaaggacacaacagataaatcttcaaaaccacaaataaaacgtggtaaaagaaggtattgcaatacagaagagtgtctaaaaactggatcacctggcaaaaaggaagagaaggccaagaacaaagaatcactttgcatggaaaacagtagcaacagctcttcagatgaagatgaagaagaaacaaaagcaaagatgacaccaactaagaaatacaatggtttggaggaaaaaagaaaatctctacggacaactggtttctattcaggattttcagaagtggcagaaaaaaggattaaacttttaaataactctgatgaaagacttcaaaacagcagggccaaagatcgaaaagatgtctggtcaagtattcagggacagtggcctaaaaaaacgctgaaagagcttttttcagactctgatactgaggctgcagcttccccaccgcatcctgccccagaggagggggtggcagaggagtcactgcagactgtggctgaagaggagagttgttcacccagtgtagaactagaaaaaccacctccagtcaatgtcgatagtaaacccattgaagaaaaaacagtagaggtcaatgacagaaaagcagaatttccaagtagtggcagtaattcagtgctaaatacccctcctactacacctgaatcgccttcatcagtcactgtaacagaaggcagccggcagcagtcttctgtaacagtatcagaaccactggctccaaaccaagaagaggttcgaagtatcaagagtgaaactgatagcacaattgaggtggatagtgttgctggggagctccaagacctccagtctgaagggaatagctcgccagcaggttttgatgccagtgtgagctcaagcagtagtaatcagccagaaccagaacatcctgaaaaagcctgtacaggtcagaaaagagtgaaagatgctcagggaggaggaagttcatcaaaaaagcagaaaagaagccataaagcaacagtggtaaacaacaaaaagaagggaaaaggcacaaatagtagtgatagtgaagaactttcagctggtgaaagtataactaagagtcagccagtcaaatcagtttccactggaatgaagtctcatagtaccaaatctcccgcaaggacgcagtctccaggaaaatgtggaaagaatggtgataaggatcctgatctcaaggaacccagtaatcgattacccaaagtttacaaatggagttttcagatgtcggacctggaaaatatgacaagtgccgaacgcatcacaattcttcaagaaaaacttcaagaaatcagaaaacattatctgtcattaaaatctgaagtagcttccattgatcggaggagaaagcgtttaaagaagaaagagagagaaagtgctgctacatcctcatcctcctcttcaccttcatccagttccataacagctgctgttatgttaactttagctgaaccgtcaatgtccagcgcatcacaaaatggaatgcttcaaccactcccagaagacgtccttcactcccaaaatgaggcttttctgaaacggcgaggaccaccaaccgacggcgacaaacctgctccctcacccagcgcctcccttcgccgccgcccggcggccgactgccggaggggagggggcgtggccagagagcggaagtgcccggaacccggaagtgcgagctggcgcgcagctgcagtctgggagtctttggagtaagaatggccttggaagggatgagcaaacggaagagaaagagaagtgtccaggagggagagaatcctgacgacggcgttcgcgggagtccgccggaagactacaggcttggacaggtcgccagtagcttatttcgcggcgaacaccattccagaggtggcaccggtcggctggcgtccctcttcagttctctggagccccagattcaacccgtgtacgtgcctgtgcctaaacaaaccatcaaaaaaacgaaacggaatgaggaggaagaaagtacatcccagattgaaagaccactttcgcaagaacctgccaaaaaagtgaaagcgaagaagaaacacactaacgcagaaaaaaagttggcagacagggaaagcgctctagcgagtgctgatttagaagaagaaattcaccagaaacaagggcagaaaaggaaaaattctcaacctggtgttaaagtagcagatagaaaaatacttgatgacacagaagacacagttgtcagtcaaagaaagaaaattcaaatcaaccaagaagaagagagattaaagaatgagagaactgtgtttgttgggaatttgcctgttacatgtaataagaagaagctgaagtcgttttttaaagagtatggacaaatagaatctgtacgatttcgttctctgattccagcagagggaacgctatccaaaaagttggcagcaataaaacgtaaaattcatcctgatcagaaaaatattaatgcctatgttgtgtttaaggaggagagtgctgccacgcaagcattgaaaagaaatggggcccagattgcagatggatttcgtattagagttgatctcgcatctgagacctcatctagagacaagagatcggtttttgtggggaatctcccttataaagttgaagaatctgccattgagaagcactttctggactgtggaagtatcatggccgtgaggattgtgagagacaaaatgacaggcatcggcaaagggtttggctatgtgctctttgagaatacagattctgttcatcttgctctgaaattaaataattctgaactcatggggagaaaactcagagtcatgcgttctgttaataaagaaaaatttaaacaacaaaattcaaatccacgattgaagaatgtcagtaaacctaagcagggacttaattttacttccaaaactgcagaaggacatcctaaaagcttatttattggagaaaaagctgttctccttaaaacgaagaagaaaggacagaagaaaagtggacgccctaagaaacagagaaaacagaaataacaaccaggaactgctttttcttttcctgctgagtactgctaataaaagtgctattatctgctgat

SEQ ID NO: 441369 - DNA, 6189 bp, Homo sapiens
agcgatgtttgcccgtcagtcgagtccggagtgaggagctcggtcgccgaagcggagggagactcttgagcttcatcttgccgccgccacggccaccgcctggacctttgcccggagggagctgcagagggtccatcgccgccgtcctctggagggcagcgcgattgggggcccggacctccagtccgggggggatttttcgtcgtccccctccccccaaccagggagcccgagcggccgccaaacaaaggtaccagtcgccgccgcgggaggaggaggagccggagcctctgcctcagcagccgctggacccgccgcccttcttccccatctctcccccgggcctgctggttttgggggggagaaggagagaggggactctggacgtgccagggtcagatctcgcctccgaggaaggtgcagctgaacctggtgttttagaggataccttggtcccagagtcatcatgaaggcccttgatgagcctccctatttgacagtgggcactgatgtgagtgctaaatacagaggagccttttgtgaagccaagatcaagacagcaaaaagacttgtcaaagtcaaggtgacatttagacatgattcttcaacagtggaagttcaggatgaccacataaagggcccactaaaggtaggagctattgtggaagtgaagaatcttgatggtgcatatcaggaagctgttatcaataaactaacagatgcgagttggtacactgtagtttttgatgacggagatgagaagacactgagacgatcttcactgtgcctgaaaggagagaggcattttgctgaaagtgaaacattagaccagctcccactcaccaaccctgagcattttggcactccagtcataggaaagaaaacaaatagaggaagaagatctaatcatataccagaggaagagtcttcatcatcctccagtgatgaagatgaggatgataggaaacagattgatgagctactaggcaaagttgtatgtgtagattacattagtttggataaaaagaaagcactgtggtttcctgcattggtggtttgtcctgattgtagtgatgagattgctgtaaaaaaggacaatattcttgttcgatctttcaaagatggaaaatttacttcagttccaagaaaagatgtccatgaaattactagtgacactgcaccaaagcctgatgctgttttaaagcaagcctttgaacaggcacttgaatttcacaaaagtagaactattcctgctaactggaagactgaattgaaagaagatagctctagcagtgaagcagaggaagaagaggaggaggaagatgatgaaaaagaaaaggaggataatagcagtgaagaagaagaagaaatagaaccatttccagaagaaagggagaactttcttcagcaattgtacaaatttatggaagatagaggtacacctattaacaaacgacctgtacttggatatcgaaatttgaatctctttaagttattcagacttgtacacaaacttggaggatttgataatattgaaagtggagctgtttggaaacaagtctaccaagatcttggaatccctgtcttaaattcagctgcaggatacaatgttaaatgtgcttataaaaaatacttatatggttttgaggagtactgtagatcagccaacattgaatttcagatggcattgccagagaaagttgttaacaagcaatgtaaggagtgtgaaaatgtaaaagaaataaaagttaaggaggaaaatgaaacagagatcaaagaaataaagatggaggaggagaggaatataataccaagagaagaaaagcctattgaggatgaaattgaaagaaaagaaaatattaagccctctctgggaagtaaaaagaatttattagaatctatacctacacattctgatcaggaaaaagaagttaacattaaaaaaccagaagacaatgaaaatctggatgacaaagatgatgacacaactagggtagatgaatccctcaacataaaggtagaagctgaggaagaaaaagcaaaatctggagatgaaacgaataaagaagaagatgaagatgatgaagaagcagaagaggaggaggaggaggaagaagaagaagaggatgaagatgatgatgacaacaatgaggaagaggagtttgagtgctatccaccaggcatgaaagtccaagtgcggtatggacgagggaaaaatcaaaaaatgtatgaagctagtattaaagattctgatgtcgaaggtggagaggtcctttacttggtgcattactgcggatggaatgtgagatacgatgaatggattaaagcagataaaatagtaagacctgctgataaaaatgtgccaaagataaaacatcggaagaaaataaagaataaattagacaaagaaaaagacaaagatgaaaaatactctccaaaaaactgtaaacttcggcgcttgtccaaaccaccatttcagacaaatccatctcctgaaatggtatccaaactggatctcactgatgccaaaaactctgatactgctcatattaagtccatagaaattacttcgatccttaatggacttcaagcttctgaaagttctgctgaagacagtgagcaggaagatgagagaggtgctcaagacatggataataatggcaaagaggaatctaagattgatcatttgaccaacaacagaaatgatcttatttcaaaggaggaacagaacagttcatctttgctagaagaaaacaaagttcatgcagatttggtaatatccaaaccagtgtcaaaatctccagaaagattaaggaaagatatagaagtattatccgaagatactgattatgaagaagatgaagtcacaaaaaagagaaaggatgtcaagaaggacacaacagataaatcttcaaaaccacaaataaaacgtggtaaaagaaggtattgcaatacagaagagtgtctaaaaactggatcacctggcaaaaaggaagagaaggccaagaacaaagaatcactttgcatggaaaacagtagcaacagctcttcagatgaagatgaagaagaaacaaaagcaaagatgacaccaactaagaaatacaatggtttggaggaaaaaagaaaatctctacggacaactggtttctattcaggattttcagaagtggcagaaaaaaggattaaacttttaaataactctgatgaaagacttcaaaacagcagggccaaagatcgaaaagatgtctggtcaagtattcagggacagtggcctaaaaaaacgctgaaagagcttttttcagactctgatactgaggctgcagcttccccaccgcatcctgccccagaggagggggtggcagaggagtcactgcagactgtggctgaagaggagagttgttcacccagtgtagaactagaaaaaccacctccagtcaatgtcgatagtaaacccattgaagaaaaaacagtagaggtcaatgacagaaaagcagaatttccaagtagtggcagtaattcagtgctaaatacccctcctactacacctgaatcgccttcatcagtcactgtaacagaaggcagccggcagcagtcttctgtaacagtatcagaaccactggctccaaaccaagaagaggttcgaagtatcaagagtgaaactgatagcacaattgaggtggatagtgttgctggggagctccaagacctccagtctgaagggaatagctcgccagcaggttttgatgccagtgtgagctcaagcagtagtaatcagccagaaccagaacatcctgaaaaagcctgtacaggtcagaaaagagtgaaagatgctcagggaggaggaagttcatcaaaaaagcagaaaagaagccataaagcaacagtggtaaacaacaaaaagaagggaaaaggcacaaatagtagtgatagtgaagaactttcagctggtgaaagtataactaagagtcagccagtcaaatcagtttccactggaatgaagtctcatagtaccaaatctcccgcaaggacgcagtctccaggaaaatgtggaaagaatggtgataaggatcctgatctcaaggaacccagtaatcgattacccaaagtttacaaatggagttttcagatgtcggacctggaaaatatgacaagtgccgaacgcatcacaattcttcaagaaaaacttcaagaaatcagaaaacattatctgtcattaaaatctgaagtagcttccattgatcggaggagaaagcgtttaaagaagaaagagagagaaagtgctgctacatcctcatcctcctcttcaccttcatccagttccataacagctgctgttatgttaactttagctgaaccgtcaatgtccagcgcatcacaaaatggaatgcttcaaccactcccagaagacgtccttcactcccaaaatgaggcttttctgaaacggcgaggaccaccaaccgacggcgacaaacctgctccctcacccagcgcctcccttcgccgccgcccggcggccgactgccggaggggagggggcgtggccagagagcggaagtgcccggaacccggaagtgcgagctggcgcgcagctgcagtctgggagtctttggagtaagaatggccttggaagggatgagcaaacggaagagaaagagaagtgtccaggagggagagaatcctgacgacggcgttcgcgggagtccgccggaagactacaggcttggacaggtcgccagtagcttatttcgcggcgaacaccattccagaggtggcaccggtcggctggcgtccctcttcagttctctggagccccagattcaacccgtgtacgtgcctgtgcctaaaggaaagcgctctagcgagtgctgatttagaagaagaaattcaccagaaacaagggcagaaaaggaaaaattctcaacctggtgttaaagtagcagatagaaaaatacttgatgacacagaagacacagttgtcagtcaaagaaagaaaattcaaatcaaccaagaagaagagagattaaagaatgagagaactgtgtttgttgggaatttgcctgttacatgtaataagaagaagctgaagtcgttttttaaagagtatggacaaatagaatctgtacgatttcgttctctgattccagcagagggaacgctatccaaaaagttggcagcaataaaacgtaaaattcatcctgatcagaaaaatattaatgcctatgttgtgtttaaggaggagagtgctgccacgcaagcattgaaaagaaatggggcccagattgcagatggatttcgtattagagttgatctcgcatctgagacctcatctagagacaagagatcggtttttgtggggaatctcccttataaagttgaagaatctgccattgagaagcactttctggactgtggaagtatcatggccgtgaggattgtgagagacaaaatgacaggcatcggcaaagggtttggctatgtgctctttgagaatacagattctgttcatcttgctctgaaattaaataattctgaactcatggggagaaaactcagagtcatgcgttctgttaataaagaaaaatttaaacaacaaaattcaaatccacgattgaagaatgtcagtaaacctaagcagggacttaattttacttccaaaactgcagaaggacatcctaaaagcttatttattggagaaaaagctgttctccttaaaacgaagaagaaaggacagaagaaaagtggacgccctaagaaacagagaaaacagaaataacaaccaggaactgctttttcttttcctgctgagtactgctaataaaagtgctattatctgctgataaaaagctaaaaaagaaaaacattgtgtggcgggcgcgcgccaccaaggagagtttaaacacaactggggtggggcggcgcccaaggatatgacacaggggacacgtgccccctgacacgctgccagccaagggtgggtctcccaaaaaaagccggggcacgacggtagaacaccagagagtggggactggcaagccgcgaaacagcgtgcactcgctgcctctctaccgacactgactcgacacgccatacaagagcagaggcagcatccgaagacgagcacgactagtgaaagacgcgctagagacacactggatacttgatagtcgtcgacgcgaggggagggggggg

SEQ ID NO: 441370 - DNA, 5306 bp, Homo sapiens
agcgatgtttgcccgtcagtcgagtccggagtgaggagctcggtcgccgaagcggagggagactcttgagcttcatcttgccgccgccacggccaccgcctggacctttgcccggagggagctgcagagggtccatcgccgccgtcctctggagggcagcgcgattgggggcccggacctccagtccgggggggatttttcgtcgtccccctccccccaaccagggagcccgagcggccgccaaacaaaggtaccagtcgccgccgcgggaggaggaggagccggagcctctgcctcagcagccgctggacccgccgcccttcttccccatctctcccccgggcctgctggttttgggggggagaaggagagaggggactctggacgtgccagggtcagatctcgcctccgaggaaggtgcagctgaacctggtgttttagaggataccttggtcccagagtcatcatgaaggcccttgatgagcctccctatttgacagtgggcactgatgtgagtgctaaatacagaggagccttttgtgaagccaagatcaagacagcaaaaagacttgtcaaagtcaaggtgacatttagacatgattcttcaacagtggaagttcaggatgaccacataaagggcccactaaaggtaggagctattgtggaagtgaagaatcttgatggtgcatatcaggaagctgttatcaataaactaacagatgcgagttggtacactgtagtttttgatgacggagatgagaagacactgagacgatcttcactgtgcctgaaaggagagaggcattttgctgaaagtgaaacattagaccagctcccactcaccaaccctgagcattttggcactccagtcataggaaagaaaacaaatagaggaagaagatctaatcatataccagaggaagagtcttcatcatcctccagtgatgaagatgaggatgataggaaacagattgatgagctactaggcaaagttgtatgtgtagattacattagtttggataaaaagaaagcactgtggtttcctgcattggtggtttgtcctgattgtagtgatgagattgctgtaaaaaaggacaatattcttgttcgatctttcaaagatggaaaatttacttcagttccaagaaaagatgtccatgaaattactagtgacactgcaccaaagcctgatgctgttttaaagcaagcctttgaacaggcacttgaatttcacaaaagtagaactattcctgctaactggaagactgaattgaaagaagatagctctagcagtgaagcagaggaagaagaggaggaggaagatgatgaaaaagaaaaggaggataatagcagtgaagaagaagaagaaatagaaccatttccagaagaaagggagaactttcttcagcaattgtacaaatttatggaagatagaggtacacctattaacaaacgacctgtacttggatatcgaaatttgaatctctttaagttattcagacttgtacacaaacttggaggatttgataatattgaaagtggagctgtttggaaacaagtctaccaagatcttggaatccctgtcttaaattcagctgcaggatacaatgttaaatgtgcttataaaaaatacttatatggttttgaggagtactgtagatcagccaacattgaatttcagatggcattgccagagaaagttgttaacaagcaatgtaaggagtgtgaaaatgtaaaagaaataaaagttaaggaggaaaatgaaacagagatcaaagaaataaagatggaggaggagaggaatataataccaagagaagaaaagcctattgaggatgaaattgaaagaaaagaaaatattaagccctctctgggaagtaaaaagaatttattagaatctatacctacacattctgatcaggaaaaagaagttaacattaaaaaaccagaagacaatgaaaatctggatgacaaagatgatgacacaactagggtagatgaatccctcaacataaaggtagaagctgaggaagaaaaagcaaaatctggagatgaaacgaataaagaagaagatgaagatgatgaagaagcagaagaggaggaggaggaggaagaagaagaagaggatgaagatgatgatgacaacaatgaggaagaggagtttgagtgctatccaccaggcatgaaagtccaagtgcggtatggacgagggaaaaatcaaaaaatgtatgaagctagtattaaagattctgatgtcgaaggtggagaggtcctttacttggtgcattactgcggatggaatgtgagatacgatgaatggattaaagcagataaaatagtaagacctgctgataaaaatgtgccaaagataaaacatcggaagaaaataaagaataaattagacaaagaaaaagacaaagatgaaaaatactctccaaaaaactgtaaacttcggcgcttgtccaaaccaccatttcagacaaatccatctcctgaaatggtatccaaactggatctcactgatgccaaaaactctgatactgctcatattaagtccatagaaattacttcgatccttaatggacttcaagcttctgaaagttctgctgaagacagtgagcaggaagatgagagaggtgctcaagacatggataataatggcaaagaggaatctaagattgatcatttgaccaacaacagaaatgatcttatttcaaaggaggaacagaacagttcatctttgctagaagaaaacaaagttcatgcagatttggtaatatccaaaccagtgtcaaaatctccagaaagattaaggaaagatatagaagtattatccgaagatactgattatgaagaagatgaagtcacaaaaaagagaaaggatgtcaagaaggacacaacagataaatcttcaaaaccacaaataaaacgtggtaaaagaaggtattgcaatacagaagagtgtctaaaaactggatcacctggcaaaaaggaagagaaggccaagaacaaagaatcactttgcatggaaaacagtagcaacagctcttcagatgaagatgaagaagaaacaaaagcaaagatgacaccaactaagaaatacaatggtttggaggaaaaaagaaaatctctacggacaactggtttctattcaggattttcagaagtggcagaaaaaaggattaaacttttaaataactctgatgaaagacttcaaaacagcagggccaaagatcgaaaagatgtctggtcaagtattcagggacagtggcctaaaaaaacgctgaaagagcttttttcagactctgatactgaggctgcagcttccccaccgcatcctgccccagaggagggggtggcagaggagtcactgcagactgtggctgaagaggagagttgttcacccagtgtagaactagaaaaaccacctccagtcaatgtcgatagtaaacccattgaagaaaaaacagtagaggtcaatgacagaaaagcagaatttccaagtagtggcagtaattcagtgctaaatacccctcctactacacctgaatcgccttcatcagtcactgtaacagaaggcagccggcagcagtcttctgtaacagtatcagaaccactggctccaaaccaagaagaggttcgaagtatcaagagtgaaactgatagcacaattgaggtggatagtgttgctggggagctccaagacctccagtctgaagggaatagctcgccagcaggttttgatgccagtgtgagctcaagcagtagtaatcagccagaaccagaacatcctgaaaaagcctgtacaggtcagaaaagagtgaaagatgctcagggaggaggaagttcatcaaaaaagcagaaaagaagccataaagcaacagtggtaaacaacaaaaagaagggaaaaggcacaaatagtagtgatagtgaagaactttcagctggtgaaagtataactaagagtcagccagtcaaatcagtttccactggaatgaagtctcatagtaccaaatctcccgcaaggacgcagtctccaggaaaatgtggaaagaatggtgataaggatcctgatctcaaggaacccagtaatcgattacccaaagtttacaaatggagttttcagatgtcggacctggaaaatatgacaagtgccgaacgcatcacaattcttcaagaaaaacttcaagaaatcagaaaacattatctgtcattaaaatctgaagtagcttccattgatcggaggagaaagcgtttaaagaagaaagagagagaaagtgctgctacatcctcatcctcctcttcaccttcatccagttccataacagctgctgttatgttaactttagctgaaccgtcaatgtccagcgcatcacaaaatggaatgcttcaaccactcccagaagacgtccttcactcccaaaatgaggcttttctgaaacggcgaggaccaccaaccgacggcgacaaacctgctccctcacccagcgcctcccttcgccgccgcccggcggccgactgccggaggggagggggcgtggccagagagcggaagtgcccggaacccggaagtgcgagctggcgcgcagctgcagtctgggagtctttggagtaagaatggccttggaagggatgagcaaacggaagagaaagagaagtgtccaggagggagagaatcctgacgacggcgttcgcgggagtccgccggaagactacaggcttggacaggtcgccagtagcttatttcgcggcgaacaccattccagaggtggcaccggtcggctggcgtccctcttcagttctctggagccccagattcaacccgtgtacgtgcctgtgcctaaacaaaccatcaaaaaaacgaaacggaatgaggaggaagaaagtacatcccagattgaaagaccactttcgcaagaacctgccaaaaaagtgaaagcgaagaagaaacacactaacgcagaaaaaaagttggcagacagggaaagcgctctagcgagtgctgatttagaagaagaaattcaccagaaacaagggcagaaaaggaaaaattctcaacctggtgttaaagtagcagatagaaaaatacttgatgacacagaagacacagttgtcagtcaaagaaagaaaattcaaatcaaccaagaagaagagagattaaagaatgagagaactgtgtttgttgggaatttgcctgttacatgtaataagaagaagctgaagtcgttttttaaagagtatggacaaatagaatctgtacgatttcgttctctgattccagtgtggagagaggggtaccgagctcg

SEQ ID NO: 441371 - DNA, 6266 bp, Homo sapiens
agcgatgtttgcccgtcagtcgagtccggagtgaggagctcggtcgccgaagcggagggagactcttgagcttcatcttgccgccgccacggccaccgcctggacctttgcccggagggagctgcagagggtccatcgccgccgtcctctggagggcagcgcgattgggggcccggacctccagtccgggggggatttttcgtcgtccccctccccccaaccagggagcccgagcggccgccaaacaaaggtaccagtcgccgccgcgggaggaggaggagccggagcctctgcctcagcagccgctggacccgccgcccttcttccccatctctcccccgggcctgctggttttgggggggagaaggagagaggggactctggacgtgccagggtcagatctcgcctccgaggaaggtgcagctgaacctggtgttttagaggataccttggtcccagagtcatcatgaaggcccttgatgagcctccctatttgacagtgggcactgatgtgagtgctaaatacagaggagccttttgtgaagccaagatcaagacagcaaaaagacttgtcaaagtcaaggtgacatttagacatgattcttcaacagtggaagttcaggatgaccacataaagggcccactaaaggtaggagctattgtggaagtgaagaatcttgatggtgcatatcaggaagctgttatcaataaactaacagatgcgagttggtacactgtagtttttgatgacggagatgagaagacactgagacgatcttcactgtgcctgaaaggagagaggcattttgctgaaagtgaaacattagaccagctcccactcaccaaccctgagcattttggcactccagtcataggaaagaaaacaaatagaggaagaagatctaatcatataccagaggaagagtcttcatcatcctccagtgatgaagatgaggatgataggaaacagattgatgagctactaggcaaagttgtatgtgtagattacattagtttggataaaaagaaagcactgtggtttcctgcattggtggtttgtcctgattgtagtgatgagattgctgtaaaaaaggacaatattcttgttcgatctttcaaagatggaaaatttacttcagttccaagaaaagatgtccatgaaattactagtgacactgcaccaaagcctgatgctgttttaaagcaagcctttgaacaggcacttgaatttcacaaaagtagaactattcctgctaactggaagactgaattgaaagaagatagctctagcagtgaagcagaggaagaagaggaggaggaagatgatgaaaaagaaaaggaggataatagcagtgaagaagaagaagaaatagaaccatttccagaagaaagggagaactttcttcagcaattgtacaaatttatggaagatagaggtacacctattaacaaacgacctgtacttggatatcgaaatttgaatctctttaagttattcagacttgtacacaaacttggaggatttgataatattgaaagtggagctgtttggaaacaagtctaccaagatcttggaatccctgtcttaaattcagctgcaggatacaatgttaaatgtgcttataaaaaatacttatatggttttgaggagtactgtagatcagccaacattgaatttcagatggcattgccagagaaagttgttaacaagcaatgtaaggagtgtgaaaatgtaaaagaaataaaagttaaggaggaaaatgaaacagagatcaaagaaataaagatggaggaggagaggaatataataccaagagaagaaaagcctattgaggatgaaattgaaagaaaagaaaatattaagccctctctgggaagtaaaaagaatttattagaatctatacctacacattctgatcaggaaaaagaagttaacattaaaaaaccagaagacaatgaaaatctggatgacaaagatgatgacacaactagggtagatgaatccctcaacataaaggtagaagctgaggaagaaaaagcaaaatctggagatgaaacgaataaagaagaagatgaagatgatgaagaagcagaagaggaggaggaggaggaagaagaagaagaggatgaagatgatgatgacaacaatgaggaagaggagtttgagtgctatccaccaggcatgaaagtccaagtgcggtatggacgagggaaaaatcaaaaaatgtatgaagctagtattaaagattctgatgtcgaaggtggagaggtcctttacttggtgcattactgcggatggaatgtgagatacgatgaatggattaaagcagataaaatagtaagacctgctgataaaaatgtgccaaagataaaacatcggaagaaaataaagaataaattagacaaagaaaaagacaaagatgaaaaatactctccaaaaaactgtaaacttcggcgcttgtccaaaccaccatttcagacaaatccatctcctgaaatggtatccaaactggatctcactgatgccaaaaactctgatactgctcatattaagtccatagaaattacttcgatccttaatggacttcaagcttctgaaagttctgctgaagacagtgagcaggaagatgagagaggtgctcaagacatggataataatggcaaagaggaatctaagattgatcatttgaccaacaacagaaatgatcttatttcaaaggaggaacagaacagttcatctttgctagaagaaaacaaagttcatgcagatttggtaatatccaaaccagtgtcaaaatctccagaaagattaaggaaagatatagaagtattatccgaagatactgattatgaagaagatgaagtcacaaaaaagagaaaggatgtcaagaaggacacaacagataaatcttcaaaaccacaaataaaacgtggtaaaagaaggtattgcaatacagaagagtgtctaaaaactggatcacctggcaaaaaggaagagaaggccaagaacaaagaatcactttgcatggaaaacagtagcaacagctcttcagatgaagatgaagaagaaacaaaagcaaagatgacaccaactaagaaatacaatggtttggaggaaaaaagaaaatctctacggacaactggtttctattcaggattttcagaagtggcagaaaaaaggattaaacttttaaataactctgatgaaagacttcaaaacagcagggccaaagatcgaaaagatgtctggtcaagtattcagggacagtggcctaaaaaaacgctgaaagagcttttttcagactctgatactgaggctgcagcttccccaccgcatcctgccccagaggagggggtggcagaggagtcactgcagactgtggctgaagaggagagttgttcacccagtgtagaactagaaaaaccacctccagtcaatgtcgatagtaaacccattgaagaaaaaacagtagaggtcaatgacagaaaagcagaatttccaagtagtggcagtaattcagtgctaaatacccctcctactacacctgaatcgccttcatcagtcactgtaacagaaggcagccggcagcagtcttctgtaacagtatcagaaccactggctccaaaccaagaagaggttcgaagtatcaagagtgaaactgatagcacaattgaggtggatagtgttgctggggagctccaagacctccagtctgaagggaatagctcgccagcaggttttgatgccagtgtgagctcaagcagtagtaatcagccagaaccagaacatcctgaaaaagcctgtacaggtcagaaaagagtgaaagatgctcagggaggaggaagttcatcaaaaaagcagaaaagaagccataaagcaacagtggtaaacaacaaaaagaagggaaaaggcacaaatagtagtgatagtgaagaactttcagctggtgaaagtataactaagagtcagccagtcaaatcagtttccactggaatgaagtctcatagtaccaaatctcccgcaaggacgcagtctccaggaaaatgtggaaagaatggtgataaggatcctgatctcaaggaacccagtaatcgattacccaaagtttacaaatggagttttcagatgtcggacctggaaaatatgacaagtgccgaacgcatcacaattcttcaagaaaaacttcaagaaatcagaaaacattatctgtcattaaaatctgaagtagcttccattgatcggaggagaaagcgtttaaagaagaaagagagagaaagtgctgctacatcctcatcctcctcttcaccttcatccagttccataacagctgctgttatgttaactttagctgaaccgtcaatgtccagcgcatcacaaaatggaatgcttcaaccactcccagaagacgtccttcactcccaaaatgaggcttttctgaaacggcgaggaccaccaaccgacggcgacaaacctgctccctcacccagcgcctcccttcgccgccgcccggcggccgactgccggaggggagggggcgtggccagagagcggaagtgcccggaacccggaagtgcgagctggcgcgcagctgcagtctgggagtctttggagtaagaatggccttggaagggatgagcaaacggaagagaaagagaagtgtccaggagggagagaatcctgacgacggcgttcgcgggagtccgccggaagactacaggcttggacaggtcgccagtagcttatttcgcggcgaacaccattccagaggtggcaccggtcggctggcgtccctcttcagttctctggagccccagattcaacccgtgtacgtgcctgtgcctaaacaaaccatcaaaaaaacgaaacggaatgaggaggaagaaagtacatcccagattgaaagaccactttcgcaagaacctgccaaaaaagtgaaagcgaagaagaaacacactaacgcagaaaaaaagttggcagacagggaaagcgctctagcgagtgctgatttagaagaagaaattcaccagaaacaagggcagaaaaggaaaaattctcaacctggtgttaaagtagcagatagaaaaatacttgatgacacagaagacacagttgtcagtcaaagaaagaaaattcaaatcaaccaagaagaagagagattaaagaatgagagaactgtgtttgttgggaatttgcctgttacatgtaataagaagattccagcagagggaacgctatccaaaaagttggcagcaataaaacgtaaaattcatcctgatcagaaaaatattaatgcctatgttgtgtttaaggaggagagtgctgccacgcaagcattgaaaagaaatggggcccagattgcagatggatttcgtattagagttgatctcgcatctgagacctcatctagagacaagagatcggtttttgtggggaatctcccttataaagttgaagaatctgccattgagaagcactttctggactgtggaagtatcatggccgtgaggattgtgagagacaaaatgacaggcatcggcaaagggtttggctatgtgctctttgagaatacagattctgttcatcttgctctgaaattaaataattctgaactcatggggagaaaactcagagtcatgcgttctgttaataaagaaaaatttaaacaacaaaattcaaatccacgattgaagaatgtcagtaaacctaagcagggacttaattttacttccaaaactgcagaaggacatcctaaaagcttatttattggagaaaaagctgttctccttaaaacgaagaagaaaggacagaagaaaagtggacgccctaagaaacagagaaaacagaaataacaaccaggaactgctttttcttttcctgctgagtactgctaataaaagtgctattatctgctgataaaaagctaaaaaagaaaaacattgtgtggcgggcgcgcgccaccaaggagagtttaaacacaactggggtggggcggcgcccaaggatatgacacaggggacacgtgccccctgacacgctgccagccaagggtgggtctcccaaaaaaagccggggcacgacggtagaacaccagagagtggggactggcaagccgcgaaacagcgtgcactcgctgcctctctaccgacactgactcgacacgccatacaagagcagaggcagcatccgaagacgagcacgactagtgaaagacgcgctagagacacactggatacttgatagtcgtcgacgcgaggggagggggggg

SEQ ID NO: 441372 - DNA, 5347 bp, Homo sapiens
agcgatgtttgcccgtcagtcgagtccggagtgaggagctcggtcgccgaagcggagggagactcttgagcttcatcttgccgccgccacggccaccgcctggacctttgcccggagggagctgcagagggtccatcgccgccgtcctctggagggcagcgcgattgggggcccggacctccagtccgggggggatttttcgtcgtccccctccccccaaccagggagcccgagcggccgccaaacaaaggtaccagtcgccgccgcgggaggaggaggagccggagcctctgcctcagcagccgctggacccgccgcccttcttccccatctctcccccgggcctgctggttttgggggggagaaggagagaggggactctggacgtgccagggtcagatctcgcctccgaggaaggtgcagctgaacctggtgttttagaggataccttggtcccagagtcatcatgaaggcccttgatgagcctccctatttgacagtgggcactgatgtgagtgctaaatacagaggagccttttgtgaagccaagatcaagacagcaaaaagacttgtcaaagtcaaggtgacatttagacatgattcttcaacagtggaagttcaggatgaccacataaagggcccactaaaggtaggagctattgtggaagtgaagaatcttgatggtgcatatcaggaagctgttatcaataaactaacagatgcgagttggtacactgtagtttttgatgacggagatgagaagacactgagacgatcttcactgtgcctgaaaggagagaggcattttgctgaaagtgaaacattagaccagctcccactcaccaaccctgagcattttggcactccagtcataggaaagaaaacaaatagaggaagaagatctaatcatataccagaggaagagtcttcatcatcctccagtgatgaagatgaggatgataggaaacagattgatgagctactaggcaaagttgtatgtgtagattacattagtttggataaaaagaaagcactgtggtttcctgcattggtggtttgtcctgattgtagtgatgagattgctgtaaaaaaggacaatattcttgttcgatctttcaaagatggaaaatttacttcagttccaagaaaagatgtccatgaaattactagtgacactgcaccaaagcctgatgctgttttaaagcaagcctttgaacaggcacttgaatttcacaaaagtagaactattcctgctaactggaagactgaattgaaagaagatagctctagcagtgaagcagaggaagaagaggaggaggaagatgatgaaaaagaaaaggaggataatagcagtgaagaagaagaagaaatagaaccatttccagaagaaagggagaactttcttcagcaattgtacaaatttatggaagatagaggtacacctattaacaaacgacctgtacttggatatcgaaatttgaatctctttaagttattcagacttgtacacaaacttggaggatttgataatattgaaagtggagctgtttggaaacaagtctaccaagatcttggaatccctgtcttaaattcagctgcaggatacaatgttaaatgtgcttataaaaaatacttatatggttttgaggagtactgtagatcagccaacattgaatttcagatggcattgccagagaaagttgttaacaagcaatgtaaggagtgtgaaaatgtaaaagaaataaaagttaaggaggaaaatgaaacagagatcaaagaaataaagatggaggaggagaggaatataataccaagagaagaaaagcctattgaggatgaaattgaaagaaaagaaaatattaagccctctctgggaagtaaaaagaatttattagaatctatacctacacattctgatcaggaaaaagaagttaacattaaaaaaccagaagacaatgaaaatctggatgacaaagatgatgacacaactagggtagatgaatccctcaacataaaggtagaagctgaggaagaaaaagcaaaatctggagatgaaacgaataaagaagaagatgaagatgatgaagaagcagaagaggaggaggaggaggaagaagaagaagaggatgaagatgatgatgacaacaatgaggaagaggagtttgagtgctatccaccaggcatgaaagtccaagtgcggtatggacgagggaaaaatcaaaaaatgtatgaagctagtattaaagattctgatgtcgaaggtggagaggtcctttacttggtgcattactgcggatggaatgtgagatacgatgaatggattaaagcagataaaatagtaagacctgctgataaaaatgtgccaaagataaaacatcggaagaaaataaagaataaattagacaaagaaaaagacaaagatgaaaaatactctccaaaaaactgtaaacttcggcgcttgtccaaaccaccatttcagacaaatccatctcctgaaatggtatccaaactggatctcactgatgccaaaaactctgatactgctcatattaagtccatagaaattacttcgatccttaatggacttcaagcttctgaaagttctgctgaagacagtgagcaggaagatgagagaggtgctcaagacatggataataatggcaaagaggaatctaagattgatcatttgaccaacaacagaaatgatcttatttcaaaggaggaacagaacagttcatctttgctagaagaaaacaaagttcatgcagatttggtaatatccaaaccagtgtcaaaatctccagaaagattaaggaaagatatagaagtattatccgaagatactgattatgaagaagatgaagtcacaaaaaagagaaaggatgtcaagaaggacacaacagataaatcttcaaaaccacaaataaaacgtggtaaaagaaggtattgcaatacagaagagtgtctaaaaactggatcacctggcaaaaaggaagagaaggccaagaacaaagaatcactttgcatggaaaacagtagcaacagctcttcagatgaagatgaagaagaaacaaaagcaaagatgacaccaactaagaaatacaatggtttggaggaaaaaagaaaatctctacggacaactggtttctattcaggattttcagaagtggcagaaaaaaggattaaacttttaaataactctgatgaaagacttcaaaacagcagggccaaagatcgaaaagatgtctggtcaagtattcagggacagtggcctaaaaaaacgctgaaagagcttttttcagactctgatactgaggctgcagcttccccaccgcatcctgccccagaggagggggtggcagaggagtcactgcagactgtggctgaagaggagagttgttcacccagtgtagaactagaaaaaccacctccagtcaatgtcgatagtaaacccattgaagaaaaaacagtagaggtcaatgacagaaaagcagaatttccaagtagtggcagtaattcagtgctaaatacccctcctactacacctgaatcgccttcatcagtcactgtaacagaaggcagccggcagcagtcttctgtaacagtatcagaaccactggctccaaaccaagaagaggttcgaagtatcaagagtgaaactgatagcacaattgaggtggatagtgttgctggggagctccaagacctccagtctgaagggaatagctcgccagcaggttttgatgccagtgtgagctcaagcagtagtaatcagccagaaccagaacatcctgaaaaagcctgtacaggtcagaaaagagtgaaagatgctcagggaggaggaagttcatcaaaaaagcagaaaagaagccataaagcaacagtggtaaacaacaaaaagaagggaaaaggcacaaatagtagtgatagtgaagaactttcagctggtgaaagtataactaagagtcagccagtcaaatcagtttccactggaatgaagtctcatagtaccaaatctcccgcaaggacgcagtctccaggaaaatgtggaaagaatggtgataaggatcctgatctcaaggaacccagtaatcgattacccaaagtttacaaatggagttttcagatgtcggacctggaaaatatgacaagtgccgaacgcatcacaattcttcaagaaaaacttcaagaaatcagaaaacattatctgtcattaaaatctgaagtagcttccattgatcggaggagaaagcgtttaaagaagaaagagagagaaagtgctgctacatcctcatcctcctcttcaccttcatccagttccataacagctgctgttatgttaactttagctgaaccgtcaatgtccagcgcatcacaaaatggaatgcttcaaccactcccagaagacgtccttcactcccaaaatgaggcttttctgaaacggcgaggaccaccaaccgacggcgacaaacctgctccctcacccagcgcctcccttcgccgccgcccggcggccgactgccggaggggagggggcgtggccagagagcggaagtgcccggaacccggaagtgcgagctggcgcgcagctgcagtctgggagtctttggagtaagaatggccttggaagggatgagcaaacggaagagaaagagaagtgtccaggagggagagaatcctgacgacggcgttcgcgggagtccgccggaagactacaggcttggacaggtcgccagtagcttatttcgcggcgaacaccattccagaggtggcaccggtcggctggcgtccctcttcagttctctggagccccagattcaacccgtgtacgtgcctgtgcctaaacaaaccatcaaaaaaacgaaacggaatgaggaggaagaaagtacatcccagattgaaagaccactttcgcaagaacctgccaaaaaagtgaaagcgaagaagaaacacactaacgcagaaaaaaagttggcagacaggttggtaaaattctcttatttgatgttaaagaaattagatggtaaattaacattcctatacttggaatattcgtcagttttatttcatatttctactttctttcaaaacttttattatggaaaatccagtacatatagaaaagttgaaaaggctaagaaaccccgtgtactcagcatcagcaattactaatatttggctaacctttttgtatttttaccccactcatataccccctcattatttgtttttgtttgttttgagatggagtcttgatgccacgcccaggctgcagtagagtgcagtgatctcagctcactgcaacctccgcttcccaggttcaagcgattctcctgcctcggccctg

SEQ ID NO: 441373 - DNA, 2780 bp, Homo sapiens
tgttacatattcattgtagaggtttctacaattaatcattttaaaagatgatatattttatgtattaacataatagagtaaaaagccattcagatgattactgtatatttgacagtctaccaagcataatgatagattagtgtgagtgattttaaaagtatacatattattggcagttcaggtaagaagaattttttgtttttgcttttcctaagatgctgctgcatttgtatatgattttccaggtttctaggcaggttgttttctgtaggactaaattcaaatggctaattttaaattacctactaaaatctgtgacaaatttattgttacatttttgtttattaaatcttttctttctctttcagcaaatagtagtgatagtgaagaactttcagctggtgaaagtataactaagagtcagccagtcaaatcagtttccactggaatgaagtctcatagtaccaaatctcccgcaaggacgcagtctccaggaaaatgtggaaagaatggtgataaggatcctgatctcaaggaacccagtaatcgattacccaaagtttacaaatggagttttcagatgtcggacctggaaaatatgacaagtgccgaacgcatcacaattcttcaagaaaaacttcaagaaatcagaaaacattatctgtcattaaaatctgaagtagcttccattgatcggaggagaaagcgtttaaagaagaaagagagagaaagtgctgctacatcctcatcctcctcttcaccttcatccagttccataacagctgctgttatgttaactttagctgaaccgtcaatgtccagcgcatcacaaaatggaatgcttcaaccactcccagaagacgtccttcactcccaaaatgaggcttttctgaaacggcgaggaccaccaaccgacggcgacaaacctgctccctcacccagcgcctcccttcgccgccgcccggcggccgactgccggaggggagggggcgtggccagagagcggaagtgcccggaacccggaagtgcgagctggcgcgcagctgcagtctgggagtctttggagtaagaatggccttggaagggatgagcaaacggaagagaaagagaagtgtccaggagggagagaatcctgacgacggcgttcgcgggagtccgccggaagactacaggcttggacaggtcgccagtagcttatttcgcggcgaacaccattccagaggtggcaccggtcggctggcgtccctcttcagttctctggagccccagattcaacccgtgtacgtgcctgtgcctaaacaaaccatcaaaaaaacgaaacggaatgaggaggaagaaagtacatcccagattgaaagaccactttcgcaagaacctgccaaaaaagtgaaagcgaagaagaaacacactaacgcagaaaaaaagttggcagacagggaaagcgctctagcgagtgctgatttagaagaagaaattcaccagaaacaagggcagaaaaggaaaaattctcaacctggtgttaaagtagcagatagaaaaatacttgatgacacagaagacacagttgtcagtcaaagaaagaaaattcaaatcaaccaagaagaagagagattaaagaatgagagaactgtgtttgttgggaatttgcctgttacatgtaataagaagaagctgaagtcgttttttaaagagtatggacaaatagaatctgtacgatttcgttctctgattccagcagagggaacgctatccaaaaagttggcagcaataaaacgtaaaattcatcctgatcagaaaaatattaatgcctatgttgtgtttaaggaggagagtgctgccacgcaagcattgaaaagaaatggggcccagattgcagatggatttcgtattagagttgatctcgcatctgagacctcatctagagacaagagatcggtttttgtggggaatctcccttataaagttgaagaatctgccattgagaagcactttctggactgtggaagtatcatggccgtgaggattgtgagagacaaaatgacaggcatcggcaaagggtttggctatgtgctctttgagaatacagattctgttcatcttgctctgaaattaaataattctgaactcatggggagaaaactcagagtcatgcgttctgttaataaagaaaaatttaaacaacaaaattcaaatccacgattgaagaatgtcagtaaacctaagcagggacttaattttacttccaaaactgcagaaggacatcctaaaagcttatttattggagaaaaagctgttctccttaaaacgaagaagaaaggacagaagaaaagtggacgccctaagaaacagagaaaacagaaataacaaccaggaactgctttttcttttcctgctgagtactgctaataaaagtgctattatctgctgataaaaagctaaaaaagaaaaacattgtgtggcgggcgcgcgccaccaaggagagtttaaacacaactggggtggggcggcgcccaaggatatgacacaggggacacgtgccccctgacacgctgccagccaagggtgggtctcccaaaaaaagccggggcacgacggtagaacaccagagagtggggactggcaagccgcgaaacagcgtgcactcgctgcctctctaccgacactgactcgacacgccatacaagagcagaggcagcatccgaagacgagcacgactagtgaaagacgcgctagagacacactggatacttgatagtcgtcgacgcgaggggagggggggg

SEQ ID NO: 441374 - DNA, 2886 bp, Homo sapiens
  misc_feature (2885)..(2885): n is a, c, g, or t
agcgatgtttgcccgtcagtcgagtccggagtgaggagctcggtcgccgaagcggagggagactcttgagcttcatcttgccgccgccacggccaccgcctggacctttgcccggagggagctgcagagggtccatcgccgccgtcctctggagggcagcgcgattgggggcccggacctccagtccgggggggatttttcgtcgtccccctccccccaaccagggagcccgagcggccgccaaacaaaggtaccagtcgccgccgcgggaggaggaggagccggagcctctgcctcagcagccgctggacccgccgcccttcttccccatctctcccccgggcctgctggttttgggggggagaaggagagaggggactctggacgtgccagggtcagatctcgcctccgaggaaggtgcagctgaacctggtgttttagaggataccttggtcccagagtcatcatgaaggcccttgatgagcctccctatttgacagtgggcactgatgtgagtgctaaatacagaggagccttttgtgaagccaagatcaagacagcaaaaagacttgtcaaagtcaaggtgacatttagacatgattcttcaacagtggaagttcaggatgaccacataaagggcccactaaaggtaggagctattgtggaagtgaagaatcttgatggtgcatatcaggaagctgttatcaataaactaacagatgcgagttggtacactgtagtttttgatgacggagatgagaagacactgagacgatcttcactgtgcctgaaaggagagaggcattttgctgaaagtgaaacattagaccagctcccactcaccaaccctgagcattttggcactccagtcataggaaagaaaacaaatagaggaagaagatctaatcatataccagaggaagagtcttcatcatcctccagtgatgaagatgaggatgataggaaacagattgatgagctactaggcaaagttgtatgtgtagattacattagtttggataaaaagaaagcactgtggtttcctgcattggtggtttgtcctgattgtagtgatgagattgctgtaaaaaaggacaatattcttgttcgatctttcaaagatggaaaatttacttcagttccaagaaaagatgtccatgaaattactagtgacactgcaccaaagcctgatgctgttttaaagcaagcctttgaacaggcacttgaatttcacaaaagtagaactattcctgctaactggaagactgaattgaaagaagatagctctagcagtgaagcagaggaagaagaggaggaggaagatgatgaaaaagaaaaggaggataatagcagtgaagaagaagaagaaatagaaccatttccagaagaaagggagaactttcttcagcaattgtacaaatttatggaagatagaggtacacctattaacaaacgacctgtacttggatatcgaaatttgaatctctttaagttattcagacttgtacacaaacttggaggatttgataatattgaaagtggagctgtttggaaacaagtctaccaagatcttggaatccctgtcttaaattcagctgcaggatacaatgttaaatgtgcttataaaaaatacttatatggttttgaggagtactgtagatcagccaacattgaatttcagatggcattgccagagaaagttgttaacaagcaatgtaaggagtgtgaaaatgtaaaagaaataaaagttaaggaggaaaatgaaacagagatcaaagaaataaagatggaggaggagaggaatataataccaagagaagaaaagcctattgaggatgaaattgaaagaaaagaaaatattaagccctctctgggaagtaaaaagaatttattagaatctatacctacacattctgatcaggaaaaagaagttaacattaaaaaaccagaagacaatgaaaatctggatgacaaagatgatgacacaactagggtagatgaatccctcaacataaaggtagaagctgaggaagaaaaagcaaaatctggagatgaaacgaataaagaagaagatgaagatgatgaagaagcagaagaggaggaggaggaggaagaagaagaagaggatgaagatgatgatgacaacaatgaggaagaggagtttgagtgctatccaccaggcatgaaagtccaagtgcggtatggacgagggaaaaatcaaaaaatgtatgaagctagtattaaagattctgatgtcgaaggtggagaggtcctttacttggtgcattactgcggatggaatgtgagatacgatgaatggattaaagcagataaaatagtaagacctgctgataaaaatgtgccaaagataaaacatcggaagaaaataaagaataaattagacaaagaaaaagacaaagatgaaaaatactctccaaaaaactgtaaacttcggcgcttgtccaaaccaccatttcagacaaatccatctcctgaaatggtatccaaactggatctcactgatgccaaaaactctgatactgctcatattaagtccatagaaattacttcgatccttaatggacttcaagcttctgaaagttctgctgaagacagtgagcaggaagatgagagaggtgctcaagacatggataataatggcaaagaggaatctaagattgatcatttgaccaacaacagaaatgatcttatttcaaaggaggaacagaacagttcatctttgctagaagaaaacaaagttcatgcagatttggtaatatccaaaccagtgtcaaaatctccagaaagattaaggaaagatttatctgttgtgtccttcttgacatcctttctcttttttgtgacttcatcttcttcataatcang

SEQ ID NO: 441375 - DNA, 1734 bp, Homo sapiens
agcgatgtttgcccgtcagtcgagtccggagtgaggagctcggtcgccgaagcggagggagactcttgagcttcatcttgccgccgccacggccaccgcctggacctttgcccggagggagctgcagagggtccatcgccgccgtcctctggagggcagcgcgattgggggcccggacctccagtccgggggggatttttcgtcgtccccctccccccaaccagggagcccgagcggccgccaaacaaaggtaccagtcgccgccgcgggaggaggaggagccggagcctctgcctcagcagccgctggacccgccgcccttcttccccatctctcccccgggcctgctggttttgggggggagaaggagagaggggactctggacgtgccagggtcagatctcgcctccgaggaaggtgcagctgaacctggtgttttagaggataccttggtcccagagtcatcatgaaggcccttgatgagcctccctatttgacagtgggcactgatgtgagtgctaaatacagaggagccttttgtgaagccaagatcaagacagcaaaaagacttgtcaaagtcaaggtgacatttagacatgattcttcaacagtggaagttcaggatgaccacataaagggcccactaaaggtaggagctattgtggaagtgaagaatcttgatggtgcatatcaggaagctgttatcaataaactaacagatgcgagttggtacactgtagtttttgatgacggagatgagaagacactgagacgatcttcactgtgcctgaaaggagagaggcattttgctgaaagtgaaacattagaccagctcccactcaccaaccctgagcattttggcactccagtcataggaaagaaaacaaatagaggaagaagatctaatcatataccagaggaagagtcttcatcatcctccagtgatgaagatgaggatgataggaaacagattgatgagctactaggcaaagttgtatgtgtagattacattagtttggataaaaagaaagcactgtggtttcctgcattggtggtttgtcctgattgtagtgatgagattgctgtaaaaaaggacaatattcttgttcgatctttcaaagatggaaaatttacttcagttccaagaaaagatgtccatgaaattactagtgacactgcaccaaagcctgatgctgttttaaagcaagcctttgaacaggcacttgaatttcacaaaagtagaactattcctgctaactggaagactgaattgaaagaagatagctctagcagtgaagcagaggaagaagaggaggaggaagatgatgaaaaagaaaaggaggataatagcagtgaagaagaagaagaaatagaaccatttccagaagaaagggagaactttcttcagcaattgtacaaatttatggaagatagaggtacacctattaacaaacgacctgtacttggatatcgaaatttgaatctctttaagttattcagacttgtacacaaacttggaggatttgataatgtgagtgttgtagtcaaactgaaacatctttttcatgtaacatgttttctcaggtatctgccatctctgaaattgtttttctaaacaacaaaacaaagtttttcagtaaaaacctaagaagaagataaagtggaaagtacactacttgggaggctgaggcaggagaatcgcttgaacctgggaggcggaggttgcagtgagcc

SEQ ID NO: 441376 - DNA, 1581 bp, Homo sapiens
agcgatgtttgcccgtcagtcgagtccggagtgaggagctcggtcgccgaagcggagggagactcttgagcttcatcttgccgccgccacggccaccgcctggacctttgcccggagggagctgcagagggtccatcgccgccgtcctctggagggcagcgcgattgggggcccggacctccagtccgggggggatttttcgtcgtccccctccccccaaccagggagcccgagcggccgccaaacaaaggtaccagtcgccgccgcgggaggaggaggagccggagcctctgcctcagcagccgctggacccgccgcccttcttccccatctctcccccgggcctgctggttttgggggggagaaggagagaggggactctggacgtgccagggtcagatctcgcctccgaggaaggtgcagctgaacctggtgttttagaggataccttggtcccagagtcatcatgaaggcccttgatgagcctccctatttgacagtgggcactgatgtgagtgctaaatacagaggagccttttgtgaagccaagatcaagacagcaaaaagacttgtcaaagtcaaggtgacatttagacatgattcttcaacagtggaagttcaggatgaccacataaagggcccactaaaggtaggagctattgtggaagtgaagaatcttgatggtgcatatcaggaagctgttatcaataaactaacagatgcgagttggtacactgtagtttttgatgacggagatgagaagacactgagacgatcttcactgtgcctgaaaggagagaggcattttgctgaaagtgaaacattagaccagctcccactcaccaaccctgagcattttggcactccagtcataggaaagaaaacaaatagaggaagaagatctaatcatataccagaggaagagtcttcatcatcctccagtgatgaagatgaggatgataggaaacagattgatgagctactaggcaaagttgtatgtgtagattacattagtttggataaaaagaaagcactgtggtttcctgcattggtgagtagcttcagtatacaagagtttaatttcaaactttataagtttatgaagaaaacaattttcttactaatgtttttcataggtacaaaatgaggaaatgtttttagcattatttagttcacactaagcttactttcaacgttgtctttgaatacaaagaactcttgatgtcattcaggaaaggcaaaatcttgataatcttagaggtttagctatgtggaagttgaattctctctctctcggtagaaaattcatgatgcaaacttttaaagctcctaagtccatgtaggtctagattgcaaaagaacaacagaatctttcttggttgacagggataactagaccttttcctcatacttagtgaatcagggtgtttccatccttgatcttaatcttgccttttaggtactccctatataatcatgactgcaattatacattaccccactcttcaattttctctacagtagattgttaattctacctactttttaatgtttttctctccaaaagattgcaattcctta

SEQ ID NO: 441377 - DNA, 3329 bp, Homo sapiens
cgtgaagcatctacaaaggaggaatagtcaaagcagcagcggcggcggcggcggcggcagcagcagcagcagcaggagaccttctctgatggatgacctctgtgaagcaaatggcacttttgccatcagcttatttaaaatattgggggaagaggacaactcaagaaacgtattcttctctcccatgagcatctcctctgccctggccatggtcttcatgggggcaaagggaagcactgcagcccagatgtcccaggcactttgtttatacaaagacggagatattcaccgaggtttccagtcacttctcagtgaagttaacagaactggcactcagtacttgcttagaactgccaacagactctttggagaaaagacgtgtgatttccttccagactttaaagaatactgtcagaagttctatcaggcagagctggaggagttgtcctttgctgaagacactgaagagtgcaggaagcatataaatgactgggtggcagagaagactgaaggtaagatttcagaggtactggatgctgggacagtcgatcccctgacaaagctggtccttgtgaatgccatttatttcaagggaaagtggaatgagcaatttgacagaaagtacacaaggggaatgctctttaaaaccaacgaggaaaaaaagacagtgcagatgatgtttaaggaagctaagtttaaaatggggtatgcggatgaggtacacacccaggtcctggagctgccctatgtggaagaggagctgagcatggtcattctgcttcccgatgacaacacggacctcgccgtggtggaaaaagcacttacatatgagaaattcaaagcctggacaaattcagaaaagttgacaaaaagtaaggttcaagttttccttcccagattaaagctggaggagagttatgacttggagcctttccttcgaagattaggaatgatcgatgcttttgacgaagccaaggcagacttttctggaatgtcaactgagaagaatgtgcctctgtccaaggttgcccacaagtgcttcgtggaggtcaatgaggaaggcacagaggctgccgcagccactgctgtggtcaggaattcccggtgcagcagaatggagccaagattctgtgcagaccacccttttcttttcttcatcaggcaccacaaaaccaactgcatcttgttctgtggcaggttctcttctccgtaaagaggagcaattgctgtacataccctcctttccttctacctatcttgccttaattaacattccctgtgacctagttggtgcagtggcttgaatgccaaaataaagcgtgtgcactggatagtgtgtgaaagtctttgctgaaagttccagagccattgagaataactgaggccgcagatgcatgaaatttgggcctgggaaggctatgctggttttggagtgtttggggtgcctgccattgcctctgccttcacctaagtctgtgcccattgtttcaggggatcttatggagcatctcagggcttcaggagccagccctctatgtgctcttccatccgcccggctctgcccaccaccactgccaggctgaacaggggactagtgcccaggtgacactgcacacaaagccaagggcaaaccctatagagtaaagctgcagccaccctgtgtctcatgtgcagctgaaatagtgatctgcttctgtcactgtcacatagacagccctgcatgccccctgtctcacacagtttgtaatgaagacagctccttctcatctttccataagcctgagatacaagttcagggactcagcaatgcactttaggactgagctaggaggcaaatatctgaagcttgctatgctgttctttccattccttttccctctgaaacacacaaaataccaaaggaacttacgcaacacaccactgagtcctctaactaatcatatgtgctcagacacagctcaagcacaccccttagttaagaaagaacctccatatacattaatttttttctgcctaaaaataaaattgcgttgtggcagcaatttggaaactacagcaaagtctccaaaaaaattgaagtcacccacaattccaacacacagcaatcactgctgttaatagtgatatacatccttccctattatgtgtatgcaaatagaaatttataagcattttactacaagttaatcatatccttcagtagcttatttcttcccttatgaaaaacctcccttaagatctttccaggtcatcaatttgatgtgcatagtattccactgtgtggctggatttctataattgaatctaattttagacagtttgagtaattaaaattatttctattaacaaataatagattgctaataatatatattatgctgttttggatatactaaatatttgctcacatccttaatatattttttaaaattcctaacaatagtactgttgagataaaagttgagcacattttgagacttcttccaaattggtccctagaaagttacactggtttgtactctcacttatgtcactgtttataccaccactgactgctgcctgctttattatttctttaatgagttggactgaacagtggttaatcctgactctgtttttgactgacagttaacagttacatgaaccattcatattacagctcttacttaaatttgaccaagccaggatatatctgttaggccacattcatttagggatcatgttttccaaagcaggtttgggcaaaattaatccacaggactgaaaggtatacatctgtgagttttgttctcacttccacctctaatttgaagaacactttaattgacacagaatacatttcacatatttaacctctacaataagttctgacacattttccatgaaacaaaccatcgctatattcaagataatgaacctatctatcatactcccaaattccttcttgcatctttgtaatttctcactcttccttctccctctccccgtcccatcccaaccactgatctgctcaggcaactaccaatcttctttctgtcactatagattaatttgcatttttaaagaaatttacatacatggaaccatacatcatctatgctttgtagtatgactcctgtcactcagtacaattattttgagattcatttatgttattgtatgtatcaatagttcatcccttttattggtaagtaacatttttttgtataggtataccatgatttgttgatgaacaaatttacctgttgatgaacatttacgttgttaccaagatttttgctattgaaaataaagtttttatgaatatttatatatatacatctttgtat

SEQ ID NO: 441378 - DNA, 949 bp, Homo sapiens
cgtgaagcatctacaaaggaggaatagtcaaagcagcagcggcggcggcggcggcggcagcagcagcagcagcaggagaccttctctgatggatgacctctgtgaagcaaatggcacttttgccatcagcttatttaaaatattgggggaagaggacaactcaagaaacgtattcttctctcccatgagcatctcctctgccctggccatggtcttcatgggggcaaagggaagcactgcagcccagatgtcccaggcactttgtttatacaaagacggagatattcaccgaggtttccagtcacttctcagtgaagttaacagaactggcactcagtacttgcttagaactgccaacagactctttggagaaaagacgtgtgatttccttccagactttaaagaatactgtcagaagttctatcaggcagagctggaggagttgtcctttgctgaagacactgaagagtgcaggaagcatataaatgactgggtggcagagaagactgaaggtaagatttcagaggtactggatgctgggacagtcgatcccctgacaaagctggtccttgtgaatgccatttatttcaagggaaagtggaatgagcaatttgacagaaagtacacaaggggaatgctctttaaaaccaacgaggaaaaaaagacagtgcagatgatgtttaaggaagctaagtttaaaatggggtatgcggatgaggtacacacccaggtcctggagctgccctatgtggaagaggagctgagcatggtcattctgcttcccgatgacaacacggacctcgccgtgaaagagtgatggatcttgaagaatttgaagctaactccaggacaggcagaggacaaacaaggatgctgatgaagtcttcttgcattccccatttctcgtctcatgctcccttctcatgcctcccttcatcttcagatgaac

SEQ ID NO: 441379 - DNA, 1034 bp, Homo sapiens
cgtgaagcatctacaaaggaggaatagtcaaagcagcagcggcggcggcggcggcggcagcagcagcagcagcaggagaccttctctgatggatgacctctgtgaagcaaatggcacttttgccatcagcttatttaaaatattgggggaagaggacaactcaagaaacgtattcttctctcccatgagcatctcctctgccctggccatggtcttcatgggggcaaagggaagcactgcagcccagatgtcccaggcactttgtttatacaaagacggagatattcaccgaggtttccagtcacttctcagtgaagttaacagaactggcactcagtacttgcttagaactgccaacagactctttggagaaaagacgtgtgatttccttccagactttaaagaatactgtcagaagttctatcaggcagagctggaggagttgtcctttgctgaagacactgaagagtgcaggaagcatataaatgactgggtggcagagaagactgaaggtaagatttcagaggtactggatgctgggacagtcgatcccctgacaaagctggtccttgtgaatgccatttatttcaagggaaagtggaatgagcaatttgacagaaagtacacaaggggaatgctctttaaaaccaacgaggaaaaaaagacagtgcagatgatgtttaaggaagctaagtttaaaatggggtatgcggatgaggtacacacccaggtcctggagctgccctatgtggaagaggagctgagcatggtcattctgcttcccgatgacaacacggacctcgccgtggatacactgagaagcacaagcttcttctgtgacattcttgccaacattatcagcacctgagtgtaagtacagaaacatcagacggcattgaattgagggatattctaccaaataattggctgaaactctctaaaagaggcaatgtcataaaagacaagcactgtggaagtgccacaggaggatgtgtgataactaattgcaacctgcgagcttctttgggtcccac

SEQ ID NO: 441380 - DNA, 902 bp, Homo sapiens
aaggttttttataactaatttaacagcaaaatctggcctagttatcgtctttattttctttttttaatgtgatttaaaactattcatttgtttcactatagcttaataatttgtttgcttttctgcttctaagaccctgtaggggcattatataacttctggcatttgcatagtacctttacaaaatccaaaaaaatctgaattctaaacacatttagtcctaaaagttacagataagggattctggacttgcgattctaagtctttgttcgtttttattgcattttctgagccaacataaccattatttaaaaacaagttgctatagtaactctacattacagacctcccccaaactcagcagttcagagcatgtattctcactcagggctctgcttccttgtaggtagatgtgtggatcggtgagggcagttcttatttgtatgccttattctggggcccaggctgaaggggcagtggctatccatgataagcttttctcaaggcaccagcagaagtacaagaagtcaaggccaactgcataagcatagttcaaatgtctggttatgccacatctgctaagattgcattgaccaaagcaagtcacatgatcatgcccaaagacttaggagtgggtagtagactgcaaccaccatgcagccaagcaaactacagagccaagcctataacatcactggagagaggtgtattcctcccttggccaggctgggggagggagtgaatattggctgaataataatctaatctaccacagatggttaacagaggtggagtgggatggaaggagaaaaaaaaaaaatcaccaaatgggatgtatcactacccttgctctttttagcgtctgctgctttcacaaagccttttatagggctggagaaatg

SEQ ID NO: 441381 - DNA, 321 bp, Homo sapiens
  misc_feature (279)..(279): n is a, c, g, or t
  misc_feature (292)..(293): n is a, c, g, or t
gccgcggcggcagcggggcggcggggaagcgtatacctaatctgggagcctgcaagtgacaacagcctttgcggtccttagacagcttggcctggaggagaacacatgaaagaaagaacctcaagaggctttgttttctgtgaaacagtatttctatacagttgctccaatgacagagttacctgcaccgttgtcctacttccagaatgcacagatgtctgaggacaaccacctgagcaatacttttccaccatgcctggaatttctgtcactcactgnatacaaccccccnnggttaaggctcccgacgatcctctagat

SEQ ID NO: 441382 - DNA, 178 bp, Homo sapiens
  misc_feature (144)..(144): n is a, c, g, or t
tttcaggttattctcgtcagctccacaaatgggtgctttgtggtctctgcccgcgttacctttcctctcaatgtacctttgtgtgaactgggcagtggaggtgcctgctgcagttaccatggagggtattcagcttggacttancaggctagacgatttaggtcttccagggtaaaaa

SEQ ID NO: 441383 - DNA, 3135 bp, Homo sapiens
agagatatttgcgattttaacagcattctcttgattgtgatgcagctggttcgcaaataggtaccctaaagaaatgacaggtgttaaatttaggatggccatcgcttgtatgccgggagaagcacacgctgggcccaatttatataggggctttcgtcctcagctcgagcagcctcagaaccccgacaacccacgccagcgctctgggcggattccgtcaggtggggaaggcctggtggagctctgggttctccccgcaatcgtttctccaggccggaggccccgcccccttcctcctggctcctcccctcctccgtgggccggccgccaacgacgccagagccggaaatgacgacaacggtgagggttctcgggcggggcctgggacaggcagctccggggtccgcggtttcacatcggaaacaaaacagcggctggtctggaaggaacctgagctacgagccgcggcggcagcggggcggcggggaagcgtatacctaatctgggagcctgcaagtgacaacagcctttgcggtccttagacagcttggcctggaggagaacacatgaaagaaagaacctcaagaggctttgttttctgtgaaacagtatttctatacagttgctccaatgacagagttacctgcaccgttgtcctacttccagaatgcacagatgtctgaggacaaccacctgagcaatactaatgacaatagagaacggcaggagcacaacgacagacggagccttggccaccctgagccattatctaatggacgaccccagggtaactcccggcaggtggtggagcaagatgaggaagaagatgaggagctgacattgaaatatggcgccaagcatgtgatcatgctctttgtccctgtgactctctgcatggtggtggtcgtggctaccattaagtcagtcagcttttatacccggaaggatgggcagctaatctataccccattcacagaagataccgagactgtgggccagagagccctgcactcaattctgaatgctgccatcatgatcagtgtcattgttgtcatgactatcctcctggtggttctgtataaatacaggtgctataaggtcatccatgcctggcttattatatcatctctattgttgctgttctttttttcattcatttacttgggggaagtgtttaaaacctataacgttgctgtggactacattactgttgcactcctgatctggaattttggtgtggtgggaatgatttccattcactggaaaggtccacttcgactccagcaggcatatctcattatgattagtgccctcatggccctggtgtttatcaagtacctccctgaatggactgcgtggctcatcttggctgtgatttcagtatatgatttagtggctgttttgtgtccgaaaggtccacttcgtatgctggttgaaacagctcaggagagaaatgaaacgctttttccagctctcatttactcctcaacaatggtgtggttggtgaatatggcagaaggagacccggaagctcaaaggagagtatccaaaaattccaagtataatgcagaaagcacagaaagggagtcacaagacactgttgcagagaatgatgatggcgggttcagtgaggaatgggaagcccagagggacagtcatctagggcctcatcgctctacacctgagtcacgagctgctgtccaggaactttccagcagtatcctcgctggtgaagacccagaggaaaggggagtaaaacttggattgggagatttcattttctacagtgttctggttggtaaagcctcagcaacagccagtggagactggaacacaaccatagcctgtttcgtagccatattaattggtttgtgccttacattattactccttgccattttcaagaaagcattgccagctcttccaatctccatcacctttgggcttgttttctactttgccacagattatcttgtacagccttttatggaccaattagcattccatcaattttatatctagcatatttgcggttagaatcccatggatgtttcttctttgactataacaaaatctggggaggacaaaggtgattttcctgtgtccacatctaacaaagtcaagattcccggctggacttttgcagcttccttccaagtcttcctgaccaccttgcactattggactttggaaggaggtgcctatagaaaacgattttgaacatacttcatcgcagtggactgtgtccctcggtgcagaaactaccagatttgagggacgaggtcaaggagatatgataggcccggaagttgctgtgccccatcagcagcttgacgcgtggtcacaggacgatttcactgacactgcgaactctcaggactaccgttaccaagaggttaggtgaagtggtttaaaccaaacggaactcttcatcttaaactacacgttgaaaatcaacccaataattctgtattaactgaattctgaacttttcaggaggtactgtgaggaagagcaggcaccagcagcagaatggggaatggagaggtgggcaggggttccagcttccctttgattttttgctgcagactcatcctttttaaatgagacttgttttcccctctctttgagtcaagtcaaatatgtagattgcctttggcaattcttcttctcaagcactgacactcattaccgtctgtgattgccatttcttcccaaggccagtctgaacctgaggttgctttatcctaaaagttttaacctcaggttccaaattcagtaaattttggaaacagtacagctatttctcatcaattctctatcatgttgaagtcaaatttggattttccaccaaattctgaatttgtagacatacttgtacgctcacttgccccagatgcctcctctgtcctcattcttctctcccacacaagcagtctttttctacagccagtaaggcagctctgtcgtggtagcagatggtcccattattctagggtcttactctttgtatgatgaaaagaatgtgttatgaatcggtgctgtcagccctgctgtcagaccttcttccacagcaaatgagatgtatgcccaaagacggtagaattaaagaagagtaaaatggctgttgaagca

SEQ ID NO: 441384 - DNA, 3237 bp, Homo sapiens
agagatatttgcgattttaacagcattctcttgattgtgatgcagctggttcgcaaataggtaccctaaagaaatgacaggtgttaaatttaggatggccatcgcttgtatgccgggagaagcacacgctgggcccaatttatataggggctttcgtcctcagctcgagcagcctcagaaccccgacaacccacgccagcgctctgggcggattccgtcaggtggggaaggcctggtggagctctgggttctccccgcaatcgtttctccaggccggaggccccgcccccttcctcctggctcctcccctcctccgtgggccggccgccaacgacgccagagccggaaatgacgacaacggtgagggttctcgggcggggcctgggacaggcagctccggggtccgcggtttcacatcggaaacaaaacagcggctggtctggaaggaacctgagctacgagccgcggcggcagcggggcggcggggaagcgtatgctgggcacagtggctcacacctgtaatctgccagcactttgggaggccgaggcaggtagatcacctgaggtcaggagttcgagaccagcctcgccaaaatgacctaatctgggagcctgcaagtgacaacagcctttgcggtccttagacagcttggcctggaggagaacacatgaaagaaagaacctcaagaggctttgttttctgtgaaacagtatttctatacagttgctccaatgacagagttacctgcaccgttgtcctacttccagaatgcacagatgtctgaggacaaccacctgagcaatactaatgacaatagagaacggcaggagcacaacgacagacggagccttggccaccctgagccattatctaatggacgaccccagggtaactcccggcaggtggtggagcaagatgaggaagaagatgaggagctgacattgaaatatggcgccaagcatgtgatcatgctctttgtccctgtgactctctgcatggtggtggtcgtggctaccattaagtcagtcagcttttatacccggaaggatgggcagctaatctataccccattcacagaagataccgagactgtgggccagagagccctgcactcaattctgaatgctgccatcatgatcagtgtcattgttgtcatgactatcctcctggtggttctgtataaatacaggtgctataaggtcatccatgcctggcttattatatcatctctattgttgctgttctttttttcattcatttacttgggggaagtgtttaaaacctataacgttgctgtggactacattactgttgcactcctgatctggaattttggtgtggtgggaatgatttccattcactggaaaggtccacttcgactccagcaggcatatctcattatgattagtgccctcatggccctggtgtttatcaagtacctccctgaatggactgcgtggctcatcttggctgtgatttcagtatatgatttagtggctgttttgtgtccgaaaggtccacttcgtatgctggttgaaacagctcaggagagaaatgaaacgctttttccagctctcatttactcctcaacaatggtgtggttggtgaatatggcagaaggagacccggaagctcaaaggagagtatccaaaaattccaagtataatgcagaaagcacagaaagggagtcacaagacactgttgcagagaatgatgatggcgggttcagtgaggaatgggaagcccagagggacagtcatctagggcctcatcgctctacacctgagtcacgagctgctgtccaggaactttccagcagtatcctcgctggtgaagacccagaggaaaggggagtaaaacttggattgggagatttcattttctacagtgttctggttggtaaagcctcagcaacagccagtggagactggaacacaaccatagcctgtttcgtagccatattaattggtttgtgccttacattattactccttgccattttcaagaaagcattgccagctcttccaatctccatcacctttgggcttgttttctactttgccacagattatcttgtacagccttttatggaccaattagcattccatcaattttatatctagcatatttgcggttagaatcccatggatgtttcttctttgactataacaaaatctggggaggacaaaggtgattttcctgtgtccacatctaacaaagtcaagattcccggctggacttttgcagcttccttccaagtcttcctgaccaccttgcactattggactttggaaggaggtgcctatagaaaacgattttgaacatacttcatcgcagtggactgtgtccctcggtgcagaaactaccagatttgagggacgaggtcaaggagatatgataggcccggaagttgctgtgccccatcagcagcttgacgcgtggtcacaggacgatttcactgacactgcgaactctcaggactaccgttaccaagaggttaggtgaagtggtttaaaccaaacggaactcttcatcttaaactacacgttgaaaatcaacccaataattctgtattaactgaattctgaacttttcaggaggtactgtgaggaagagcaggcaccagcagcagaatggggaatggagaggtgggcaggggttccagcttccctttgattttttgctgcagactcatcctttttaaatgagacttgttttcccctctctttgagtcaagtcaaatatgtagattgcctttggcaattcttcttctcaagcactgacactcattaccgtctgtgattgccatttcttcccaaggccagtctgaacctgaggttgctttatcctaaaagttttaacctcaggttccaaattcagtaaattttggaaacagtacagctatttctcatcaattctctatcatgttgaagtcaaatttggattttccaccaaattctgaatttgtagacatacttgtacgctcacttgccccagatgcctcctctgtcctcattcttctctcccacacaagcagtctttttctacagccagtaaggcagctctgtcgtggtagcagatggtcccattattctagggtcttactctttgtatgatgaaaagaatgtgttatgaatcggtgctgtcagccctgctgtcagaccttcttccacagcaaatgagatgtatgcccaaagacggtagaattaaagaagagtaaaatggctgttgaagca

SEQ ID NO: 441385 - DNA, 3227 bp, Homo sapiens
agagatatttgcgattttaacagcattctcttgattgtgatgcagctggttcgcaaataggtaccctaaagaaatgacaggtgttaaatttaggatggccatcgcttgtatgccgggagaagcacacgctgggcccaatttatataggggctttcgtcctcagctcgagcagcctcagaaccccgacaacccacgccagcgctctgggcggattccgtcaggtggggaaggcctggtggagctctgggttctccccgcaatcgtttctccaggccggaggccccgcccccttcctcctggctcctcccctcctccgtgggccggccgccaacgacgccagagccggaaatgacgacaacggtgagggttctcgggcggggcctgggacaggcagctccggggtccgcggtttcacatcggaaacaaaacagcggctggtctggaaggaacctgagctacgagccgcggcggcagcggggcggcggggaagcgtatacctaatctgggagcctgcaagtgacaacagcctttgcggtccttagacagcttggcctggaggagaacacatgaaagaaagaacctcaagaggctttgttttctgtgaaacagtatttctatacagttgctccaatgacagagttacctgcaccgttgtcctacttccagaatgcacagatgtctgaggacaaccacctgagcaatactaatgacaatagagaacggcaggagcacaacgacagacggagccttggccaccctgagccattatctaatggacgaccccagggtaactcccggcaggtggtggagcaagatgaggaagaagatgaggagctgacattgaaatatggcgccaagcatgtgatcatgctctttgtccctgtgactctctgcatggtggtggtcgtggctaccattaagtcagtcagcttttatacccggaaggatgggcagctaatctataccccattcacagaagataccgagactgtgggccagagagccctgcactcaattctgaatgctgccatcatgatcagtgtcattgttgtcatgactatcctcctggtggttctgtataaatacaggtgctataaggtcatccatgcctggcttattatatcatctctattgttgctgttctttttttcattcatttacttgggggaagtgtttaaaacctataacgttgctgtggactacattactgttgcactcctgatctggaattttggtgtggtgggaatgatttccattcactggaaaggtccacttcgactccagcaggcatatctcattatgattagtgccctcatggccctggtgtttatcaagtacctccctgaatggactgcgtggctcatcttggctgtgatttcagtatatgatttagtggctgttttgtgtccgaaaggtccacttcgtatgctggttgaaacagctcaggagagaaatgaaacgctttttccagctctcatttactcctcaacaatggtgtggttggtgaatatggcagaaggagacccggaagctcaaaggagagtatccaaaaattccaagtataatgcagaaagagcctgtctgcctcctgctgccatcaacctgctgtctatagctcccatggcacccaggctgttcatgccaaagggtgcctgcaggcccacggcacagaaagggagtcacaagacactgttgcagagaatgatgatggcgggttcagtgaggaatgggaagcccagagggacagtcatctagggcctcatcgctctacacctgagtcacgagctgctgtccaggaactttccagcagtatcctcgctggtgaagacccagaggaaaggggagtaaaacttggattgggagatttcattttctacagtgttctggttggtaaagcctcagcaacagccagtggagactggaacacaaccatagcctgtttcgtagccatattaattggtttgtgccttacattattactccttgccattttcaagaaagcattgccagctcttccaatctccatcacctttgggcttgttttctactttgccacagattatcttgtacagccttttatggaccaattagcattccatcaattttatatctagcatatttgcggttagaatcccatggatgtttcttctttgactataacaaaatctggggaggacaaaggtgattttcctgtgtccacatctaacaaagtcaagattcccggctggacttttgcagcttccttccaagtcttcctgaccaccttgcactattggactttggaaggaggtgcctatagaaaacgattttgaacatacttcatcgcagtggactgtgtccctcggtgcagaaactaccagatttgagggacgaggtcaaggagatatgataggcccggaagttgctgtgccccatcagcagcttgacgcgtggtcacaggacgatttcactgacactgcgaactctcaggactaccgttaccaagaggttaggtgaagtggtttaaaccaaacggaactcttcatcttaaactacacgttgaaaatcaacccaataattctgtattaactgaattctgaacttttcaggaggtactgtgaggaagagcaggcaccagcagcagaatggggaatggagaggtgggcaggggttccagcttccctttgattttttgctgcagactcatcctttttaaatgagacttgttttcccctctctttgagtcaagtcaaatatgtagattgcctttggcaattcttcttctcaagcactgacactcattaccgtctgtgattgccatttcttcccaaggccagtctgaacctgaggttgctttatcctaaaagttttaacctcaggttccaaattcagtaaattttggaaacagtacagctatttctcatcaattctctatcatgttgaagtcaaatttggattttccaccaaattctgaatttgtagacatacttgtacgctcacttgccccagatgcctcctctgtcctcattcttctctcccacacaagcagtctttttctacagccagtaaggcagctctgtcgtggtagcagatggtcccattattctagggtcttactctttgtatgatgaaaagaatgtgttatgaatcggtgctgtcagccctgctgtcagaccttcttccacagcaaatgagatgtatgcccaaagacggtagaattaaagaagagtaaaatggctgttgaagca

SEQ ID NO: 441386 - DNA, 2264 bp, Homo sapiens
gtgcggccaactttaaaggatcccccgaacatgtcgtggctaccattaagtcagtcagcttttatacccggaaggatgggcagctaatctataccccattcacagaagataccgagactgtgggccagagagccctgcactcaattctgaatgctgccatcatgatcagtgtcattgttgtcatgactatcctcctggtggttctgtataaatacaggtgctataaggtcatccatgcctggcttattatatcatctctattgttgctgttctttttttcattcatttacttgggggaagtgtttaaaacctataacgttgctgtggactacattactgttgcactcctgatctggaattttggtgtggtgggaatgatttccattcactggaaaggtccacttcgactccagcaggcatatctcattatgattagtgccctcatggccctggtgtttatcaagtacctccctgaatggactgcgtggctcatcttggctgtgatttcagtatatgatttagtggctgttttgtgtccgaaaggtccacttcgtatgctggttgaaacagctcaggagagaaatgaaacgctttttccagctctcatttactcctcaacaatggtgtggttggtgaatatggcagaaggagacccggaagctcaaaggagagtatccaaaaattccaagtataatgcagaaagcacagaaagggagtcacaagacactgttgcagagaatgatgatggcgggttcagtgaggaatgggaagcccagagggacagtcatctagggcctcatcgctctacacctgagtcacgagctgctgtccaggaactttccagcagtatcctcgctggtgaagacccagaggaaaggggagtaaaacttggattgggagatttcattttctacagtgttctggttggtaaagcctcagcaacagccagtggagactggaacacaaccatagcctgtttcgtagccatattaattggtttgtgccttacattattactccttgccattttcaagaaagcattgccagctcttccaatctccatcacctttgggcttgttttctactttgccacagattatcttgtacagccttttatggaccaattagcattccatcaattttatatctagcatatttgcggttagaatcccatggatgtttcttctttgactataacaaaatctggggaggacaaaggtgattttcctgtgtccacatctaacaaagtcaagattcccggctggacttttgcagcttccttccaagtcttcctgaccaccttgcactattggactttggaaggaggtgcctatagaaaacgattttgaacatacttcatcgcagtggactgtgtccctcggtgcagaaactaccagatttgagggacgaggtcaaggagatatgataggcccggaagttgctgtgccccatcagcagcttgacgcgtggtcacaggacgatttcactgacactgcgaactctcaggactaccgttaccaagaggttaggtgaagtggtttaaaccaaacggaactcttcatcttaaactacacgttgaaaatcaacccaataattctgtattaactgaattctgaacttttcaggaggtactgtgaggaagagcaggcaccagcagcagaatggggaatggagaggtgggcaggggttccagcttccctttgattttttgctgcagactcatcctttttaaatgagacttgttttcccctctctttgagtcaagtcaaatatgtagattgcctttggcaattcttcttctcaagcactgacactcattaccgtctgtgattgccatttcttcccaaggccagtctgaacctgaggttgctttatcctaaaagttttaacctcaggttccaaattcagtaaattttggaaacagtacagctatttctcatcaattctctatcatgttgaagtcaaatttggattttccaccaaattctgaatttgtagacatacttgtacgctcacttgccccagatgcctcctctgtcctcattcttctctcccacacaagcagtctttttctacagccagtaaggcagctctgtcgtggtagcagatggtcccattattctagggtcttactctttgtatgatgaaaagaatgtgttatgaatcggtgctgtcagccctgctgtcagaccttcttccacagcaaatgagatgtatgcccaaagacggtagaattaaagaagagtaaaatggctgttgaagca

SEQ ID NO: 441387 - DNA, 3081 bp, Homo sapiens
agagatatttgcgattttaacagcattctcttgattgtgatgcagctggttcgcaaataggtaccctaaagaaatgacaggtgttaaatttaggatggccatcgcttgtatgccgggagaagcacacgctgggcccaatttatataggggctttcgtcctcagctcgagcagcctcagaaccccgacaacccacgccagcgctctgggcggattccgtcaggtggggaaggcctggtggagctctgggttctccccgcaatcgtttctccaggccggaggccccgcccccttcctcctggctcctcccctcctccgtgggccggccgccaacgacgccagagccggaaatgacgacaacggtgagggttctcgggcggggcctgggacaggcagctccggggtccgcggtttcacatcggaaacaaaacagcggctggtctggaaggaacctgagctacgagccgcggcggcagcggggcggcggggaagcgtatacctaatctgggagcctgcaagtgacaacagcctttgcggtccttagacagcttggcctggaggagaacacatgaaagaaagaacctcaagaggctttgttttctgtgaaacagtatttctatacagttgctccaatgacagagttacctgcaccgttgtcctacttccagaatgcacagatgtctgaggacaaccacctgagcaatactaatgacaatagagaacggcaggagcacaacgacagacggagccttggccaccctgagccattatctaatggacgaccccagggtaactcccggcaggtggtggagcaagatgaggaagaagatgaggagctgacattgaaatatggcgccaagcatgtgatcatgctctttgtccctgtgactctctgcatggtggtggtcgtggctaccattaagtcagtcagcttttatacccggaaggatgggcagctaatctataccccattcacagaagataccgagactgtgggccagagagccctgcactcaattctgaatgctgccatcatgatcagtgtcattgttgtcatgactatcctcctggtggttctgtataaatacaggtgctataaggtcatccatgcctggcttattatatcatctctattgttgctgttctttttttcattcatttacttgggggaagtgtttaaaacctataacgttgctgtggactacattactgttgcactcctgatctggaattttggtgtggtgggaatgatttccattcactggaaaggtccacttcgactccagcaggcatatctcattatgattagtgccctcatggccctggtgtttatcaagtacctccctgaatggactgcgtggctcatcttggctgtgatttcagtatatgatttagtggctgttttgtgtccgaaaggtccacttcgtatgctggttgaaacagctcaggagagaaatgaaacgctttttccagctctcatttactcctcaacaatggtgtggttggtgaatatggcagaaggagacccggaagctcaaaggagagtatccaaaaattccaagtataatgcagaaagcacagaaagggagtcacaagacactgttgcagagaatgatgatggcgggttcagtgaggaatgggaagcccagagggacagtcatctagggcctcatcgctctacacctgagtcacgagctgctgtccaggaactttccagcagtatcctcgctggtgaagacccagaggaaaggggagtaaaacttggattgggagatttcattttctacagtgttctggttggtaaagcctcagcaacagccagtggagactggaacacaaccatagcctgtttcgtagccatattaattggtttgtgccttacattattactccttgccattttcaagaaagcattgccagctcttccaatctccatcacctttgggcttgttttctactttgccacagattatcttgtacagccttttatggaccaattagcattccatcaattttatatctagcatatttgcggttagaatcccatggatgtttcttctttgactataacaaaatctggggaggacaaaggtgattttcctgtgtccacatctaacaaagtcaagattcccggctggacttttgcagcttccttccaagtcttcctgaccaccttgcactattggactttggaaggaggtgcctatagaaaacgattttgaacatacttcatcgcagtggactgtgtccctcggtgcagaaactaccagatttgagggacgaggtcaaggagatatgataggcccggaagttgctgtgccccatcagcagcttgacgcgtggtcacaggacgatttcactgacactgcgaactctcaggactaccgttaccaagaggttaggtgaagtggtttaaaccaaacggaactcttcatcttaaactacacgttgaaaatcaacccaataattctgtattaactgaattctgaacttttcaggaggtactgtgaggaagagcaggcaccagcagcagaatggggaatggagaggtgggcaggggttccagcttccctttgattttttgctgcagactcatcctttttaaatgagacttgttttcccctctctttgagtcaagtcaaatatgtagattgcctttggcaattcttcttctcaagcactgacactcattaccgtctgtgattgccatttcttcccaaggccagtctgaacctgaggttgctttatccttttctcatcaattctctatcatgttgaagtcaaatttggattttccaccaaattctgaatttgtagacatacttgtacgctcacttgccccagatgcctcctctgtcctcattcttctctcccacacaagcagtctttttctacagccagtaaggcagctctgtcgtggtagcagatggtcccattattctagggtcttactctttgtatgatgaaaagaatgtgttatgaatcggtgctgtcagccctgctgtcagaccttcttccacagcaaatgagatgtatgcccaaagacggtagaattaaagaagagtaaaatggctgttgaagca

SEQ ID NO: 441388 - DNA, 2272 bp, Homo sapiens
tcaggtcatgagctgttccagagtatcctcgtaatatggagcaggtagcaatgaagtagtcagctgttagtacccggaagggatgggcagcgtaatctataccccattcacagaagataccgagactgtgggccagagagccctgcactcaattctgaatgctgccatcatgatcagtgtcattgttgtcatgactatcctcctggtggttctgtataaatacaggtgctataaggtcatccatgcctggcttattatatcatctctattgttgctgttctttttttcattcatttacttgggggaagtgtttaaaacctataacgttgctgtggactacattactgttgcactcctgatctggaattttggtgtggtgggaatgatttccattcactggaaaggtccacttcgactccagcaggcatatctcattatgattagtgccctcatggccctggtgtttatcaagtacctccctgaatggactgcgtggctcatcttggctgtgatttcagtatatgatttagtggctgttttgtgtccgaaaggtccacttcgtatgctggttgaaacagctcaggagagaaatgaaacgctttttccagctctcatttactcctcaacaatggtgtggttggtgaatatggcagaaggagacccggaagctcaaaggagagtatccaaaaattccaagtataatgcagaaagcacagaaagggagtcacaagacactgttgcagagaatgatgatggcgggttcagtgaggaatgggaagcccagagggacagtcatctagggcctcatcgctctacacctgagtcacgagctgctgtccaggaactttccagcagtatcctcgctggtgaagacccagaggaaaggggagtaaaacttggattgggagatttcattttctacagtgttctggttggtaaagcctcagcaacagccagtggagactggaacacaaccatagcctgtttcgtagccatattaattggtttgtgccttacattattactccttgccattttcaagaaagcattgccagctcttccaatctccatcacctttgggcttgttttctactttgccacagattatcttgtacagccttttatggaccaattagcattccatcaattttatatctagcatatttgcggttagaatcccatggatgtttcttctttgactataacaaaatctggggaggacaaaggtgattttcctgtgtccacatctaacaaagtcaagattcccggctggacttttgcagcttccttccaagtcttcctgaccaccttgcactattggactttggaaggaggtgcctatagaaaacgattttgaacatacttcatcgcagtggactgtgtccctcggtgcagaaactaccagatttgagggacgaggtcaaggagatatgataggcccggaagttgctgtgccccatcagcagcttgacgcgtggtcacaggacgatttcactgacactgcgaactctcaggactaccgttaccaagaggttaggtgaagtggtttaaaccaaacggaactcttcatcttaaactacacgttgaaaatcaacccaataattctgtattaactgaattctgaacttttcaggaggtactgtgaggaagagcaggcaccagcagcagaatggggaatggagaggtgggcaggggttccagcttccctttgattttttgctgcagactcatcctttttaaatgagacttgttttcccctctctttgagtcaagtcaaatatgtagattgcctttggcaattcttcttctcaagcactgacactcattaccgtctgtgattgccatttcttcccaaggccagtctgaacctgaggttgctttatcctaaaagttttaacctcaggttccaaattcagtaaattttggaaacagtacagctatttctcatcaattctctatcatgttgaagtcaaatttggattttccaccaaattctgaatttgtagacatacttgtacgctcacttgccccagatgcctcctctgtcctcattcttctctcccacacaagcagtctttttctacagccagtaaggcagctctgtcgtggtagcagatggtcccattattctagggtcttactctttgtatgatgaaaagaatgtgttatgaatcggtgctgtcagccctgctgtcagaccttcttccacagcaaatgagatgtatgcccaaagacggtagaattaaagaagagtaaaatggctgttgaagca

SEQ ID NO: 441389 - DNA, 1711 bp, Homo sapiens
agagatatttgcgattttaacagcattctcttgattgtgatgcagctggttcgcaaataggtaccctaaagaaatgacaggtgttaaatttaggatggccatcgcttgtatgccgggagaagcacacgctgggcccaatttatataggggctttcgtcctcagctcgagcagcctcagaaccccgacaacccacgccagcgctctgggcggattccgtcaggtggggaaggcctggtggagctctgggttctccccgcaatcgtttctccaggccggaggccccgcccccttcctcctggctcctcccctcctccgtgggccggccgccaacgacgccagagccggaaatgacgacaacggtgagggttctcgggcggggcctgggacaggcagctccggggtccgcggtttcacatcggaaacaaaacagcggctggtctggaaggaacctgagctacgagccgcggcggcagcggggcggcggggaagcgtatacctaatctgggagcctgcaagtgacaacagcctttgcggtccttagacagcttggcctggaggagaacacatgaaagaaagaacctcaagaggctttgttttctgtgaaacagtatttctatacagttgctccaatgacagagttacctgcaccgttgtcctacttccagaatgcacagatgtctgaggacaaccacctgagcaatactaatgacaatagagaacggcaggagcacaacgacagacggagccttggccaccctgagccattatctaatggacgaccccagggtaactcccggcaggtggtggagcaagatgaggaagaagatgaggagctgacattgaaatatggcgccaagcatgtgatcatgctctttgtccctgtgactctctgcatggtggtggtcgtggctaccattaagtcagtcagcttttatacccggaaggatgggcagctaatctataccccattcacagaagataccgagactgtgggccagagagccctgcactcaattctgaatgctgccatcatgatcagtgtcattgttgtcatgactatcctcctggtggttctgtataaatacaggtgctataaggtcatccatgcctggcttattatatcatctctattgttgctgttctttttttcattcatttacttgggggaagtgtttaaaacctataacgttgctgtggactacattactgttgcactcctgatctggaattttggtgtggtgggaatgatttccattcactggaaaggtccacttcgactccagcaggcatatctcattatgattagtgccctcatggccctggtgtttatcaagtacctccctgaatggactgcgtggctcatcttggctgtgatttcagtatatgatttagtggctgttttgtgtccgaaaggtccacttcgtatgctggttgaaacagctcaggagagaaatgaaacgctttttccagctctcatttactcctcaacaatggtgtggttggtgaatatggcagaaggagacccggaagctcaaaggagagtatccaaaaattccaagtataatgcagaaatcagcgctgtaagatattcgcaagacactgcagcataaaatcattccgcctggtacagtttcccatagaaatctcagaagtacggtcagttatggccttatagctccccctctaaacccacaccatgttcgggggttc

SEQ ID NO: 441390 - DNA, 2848 bp, Homo sapiens
  misc_feature (17)..(17): n is a, c, g, or t
tgagctcggtccggcangatctttgcataaccttctttaccacagagagcccttagctatgctgatcagaccgtaagcgtttatgagaaacttagtttcctcctgtggctgaggaggggccagctttttcttcttttgcctgctgttttctctcccaatctatgatatgatatgacctggtttggggctgtctttggtgtttagaatatttgttttctgtcccaggatatttcttataagaacctaacttcaagagtagtgtgcgagtactgatctgaatttaaattaaaattggcttatattaggcagtcacagacaggaaaaataagagctatgcaaagaaagggggatttaaagtagtaggttctatcatctcaattcatttttttccatgaaatcccttcttccaagattcattccctctctcagacatgtgctagcatgggtattatcattgagaaagcacagctacagcaaagccacctgaatagcaatttgtgattggaagcattcttgagggatccctaatctagagtaatttatttgtgtaaggatcccaaatgtgttgcacctttcatgatacatttcttctctgaagagggtacgtggggtgtgtgtatttaaatccatcctatgtattactgattgtcctgtgtagaaagatggcaattattctgtctctttctccaagtttgagccacatctcagccacattgttagacagtgtacagagaacctatctttcctttttttttttttaaaggacaggattttgctgtgttgcccaggctagacttgaactcctgggctcaagtaatccacctcagcctgagtagctgagactacagcccatcttatttctttaaatcattcatctcaggcagagaacttttccctcaaacattctttttagaattagttcagtcattcctaaaacatccaaatgctagtcttccaccatgaaaaatagattgtcactggaaagaacagtagcaatttccataaggatgtgccttcactcacacgggacaggcggtggttatagagtcgggcaaaaccagcagtagagtatgaccagccaagccaatctgcttaataaaaagatggaagacagtaaggaaggaaagtagccactaagagtctgagtctgactgggctacagaataaagggtatttatggacagaatgtcattacatgcctatgggaataccaatcatatttggaagatttgcagattttttttcagagaggaaagactcaccttcctgtttttggttctcagtaggttcgtgtgtgttccctagaatcacagctctgactccaaatgactcaatttctcaattagaaaaagtagaagctttctaagcaacttggaagaaaacagtcataagtaagcaatttgttgattttactacagaagcaacaactgaagaggcagtgtttttactttcagactccgggattcccattctgtagtctctctgcttttaaaaaccctccttttgcaatagatgcccaaacagatgatgtttattacttgttatttacgtggcctcagacagtgtatgtattctcgatataacttgtagagtgtgaaatataagtttaactaccaaataaggtctcccagggttagatgactgcgggaagcctttgatcccaacccccaaggctttgtatatttgatcatttgtgatctaaccctggaagaaaaagagctcagaaaccactatgaaaaaatttgttcagtgttttctgtgttcccgtaggttctggagtctgaggatgcaaagatgaataagataaattctcagaatgtagttataatctcttgttttctggtatatgccatctttctttaacttctctaaaatattgggtatttgtcaaataaccacttttaacagttaccattactgagggcttatacattggtgttataaaagtgacttgattcagaaatcaatccattcagtaaagtactccttctctaaatttgctgttatgtctataaggaacagtttgacctgcccttctcctcacctcctcacctgccttccaacattgaatttggaaggagacgtgaaaattggacatttggttttgcccttgggctggaaactatcatataatcataagtttgagcctagaagtgatccttgtgatcttctcacctctttaaattcccacaacacaagagattaaaaacagaggtttcagctcttcatagtgcgttgtgaaatggctggccagagtgtaccaacaaagctgtcatcgggctcacagctcagagacatctgcatgtgatcatctgcatagtcctctcctctaacgggaaacacctcagatttgcatataaaaaagcaccctggtgctgaaatgaacccctttcttgaacatcaaagctgtctcccacagccttgggcagcagggtgcctcttagtggatgtgctgggtccaccctgagccctgacatgtggtggcagcattgccagttggtctgtgtgtctgtgtagcagggacgatttcccagaaagcaattttccttttgaaatacgtaattgttgagactaggcagtttcaaagtcagctgcatatagtagcaagtacaggactgtcttgtttttggtgtccttggaggtgctggggtgagggtttcagtgggatcatttactctcacatgttgtctgccttctgcttctgtggacactgctttgtacttaattcagacagactgtgaatacaccttttttataaatacctttcaaattcttggtaagatataattttgatagctgattgcagattttctgtatttgtcagattaataaagactgcatgaatcca

SEQ ID NO: 441391 - DNA, 2099 bp, Homo sapiens
  misc_feature (17)..(17): n is a, c, g, or t
tgagctcggtccggcangatctttgcataaccttctttaccacagagagcccttagctatgctgatcagaccgtaagcgtttatgagaaacttagtttcctcctgtggctgaggaggggccagctttttcttcttttgcctgctgttttctctcccaatctatgatatgatatgacctggtttggggctgtctttggtgtttagaatatttgttttctgtcccaggatatttcttataagaacctaacttcaagagtagtgtgcgagtactgatctgaatttaaattaaaattggcttatattaggcagtcacagacaggaaaaataagagctatgcaaagaaagggggatttaaagtagtaggttctatcatctcaattcatttttttccatgaaatcccttcttccaagattcattccctctctcagacatgtgctagcatgggtattatcattgagaaagcacagctacagcaaagccacctgaatagcaatttgtgattggaagcattcttgagggatccctaatctagagtaatttatttgtgtaaggatcccaaatgtgttgcacctttcatgatacatttcttctctgaagagggtacgtggggtgtgtgtatttaaatccatcctatgtattactgattgtcctgtgtagaaagatggcaattattctgtctctttctccaagtttgagccacatctcagccacattgttagacagtgtacagagaacctatctttcctttttttttttttaaaggacaggattttgctgtgttgcccaggctagacttgaactcctgggctcaagtaatccacctcagcctgagtagctgagactacagcccatcttatttctttaaatcattcatctcaggcagagaacttttccctcaaacattctttttagaattagttcagtcattcctaaaacatccaaatgctagtcttccaccatgaaaaatagattgtcactggaaagaacagtagcaatttccataaggatgtgccttcactcacacgggacaggcggtggttatagagtcgggcaaaaccagcagtagagtatgaccagccaagccaatctgcttaataaaaagatggaagacagtaaggaaggaaagtagccactaagagtctgagtctgactgggctacagaataaagggtatttatggacagaatgtcattacatgcctatgggaataccaatcatatttggaagatttgcagattttttttcagagaggaaagactcaccttcctgtttttggttctcagtaggttcgtgtgtgttccctagaatcacagctctgactccaaatgactcaatttctcaattagaaaaagtagaagctttctaagcaacttggaagaaaacagtcataatttgagcctagaagtgatccttgtgatcttctcacctctttaaattcccacaacacaagagattaaaaacagaggtttcagctcttcatagtgcgttgtgaaatggctggccagagtgtaccaacaaagctgtcatcgggctcacagctcagagacatctgcatgtgatcatctgcatagtcctctcctctaacgggaaacacctcagatttgcatataaaaaagcaccctggtgctgaaatgaacccctttcttgaacatcaaagctgtctcccacagccttgggcagcagggtgcctcttagtggatgtgctgggtccaccctgagccctgacatgtggtggcagcattgccagttggtctgtgtgtctgtgtagcagggacgatttcccagaaagcaattttccttttgaaatacgtaattgttgagactaggcagtttcaaagtcagctgcatatagtagcaagtacaggactgtcttgtttttggtgtccttggaggtgctggggtgagggtttcagtgggatcatttactctcacatgttgtctgccttctgcttctgtggacactgctttgtacttaattcagacagactgtgaatacaccttttttataaatacctttcaaattcttggtaagatataattttgatagctgattgcagattttctgtatttgtcagattaataaagactgcatgaatcca

SEQ ID NO: 441392 - DNA, 2110 bp, Homo sapiens
agagatatttgcgattttaacagcattctcttgattgtgatgcagctggttcgcaaataggtaccctaaagaaatgacaggtgttaaatttaggatggccatcgcttgtatgccgggagaagcacacgctgggcccaatttatataggggctttcgtcctcagctcgagcagcctcagaaccccgacaacccacgccagcgctctgggcggattccgtcaggtggggaaggcctggtggagctctgggttctccccgcaatcgtttctccaggccggaggccccgcccccttcctcctggctcctcccctcctccgtgggccggccgccaacgacgccagagccggaaatgacgacaacggtgagggttctcgggcggggcctgggacaggcagctccggggtccgcggtttcacatcggaaacaaaacagcggctggtctggaaggaacctgagctacgagccgcggcggcagcggggcggcggggaagcgtattgtgcgtgatggggagtccgggcaagccaggaaggcaccgcggacatgggcggccgcgggcagggcccggccctttgtggccgcccgggccgcgaaggcggtgtcctaaaagatgaggggcggggcgcggccggttggggctggggaaccccgtgtgggaaaccaggaggggcggcccgtttctcgggcttcgggcgcggccgggtggagagagattccggggagccttggtccggaaatgctgtttgctcgaagacgtctcagggcgcaggtgccttgggccgggattagtagccgtctgaactggagtggagtaggagaaagaggaagcgtcttgggctgggtctgcttgagcaactggtgaaactccgcgcctcacgccccgggtgtgtccttgtccaggggcgacgagcattctgggcgaagtccgcacgcctcttgttcgaggcggaagacggggtctgatgctttctccttggtcgggactgtctcgaggcatgcatgtccagtgactcttgtgtttgctgctgcttccctctcagattcttctcaccgttgtggtcagctctgctttaggcatattaatccatagtggaggctgggatgggtgagagaattgaggtgacttttccataattcaggtgagatgtgattagagttcgatctgcggtggtggcagaggcttacaagaaacactaacgggacatgggaaccaattgaggatcagggaataaagtgtgaagttgactaggaggttttcagtttagaacatggcagagacattctcagaaataaggaagttaggaagaaagacctggtttagagaggagggcgaggaagtggtttggaagtgtcactttggaagtgccagcaggtgaaaatgccctgtgaacaggactggagctgaaaacaggaatcaattccatagatttccagttgatgttggagcagtggagaagtctaagctaaggaaggggaagaggaggccaaggcaaacacttaggaacacttgcaacgagggggtggaagaagagcaaggagccagctgaggagaatgagtgtggttggagaaccaccacagcgcagggtcgccagagctgaggaaggggagggaagcttcaggaaggaaaaggttggcagggattttgagtgttaggcctggtgtagcagaaggaacagaagatttagagcagcgctagccaatagaaataaaatgtgaggcccggggcggtggctcacgcctgtaatcccagcactttgggaggccgcggggcggatccttgagctgaggagttcgagaccagacaacacggcgaaaccccggctctacaaaaaattagctgggcgtgggggcgcgcgcctgtagtcccagctgctcccaagcgaggctgaggcaggagaatcacttgaacccgggagaaggaggttgcagtaagccaagattatgccactgcactgcagcctgggcaaaagagtgagactgtctcaaaaaaaaaaaaaacctgttttgtttttcttttggagaaaaggcatacaaatttattagcatgcagactgggagaaccacaaggtgattatccctattttaaattttctaataaacatactattattt

SEQ ID NO: 441393 - DNA, 2778 bp, Homo sapiens
  misc_feature (17)..(17): n is a, c, g, or t
tgagctcggtccggcangatctttgcataaccttctttaccacagagagcccttagctatgctgatcagaccgtaagcgtttatgagaaacttagtttcctcctgtggctgaggaggggccagctttttcttcttttgcctgctgttttctctcccaatctatgatatgatatgacctggtttggggctgtctttggtgtttagaatatttgttttctgtcccaggatatttcttataagaacctaacttcaagagtagtgtgcgagtactgatctgaatttaaattaaaattggcttatattaggcagtcacagacaggaaaaataagagctatgcaaagaaagggggatttaaagtagtaggttctatcatctcaattcatttttttccatgaaatcccttcttccaagattcattccctctctcagacatgtgctagcatgggtattatcattgagaaagcacagctacagcaaagccacctgaatagcaatttgtgattggaagcattcttgagggatccctaatctagagtaatttatttgtgtaaggatcccaaatgtgttgcacctttcatgatacatttcttctctgaagagggtacgtggggtgtgtgtatttaaatccatcctatgtattactgattgtcctgtgtagaaagatggcaattattctgtctctttctccaagtttgagccacatctcagccacattgttagacagtgtacagagaacctatctttcctttttttttttttaaaggacaggattttgctgtgttgcccaggctagacttgaactcctgggctcaagtaatccacctcagcctgagtagctgagactacagcccatcttatttctttaaatcattcatctcaggcagagaacttttccctcaaacattctttttagaattagttcagtcattcctaaaacatccaaatgctagtcttccaccatgaaaaatagattgtcactggaaagaacagtagcaatttccataaggatgtgccttcactcacacgggacaggcggtggttatagagtcgggcaaaaccagcagtagagtatgaccagccaagccaatctgcttaataaaaagatggaagacagtaaggaaggaaagtagccactaagagtctgagtctgactgggctacagaataaagggtatttatggacagaatgtcattacatgcctatgggaataccaatcatatttggaagatttgcagattttttttcagagaggaaagactcaccttcctgtttttggttctcagtaggttcgtgtgtgttccctagaatcacagctctgactccaaatgactcaatttctcaattagaaaaagtagaagctttctaagcaacttggaagaaaacagtcataagtaagcaatttgttgattttactacagaagcaacaactgaagaggcagtgtttttactttcagactccgggattcccattctgtagtctctctgcttttaaaaaccctccttttgcaatagatgcccaaacagatgatgtttattacttgttatttacgtggcctcagacagtgtatgtattctcgatataacttgtagagtgtgaaatataagtttaactaccaaataaggtctcccagggttagatgactgcgggaagcctttgatcccaacccccaaggctttgtatatttgatcatttgtgatctaaccctggaagaaaaagagctcagaaaccactatgaaaaaatttgttcagtgttttctgtgttcccgtaggttctggagtctgaggatgcaaagatgaataagataaattctcagaatgtagttataatctcttgttttctggtatatgccatctttctttaacttctctaaaatattgggtatttgtcaaataaccacttttaacagttaccattactgagggcttatacattggtgttataaaagtgacttgattcagaaatcaatccattcagtaaagtactccttctctaaatttgctgttatgtctataaggaacagtttgacctgcccttctcctcacctcctcacctgccttccaacattgaatttggaaggagacgtgaaaattggacatttggttttgcccttgggctggaaactatcatataatcataagtttgagcctagaagtgatccttgtgatcttctcacctctttaaattcccacaacacaagagattaaaaacagaggtttcagctcttcatagtgcgttgtgaaatggctggccagagtgtaccaacaaagctgtcatcgggctcacagctcagagacatctgcatgtgatcatctgcatagtcctctcctctaacgggaaacacctcagatttgcatataaaaaagcaccctggtgctgaaatgaacccctttcttgaacatcaaagctgtctcccacagccttgggcagcagggtgcctcttagtggatgtgctgggtccaccctgagccctgacatgtggtggcagcattgccagttggtctgtgtgtctgtgtagcagggacgatttcccagaaagcaattttccttttgaaatacgtaattgttgagactaggcagtttcaaagtcagctgcatatatttactctcacatgttgtctgccttctgcttctgtggacactgctttgtacttaattcagacagactgtgaatacaccttttttataaatacctttcaaattcttggtaagatataattttgatagctgattgcagattttctgtatttgtcagattaataaagactgcatgaatcca

SEQ ID NO: 441394 - DNA, 1767 bp, Homo sapiens
agagatatttgcgattttaacagcattctcttgattgtgatgcagctggttcgcaaataggtaccctaaagaaatgacaggtgttaaatttaggatggccatcgcttgtatgccgggagaagcacacgctgggcccaatttatataggggctttcgtcctcagctcgagcagcctcagaaccccgacaacccacgccagcgctctgggcggattccgtcaggtggggaaggcctggtggagctctgggttctccccgcaatcgtttctccaggccggaggccccgcccccttcctcctggctcctcccctcctccgtgggccggccgccaacgacgccagagccggaaatgacgacaacggtgagggttctcgggcggggcctgggacaggcagctccggggtccgcggtttcacatcggaaacaaaacagcggctggtctggaaggaacctgagctacgagccgcggcggcagcggggcggcggggaagcgtattgtgcgtgatggggagtccgggcaagccaggaaggcaccgcggacatgggcggccgcgggcagggcccggccctttgtggccgcccgggccgcgaaggcggtgtcctaaaagatgaggggcggggcgcggccggttggggctggggaaccccgtgtgggaaaccaggaggggcggcccgtttctcgggcttcgggcgcggccgggtggagagagattccggggagccttggtccggaaatgctgtttgctcgaagacgtctcagggcgcaggtgccttgggccgggattagtagccgtctgaactggagtggagtaggagaaagaggaagcgtcttgggctgggtctgcttgagcaactggtgaaactccgcgcctcacgccccgggtgtgtccttgtccaggggcgacgagcattctgggcgaagtccgcacgcctcttgttcgaggcggaagacggggtctgatgctttctccttggtcgggactgtctcgaggcatgcatgtccagtgactcttgtgtttgctgctgcttccctctcagattcttctcaccgttgtggtcagctctgctttaggcatattaatccatagtggaggctgggatgggtgagagaattgaggtgacttttccataattcaggtgagatgtgattagagttcgatctgcggtggtggcagaggcttacaagaaacactaacgggacatgggaaccaattgaggatcagggaataaagtgtgaagttgactaggaggttttcagtttagaacatggcagagacattctcagaaataaggaagttaggaagaaagacctggtttagagaggagggcgaggaagtggtttggaagtgtcactttggaagtgccagcaggtgaaaatgccctgtgaacaggactggagctgaaaacaggaatcaattccatagatttccagttgatgttggagcagtggagaagtctaagctaaggaaggggaagaggaggccaaggcaaacacttaggaacacttgcaacgagggggtggaagaagagcaaggagccagctgaggagaatgagtgtggttggagaaccaccacagcgcagggtcgccaggctgggggagggagtgaatattggctgaataataatctaatctaccacagatggttaacagaggtggagtgggatggaaggagaaaaaaaaaaaatcaccaaatgggatgtatcactacccttgctctttttagcgtctgctgctttcacaaagccttttatagggctggagaaatg

SEQ ID NO: 441395 - DNA, 1825 bp, Homo sapiens
agagatatttgcgattttaacagcattctcttgattgtgatgcagctggttcgcaaataggtaccctaaagaaatgacaggtgttaaatttaggatggccatcgcttgtatgccgggagaagcacacgctgggcccaatttatataggggctttcgtcctcagctcgagcagcctcagaaccccgacaacccacgccagcgctctgggcggattccgtcaggtggggaaggcctggtggagctctgggttctccccgcaatcgtttctccaggccggaggccccgcccccttcctcctggctcctcccctcctccgtgggccggccgccaacgacgccagagccggaaatgacgacaacggtgagggttctcgggcggggcctgggacaggcagctccggggtccgcggtttcacatcggaaacaaaacagcggctggtctggaaggaacctgagctacgagccgcggcggcagcggggcggcggggaagcgtattgtgcgtgatggggagtccgggcaagccaggaaggcaccgcggacatgggcggccgcgggcagggcccggccctttgtggccgcccgggccgcgaaggcggtgtcctaaaagatgaggggcggggcgcggccggttggggctggggaaccccgtgtgggaaaccaggaggggcggcccgtttctcgggcttcgggcgcggccgggtggagagagattccggggagccttggtccggaaatgctgtttgctcgaagacgtctcagggcgcaggtgccttgggccgggattagtagccgtctgaactggagtggagtaggagaaagaggaagcgtcttgggctgggtctgcttgagcaactggtgaaactccgcgcctcacgccccgggtgtgtccttgtccaggggcgacgagcattctgggcgaagtccgcacgcctcttgttcgaggcggaagacggggtctgatgctttctccttggtcgggactgtctcgaggcatgcatgtccagtgactcttgtgtttgctgctgcttccctctcagattcttctcaccgttgtggtcagctctgctttaggcatattaatccatagtggaggctgggatgggtgagagaattgaggtgacttttccataattcagacctaatctgggagcctgcaagtgacaacagcctttgcggtccttagacagcttggcctggaggagaacacatgaaagaaagaacctcaagaggctttgttttctgtgaaacagtatttctatacagttgctccaatgacagagttacctgcaccgttgtcctacttccagaatgcacagatgtctgaggacaaccacctgagcaatactaatgacaatagagaacggcaggagcacaacgacagacggagccttggccaccctgagccattatctaatggacgaccccagggtaactcccggcaggtggtggagcaagatgaggaagaagatgaggagctgacattgaaatatggcgccaagcatgtgatcatgctctttgtccctgtgactctctgcatggtggtggtcgtggctaccattaagtcagtcagcttttatacccggaaggatgggcagctaatctataccccattcacagaagatgcccagggcccagaagccatcagaattatcagtggagaagcaccttttgactcttcccttccaatgtaatctctgccaacaccatgaggcttaaggtgctctaagtcatgagtgttttggtctcaaatgctgcagttttaataatctgtgactcctgagagcccatggttttttgaccttgtggttctaaaattccttgtctg

SEQ ID NO: 441396 - DNA, 1314 bp, Homo sapiens
agagatatttgcgattttaacagcattctcttgattgtgatgcagctggttcgcaaataggtaccctaaagaaatgacaggtgttaaatttaggatggccatcgcttgtatgccgggagaagcacacgctgggcccaatttatataggggctttcgtcctcagctcgagcagcctcagaaccccgacaacccacgccagcgctctgggcggattccgtcaggtggggaaggcctggtggagctctgggttctccccgcaatcgtttctccaggccggaggccccgcccccttcctcctggctcctcccctcctccgtgggccggccgccaacgacgccagagccggaaatgacgacaacggtgagggttctcgggcggggcctgggacaggcagctccggggtccgcggtttcacatcggaaacaaaacagcggctggtctggaaggaacctgagctacgagccgcggcggcagcggggcggcggggaagcgtatacctaatctgggagcctgcaagtgacaacagcctttgcggtccttagacagcttggcctggaggagaacacatgaaagaaagaacctcaagaggctttgttttctgtgaaacagtatttctatacagttgctccaatgacagagttacctgcaccgttgtcctacttccagaatgcacagatgtctgaggacaaccacctgagcaatactagacgagttctcgccatattggccaggctgatctcaaactcctgggctcaagtgatcctcccactttggcctcccaaaatacagagattatgggtgtgagccatcatgcccagctggctagatatttcataatgacaatagagaacggcaggagcacaacgacagacggagccttggccaccctgagccattatctaatggacgaccccagggtaactcccggcaggtggtggagcaagatgaggaagaagatgaggagctgacattgaaatatggcgccaagcatgtgatcatgctctttgtccctgtgactctctgcatggtggtggtcgtggctaccattaagtcagtcagcttttatacccggaaggatgggcagctaatctataccccattcacagaagatgcccagggcccagaagccatcagaattatcagtggagaagcaccttttgactcttcccttccaatgtaatctctgccaacaccatgaggcttaaggtgctctaagtcatgagtgttttggtctcaaatgctgcagttttaataatctgtgactcctgagagcccatggttttttgaccttgtggttctaaaattccttgtctg

SEQ ID NO: 441397 - DNA, 319 bp, Homo sapiens
agtaggtaacttttattagataatatcttgatttttcagggtcactgttataagctaacagtatagcaatgtttttatcgtctttctttggtcatagactcctttgagaatctcttgagaactatgataatgcccagtaaatacacagataagtatttaaggagttcagatactcaaaacccaacaatacagtcaaagcatcctaggttaagacacctcccattaaatacagaataccagcatggaaaggttcaggctgaggttatgattttgtttttgttttttgtttgttttttataagtcatgattttaaaaagaa

SEQ ID NO: 441398 - DNA, 411 bp, Homo sapiens
gggctcaagtgatcctcccactttggcctcccaaaatacagagattatgggtgtgagccatcatgcccagctggctagatatttcatgtaagtggaatcatacattatttctcttttagtgacttgcttattttgcttagcataatgtcctcaaggttcatctatattgtagcatgtgacaagatttcctttttaagggctgaataatattctgtgttatgtatataccacatatctgtgagtagacatttgggttacttccacttcgtggctatactgaataatgctatggtgaaagtggctatgcacatatctgtttgaggtcttgtttgtaattcagttcgtttttatatatactcattggtatttatataaatgggattgctgggtcatatggtagtttaatttttt

SEQ ID NO: 441399 - DNA, 193 bp, Homo sapiens
agcacagttgatataggttatggtaaaattataaaggtgggatattaatatctaatgtttgggagccatcacattattctaaataatgttttggtgaaaattattgtacatcttttaaaatctgtgtaattttttttcagggaagtgtttaaaacctataacgttgctgtggactacattactgttgcactcc

SEQ ID NO: 441400 - DNA, 780 bp, Homo sapiens
gtgctgtcagccctgctgtcagaccttcttccacagcaaatgagatgtatgcccaaagacggtagaattaaagaagagtaaaatggctgttgaagcactttctgtcctggtattttgtttttgcttttgccacacagtagctcagaatttgaacaaatagccaaaagctggtggttgatgaattatgaactagttgtatcaacacaaagcaagagttggggaaagccatatttaacttggtgagctgtgggagaacctggtggcagaaggagaaccaactgccaaggggaaagagaaggggcctccagcagcgaaggggatacagtgagctaatgatgtcaaggaggagtttcaggttattctcgtcagctccacaaatgggtgctttgtggtctctgcccgcgttacctttcctctcaatgtacctttgtgtgaactgggcagtggaggtgcctgctgcagttaccatggagttcaggctctgggcagctcagtcaggcaaaacacacaaacagccatcagcctgtgtgggctcagggcacctctggacaaaggcttgtggggcataaccttctttaccacagagagcccttagctatgctgatcagaccgtaagcgtttatgagaaacttagtttcctcctgtggctgaggaggggccagctttttcttcttttgcctgctgttttctctcccaatctatgatatgatatgacctggtttggggctgtctttggtgtttagaatatttgttttctgtcccaggatatttcttataaga

SEQ ID NO: 441401 - DNA, 738 bp, Homo sapiens
  misc_feature (456)..(456): n is a, c, g, or t
  misc_feature (731)..(731): n is a, c, g, or t
  misc_feature (733)..(734): n is a, c, g, or t
  misc_feature (736)..(736): n is a, c, g, or t
aagaaaaagaaaattctgtgttggaggtggtaatgtggttggtgatctccattaacactgacctagggcttttgtgtttgttttattgtagaatctataccccattcacagaagataccgagactgtgggccagagagccctgcactcaattctgaatgctgccatcatgatcagtgtcattgttgtcatgactatcctcctggtggttctgtataaatacaggtgctataaggtgagcatgagacacagatctttgctttccaccctgttcttcttatggttgggtattcttgtcacagtaacttaactgatctaggaaagaaaaaatgttttgtcttctagagataagttaatttttagttttcttcctcctcactgtggaacattcaaaaaatacaaaaaggaagccaggtgcatgtgtaatgccaggctcagaggctgaggcaggaggatcncttgggcccaggagttcacaagcagcttgggcaacgtagcaagaccctgcctctattaaagaaaacaaaaaacaaatattggaagtattttatatgcatggaatctatatgtcatgaaaaaattagtgtaaaatatatatattatgattagttatcaagatttagtgataatttatgttattttggatttcaatgcctttttaggccattgtctcaaaaaataaaagcagaaaacaaaaaaagttgtaactgaaaaataaacatttccatataanannanaa

SEQ ID NO: 441402 - DNA, 3776 bp, Homo sapiens
agagatatttgcgattttaacagcattctcttgattgtgatgcagctggttcgcaaataggtaccctaaagaaatgacaggtgttaaatttaggatggccatcgcttgtatgccgggagaagcacacgctgggcccaatttatataggggctttcgtcctcagctcgagcagcctcagaaccccgacaacccacgccagcgctctgggcggattccgtcaggtggggaaggcctggtggagctctgggttctccccgcaatcgtttctccaggccggaggccccgcccccttcctcctggctcctcccctcctccgtgggccggccgccaacgacgccagagccggaaatgacgacaacggtgagggttctcgggcggggcctgggacaggcagctccggggtccgcggtttcacatcggaaacaaaacagcggctggtctggaaggaacctgagctacgagccgcggcggcagcggggcggcggggaagcgtattgtgcgtgatggggagtccgggcaagccaggaaggcaccgcggacatgggcggccgcgggcagggcccggccctttgtggccgcccgggccgcgaaggcggtgtcctaaaagatgaggggcggggcgcggccggttggggctggggaaccccgtgtgggaaaccaggaggggcggcccgtttctcgggcttcgggcgcggccgggtggagagagattccggggagccttggtccggaaatgctgtttgctcgaagacgtctcagggcgcaggtgccttgggccgggattagtagccgtctgaactggagtggagtaggagaaagaggaagcgtcttgggctgggtctgcttgagcaactggtgaaactccgcgcctcacgccccgggtgtgtccttgtccaggggcgacgagcattctgggcgaagtccgcacgcctcttgttcgaggcggaagacggggtctgatgctttctccttggtcgggactgtctcgaggcatgcatgtccagtgactcttgtgtttgctgctgcttccctctcagattcttctcaccgttgtggtcagctctgctttaggcatattaatccatagtggaggctgggatgggtgagagaattgaggtgacttttccataattcagacctaatctgggagcctgcaagtgacaacagcctttgcggtccttagacagcttggcctggaggagaacacatgaaagaaagaacctcaagaggctttgttttctgtgaaacagtatttctatacagttgctccaatgacagagttacctgcaccgttgtcctacttccagaatgcacagatgtctgaggacaaccacctgagcaatactaatgacaatagagaacggcaggagcacaacgacagacggagccttggccaccctgagccattatctaatggacgaccccagggtaactcccggcaggtggtggagcaagatgaggaagaagatgaggagctgacattgaaatatggcgccaagcatgtgatcatgctctttgtccctgtgactctctgcatggtggtggtcgtggctaccattaagtcagtcagcttttatacccggaaggatgggcagctaatctataccccattcacagaagataccgagactgtgggccagagagccctgcactcaattctgaatgctgccatcatgatcagtgtcattgttgtcatgactatcctcctggtggttctgtataaatacaggtgctataaggtcatccatgcctggcttattatatcatctctattgttgctgttctttttttcattcatttacttgggggaagtgtttaaaacctataacgttgctgtggactacattactgttgcactcctgatctggaattttggtgtggtgggaatgatttccattcactggaaaggtccacttcgactccagcaggcatatctcattatgattagtgccctcatggccctggtgtttatcaagtacctccctgaatggactgcgtggctcatcttggctgtgatttcagtatatgatttagtggctgttttgtgtccgaaaggtccacttcgtatgctggttgaaacagctcaggagagaaatgaaacgctttttccagctctcatttactcctcaacaatggtgtggttggtgaatatggcagaaggagacccggaagctcaaaggagagtatccaaaaattccaagtataatgcagaaagcacagaaagggagtcacaagacactgttgcagagaatgatgatggcgggttcagtgaggaatgggaagcccagagggacagtcatctagggcctcatcgctctacacctgagtcacgagctgctgtccaggaactttccagcagtatcctcgctggtgaagacccagaggaaaggggagtaaaacttggattgggagatttcattttctacagtgttctggttggtaaagcctcagcaacagccagtggagactggaacacaaccatagcctgtttcgtagccatattaattggtttgtgccttacattattactccttgccattttcaagaaagcattgccagctcttccaatctccatcacctttgggcttgttttctactttgccacagattatcttgtacagccttttatggaccaattagcattccatcaattttatatctagcatatttgcggttagaatcccatggatgtttcttctttgactataacaaaatctggggaggacaaaggtgattttcctgtgtccacatctaacaaagtcaagattcccggctggacttttgcagcttccttccaagtcttcctgaccaccttgcactattggactttggaaggaggtgcctatagaaaacgattttgaacatacttcatcgcagtggactgtgtccctcggtgcagaaactaccagatttgagggacgaggtcaaggagatatgataggcccggaagttgctgtgccccatcagcagcttgacgcgtggtcacaggacgatttcactgacactgcgaactctcaggactaccgttaccaagaggttaggtgaagtggtttaaaccaaacggaactcttcatcttaaactacacgttgaaaatcaacccaataattctgtattaactgaattctgaacttttcaggaggtactgtgaggaagagcaggcaccagcagcagaatggggaatggagaggtgggcaggggttccagcttccctttgattttttgctgcagactcatcctttttaaatgagacttgttttcccctctctttgagtcaagtcaaatatgtagattgcctttggcaattcttcttctcaagcactgacactcattaccgtctgtgattgccatttcttcccaaggccagtctgaacctgaggttgctttatcctaaaagttttaacctcaggttccaaattcagtaaattttggaaacagtacagctatttctcatcaattctctatcatgttgaagtcaaatttggattttccaccaaattctgaatttgtagacatacttgtacgctcacttgccccagatgcctcctctgtcctcattcttctctcccacacaagcagtctttttctacagccagtaaggcagctctgtcgtggtagcagatggtcccattattctagggtcttactctttgtatgatgaaaagaatgtgttatgaatcggtgctgtcagccctgctgtcagaccttcttccacagcaaatgagatgtatgcccaaagacggtagaattaaagaagagtaaaatggctgttgaagca

SEQ ID NO: 441403 - DNA, 3120 bp, Homo sapiens
ttgtgtcatcttaagcaagtcactgaacttctctggattcccttctccttttgtaaaataagcatgttatctgtccgtcctgccttgggcattgtgataaggataagatgacattatagaattttgcaaaattaaaagcgctagacaaatgattttatgaaaatataaagattaggttgaatttggtcagcatagaaaaaggaatgttgagaacattccttaagattactcagctccctttgctggaaatcagaagtcattaagtatctttgtggttgaaaatgtttggtgtctcaggcggttctacttattgctaaagaggtctaccttgagcttatagtaaatttgtcagttagttgaaagtcgtgacaaattaatacattcctggtttacaaattggtcttataagtatttgattggtttaaatgaatttactaggatttaactaacaatggatgacctggtgaaatcctatttcagacctaatctgggagcctgcaagtgacaacagcctttgcggtccttagacagcttggcctggaggagaacacatgaaagaaagaacctcaagaggctttgttttctgtgaaacagtatttctatacagttgctccaatgacagagttacctgcaccgttgtcctacttccagaatgcacagatgtctgaggacaaccacctgagcaatactaatgacaatagagaacggcaggagcacaacgacagacggagccttggccaccctgagccattatctaatggacgaccccagggtaactcccggcaggtggtggagcaagatgaggaagaagatgaggagctgacattgaaatatggcgccaagcatgtgatcatgctctttgtccctgtgactctctgcatggtggtggtcgtggctaccattaagtcagtcagcttttatacccggaaggatgggcagctaatctataccccattcacagaagataccgagactgtgggccagagagccctgcactcaattctgaatgctgccatcatgatcagtgtcattgttgtcatgactatcctcctggtggttctgtataaatacaggtgctataaggtcatccatgcctggcttattatatcatctctattgttgctgttctttttttcattcatttacttgggggaagtgtttaaaacctataacgttgctgtggactacattactgttgcactcctgatctggaattttggtgtggtgggaatgatttccattcactggaaaggtccacttcgactccagcaggcatatctcattatgattagtgccctcatggccctggtgtttatcaagtacctccctgaatggactgcgtggctcatcttggctgtgatttcagtatatgatttagtggctgttttgtgtccgaaaggtccacttcgtatgctggttgaaacagctcaggagagaaatgaaacgctttttccagctctcatttactcctcaacaatggtgtggttggtgaatatggcagaaggagacccggaagctcaaaggagagtatccaaaaattccaagtataatgcagaaagcacagaaagggagtcacaagacactgttgcagagaatgatgatggcgggttcagtgaggaatgggaagcccagagggacagtcatctagggcctcatcgctctacacctgagtcacgagctgctgtccaggaactttccagcagtatcctcgctggtgaagacccagaggaaaggggagtaaaacttggattgggagatttcattttctacagtgttctggttggtaaagcctcagcaacagccagtggagactggaacacaaccatagcctgtttcgtagccatattaattggtttgtgccttacattattactccttgccattttcaagaaagcattgccagctcttccaatctccatcacctttgggcttgttttctactttgccacagattatcttgtacagccttttatggaccaattagcattccatcaattttatatctagcatatttgcggttagaatcccatggatgtttcttctttgactataacaaaatctggggaggacaaaggtgattttcctgtgtccacatctaacaaagtcaagattcccggctggacttttgcagcttccttccaagtcttcctgaccaccttgcactattggactttggaaggaggtgcctatagaaaacgattttgaacatacttcatcgcagtggactgtgtccctcggtgcagaaactaccagatttgagggacgaggtcaaggagatatgataggcccggaagttgctgtgccccatcagcagcttgacgcgtggtcacaggacgatttcactgacactgcgaactctcaggactaccgttaccaagaggttaggtgaagtggtttaaaccaaacggaactcttcatcttaaactacacgttgaaaatcaacccaataattctgtattaactgaattctgaacttttcaggaggtactgtgaggaagagcaggcaccagcagcagaatggggaatggagaggtgggcaggggttccagcttccctttgattttttgctgcagactcatcctttttaaatgagacttgttttcccctctctttgagtcaagtcaaatatgtagattgcctttggcaattcttcttctcaagcactgacactcattaccgtctgtgattgccatttcttcccaaggccagtctgaacctgaggttgctttatcctaaaagttttaacctcaggttccaaattcagtaaattttggaaacagtacagctatttctcatcaattctctatcatgttgaagtcaaatttggattttccaccaaattctgaatttgtagacatacttgtacgctcacttgccccagatgcctcctctgtcctcattcttctctcccacacaagcagtctttttctacagccagtaaggcagctctgtcgtggtagcagatggtcccattattctagggtcttactctttgtatgatgaaaagaatgtgttatgaatcggtgctgtcagccctgctgtcagaccttcttccacagcaaatgagatgtatgcccaaagacggtagaattaaagaagagtaaaatggctgttgaagca

SEQ ID NO: 441404 - DNA, 3164 bp, Homo sapiens
agagatatttgcgattttaacagcattctcttgattgtgatgcagctggttcgcaaataggtaccctaaagaaatgacaggtgttaaatttaggatggccatcgcttgtatgccgggagaagcacacgctgggcccaatttatataggggctttcgtcctcagctcgagcagcctcagaaccccgacaacccacgccagcgctctgggcggattccgtcaggtggggaaggcctggtggagctctgggttctccccgcaatcgtttctccaggccggaggccccgcccccttcctcctggctcctcccctcctccgtgggccggccgccaacgacgccagagccggaaatgacgacaacggtgagggttctcgggcggggcctgggacaggcagctccggggtccgcggtttcacatcggaaacaaaacagcggctggtctggaaggaacctgagctacgagccgcggcggcagcggggcggcggggaagcgtatacctaatctgggagcctgcaagtgacaacagcctttgcggtccttagacagcttggcctggaggagaacacatgaaagaaagaacctcaagaggctttgttttctgtgaaacagtatttctatacagttgctccaatgacagagttacctgcaccgttgtcctacttccagaatgcacagatgtctgaggacaaccacctgagcaatactaatgacaatagagaacggcaggagcacaacgacagacggagccttggccaccctgagccattatctaatggacgaccccagggtaactcccggcaggtggtggagcaagatgaggaagaagatgaggagctgacattgaaatatggcgccaagcatgtgatcatgctctttgtccctgtgactctctgcatggtggtggtcgtggctaccattaagtcagtcagcttttatacccggaaggatgggcagctaatctataccccattcacagaagataccgagactgtgggccagagagccctgcactcaattctgaatgctgccatcatgatcagtgtcattgttgtcatgactatcctcctggtggttctgtataaatacaggtgctataaggtcatccatgcctggcttattatatcatctctattgttgctgttctttttttcattcatttacttgggggaagtgtttaaaacctataacgttgctgtggactacattactgttgcactcctgatctggaattttggtgtggtgggaatgatttccattcactggaaaggtccacttcgactccagcaggcatatctcattatgattagtgccctcatggccctggtgtttatcaagtacctccctgaatggactgcgtggctcatcttggctgtgatttcagtatatgatttagtggctgttttgtgtccgaaaggtccacttcgtatgctggttgaaacagctcaggagagaaatgaaacgctttttccagctctcatttactcctcaacaatggtgtggttggtgaatatggcagaaggagacccggaagctcaaaggagagtatccaaaaattccaagtataatgcagaaagcacagaaagggagtcacaagacactgttgcagagaatgatgatggcgggttcagtgaggaatgggaagcccagagggacagtcatctagggcctcatcgctctacacctgagtcacgagctgctgtccaggaactttccagcagtatcctcgctggtgaagacccagaggaaaggggagtaaaacttggattgggagatttcattttctacagtgttctggttggtaaagcctcagcaacagccagtggagactggaacacaaccatagcctgtttcgtagccatattaattggtttgtgccttacattattactccttgccattttcaagaaagcattgccagctcttccaatctccatcacctttgggcttgttttctactttgccacagattatcttgtacagccttttatggaccaattagcattccatcaattttatatctagcatatttgcggttagaatcccatggatgtttcttctttgactataacaaaatctggggaggacaaaggtgattttcctgtgtccacatctaacaaagtcaagattcccggctggacttttgcagcttccttccaagtcttcctgaccaccttgcactattggactttggaaggaggtgcctatagaaaacgattttgaacatacttcatcgcagtggactgtgtccctcggtgcagaaactaccagatttgagggacgaggtcaaggagatatgataggcccggaagttgctgtgccccatcagcagcttgacgcgtggtcacaggacgatttcactgacactgcgaactctcaggactaccgttaccaagaggttaggtgaagtggtttaaaccaaacggaactcttcatcttaaactacacgttgaaaatcaacccaataattctgtattaactgaattctgaacttttcaggaggtactgtgaggaagagcaggcaccagcagcagaatggggaatggagaggtgggcaggggttccagcttccctttgattttttgctgcagactcatcctttttaaatgagacttgttttcccctctctttgagtcaagtcaaatatgtagattgcctttggcaattcttcttctcaagcactgacactcattaccgtctgtgattgccatttcttcccaaggccagtctgaacctgaggttgctttatcctaaaagttttaacctcaggttccaaattcagtaaattttggaaacagtacagctatttctcatcaattctctatcatgttgaagtcaaatttggattttccaccaaattctgaatttgtagacatacttgtacgctcacttgccccagatgcctcctctgtcctcattcttctctcccacacaagcagtctttttctacagccagtaaggcagctctgtcgtggtagcagatggtcccattattctagggtcttactctttgtatgatgaaaagaatgtgttatgaatcggtgctgtcagccctgctgtcagaccttcttccacagcaaatgagatgtatgcccaaagacggtagaattaaagaagagtaaaatggctgttgaagcaaaaacaaaaaagaaaaataaaaacaaaaa

SEQ ID NO: 441405 - DNA, 2747 bp, Homo sapiens
  misc_feature (2723)..(2724): n is a, c, g, or t
agagatatttgcgattttaacagcattctcttgattgtgatgcagctggttcgcaaataggtaccctaaagaaatgacaggtgttaaatttaggatggccatcgcttgtatgccgggagaagcacacgctgggcccaatttatataggggctttcgtcctcagctcgagcagcctcagaaccccgacaacccacgccagcgctctgggcggattccgtcaggtggggaaggcctggtggagctctgggttctccccgcaatcgtttctccaggccggaggccccgcccccttcctcctggctcctcccctcctccgtgggccggccgccaacgacgccagagccggaaatgacgacaacggtgagggttctcgggcggggcctgggacaggcagctccggggtccgcggtttcacatcggaaacaaaacagcggctggtctggaaggaacctgagctacgagccgcggcggcagcggggcggcggggaagcgtatacctaatctgggagcctgcaagtgacaacagcctttgcggtccttagacagcttggcctggaggagaacacatgaaagaaagaacctcaagaggctttgttttctgtgaaacagtatttctatacagttgctccaatgacagagttacctgcaccgttgtcctacttccagaatgcacagatgtctgaggacaaccacctgagcaatactaatgacaatagagaacggcaggagcacaacgacagacggagccttggccaccctgagccattatctaatggacgaccccagggtaactcccggcaggtggtggagcaagatgaggaagaagatgaggagctgacattgaaatatggcgccaagcatgtgatcatgctctttgtccctgtgactctctgcatggtggtggtcgtggctaccattaagtcagtcagcttttatacccggaaggatgggcagctaatctataccccattcacagaagataccgagactgtgggccagagagccctgcactcaattctgaatgctgccatcatgatcagtgtcattgttgtcatgactatcctcctggtggttctgtataaatacaggtgctataaggtcatccatgcctggcttattatatcatctctattgttgctgttctttttttcattcatttacttgggggaagtgtttaaaacctataacgttgctgtggactacattactgttgcactcctgatctggaattttggtgtggtgggaatgatttccattcactggaaaggtccacttcgactccagcaggcatatctcattatgattagtgccctcatggccctggtgtttatcaagtacctccctgaatggactgcgtggctcatcttggctgtgatttcagtatatgatttagtggctgttttgtgtccgaaaggtccacttcgtatgctggttgaaacagctcaggagagaaatgaaacgctttttccagctctcatttactcctcaacaatggtgtggttggtgaatatggcagaaggagacccggaagctcaaaggagagtatccaaaaattccaagtataatgcagaaagcacagaaagggagtcacaagacactgttgcagagaatgatgatggcgggttcagtgaggaatgggaagcccagagggacagtcatctagggcctcatcgctctacacctgagtcacgagctgctgtccaggaactttccagcagtatcctcgctggtgaagacccagaggaaaggggagtaaaacttggattgggagatttcattttctacagtgttctggttggtaaagcctcagcaacagccagtggagactggaacacaaccatagcctgtttcgtagccatattaattggtttgtgccttacattattactccttgccattttcaagaaagcattgccagctcttccaatctccatcacctttgggcttgttttctactttgccacagattatcttgtacagccttttatggaccaattagcattccatcaattttatatctagcatatttgcggttagaatcccatggatgtttcttctttgactataacaaaatctggggaggacaaaggtgattttcctgtgtccacatctaacaaagtcaagattcccggctggacttttgcagcttccttccaagtcttcctgaccaccttgcactattggactttggaaggaggtgcctatagaaaacgattttgaacatacttcatcgcagtggactgtgtccctcggtgcagaaactaccagatttgagggacgaggtcaaggagatatgataggcccggaagttgctgtgccccatcagcagcttgacgcgtggtcacaggacgatttcactgacactgcgaactctcaggactaccgttaccaagaggttaggtgaagtggtttaaaccaaacggaactcttcatcttaaactacacgttgaaaatcaacccaataattctgtattaactgaattctgaacttttcaggaggtactgtgaggaagagcaggcaccagcagcagaatggggaatggagaggtgggcaggggttccagcttccctttgattttttgctgcagactcatcctttttaaatgagacttgttttcccctctctttgagtcaagtcaaatatgtagattgcctttggcaattcttcttctcaagcactgacactcattaccgtctgtgattgccatttcttcctgcctganntgggatcctctagatcaccatcc

SEQ ID NO: 441406 - DNA, 1884 bp, Homo sapiens
gttttgtgatagcaggtgcagtttgagtactacagtaaacattcagtttcagaacttcttctcttacctgctaaaaccaaagagaaccttttttttatttttacttctgattgttgaacagtcttaaggcagcattaggaagactggcgatttgtgtggagaaatgatggcttgttgttgtctatgcatactttgtgtgtccagtgcttacctggaattttgtctttcccaacagcaacaatggtgtggttggtgaatatggcagaaggagacccggaagctcaaaggagagtatccaaaaattccaagtataatgcagaaagcacagaaagggagtcacaagacactgttgcagagaatgatgatggcgggttcagtgaggaatgggaagcccagagggacagtcatctagggcctcatcgctctacacctgagtcacgagctgctgtccaggaactttccagcagtatcctcgctggtgaagacccagaggaaaggggagtaaaacttggattgggagatttcattttctacagtgttctggttggtaaagcctcagcaacagccagtggagactggaacacaaccatagcctgtttcgtagccatattaattggtttgtgccttacattattactccttgccattttcaagaaagcattgccagctcttccaatctccatcacctttgggcttgttttctactttgccacagattatcttgtacagccttttatggaccaattagcattccatcaattttatatctagcatatttgcggttagaatcccatggatgtttcttctttgactataacaaaatctggggaggacaaaggtgattttcctgtgtccacatctaacaaagtcaagattcccggctggacttttgcagcttccttccaagtcttcctgaccaccttgcactattggactttggaaggaggtgcctatagaaaacgattttgaacatacttcatcgcagtggactgtgtccctcggtgcagaaactaccagatttgagggacgaggtcaaggagatatgataggcccggaagttgctgtgccccatcagcagcttgacgcgtggtcacaggacgatttcactgacactgcgaactctcaggactaccgttaccaagaggttaggtgaagtggtttaaaccaaacggaactcttcatcttaaactacacgttgaaaatcaacccaataattctgtattaactgaattctgaacttttcaggaggtactgtgaggaagagcaggcaccagcagcagaatggggaatggagaggtgggcaggggttccagcttccctttgattttttgctgcagactcatcctttttaaatgagacttgttttcccctctctttgagtcaagtcaaatatgtagattgcctttggcaattcttcttctcaagcactgacactcattaccgtctgtgattgccatttcttcccaaggccagtctgaacctgaggttgctttatcctaaaagttttaacctcaggttccaaattcagtaaattttggaaacagtacagctatttctcatcaattctctatcatgttgaagtcaaatttggattttccaccaaattctgaatttgtagacatacttgtacgctcacttgccccagatgcctcctctgtcctcattcttctctcccacacaagcagtctttttctacagccagtaaggcagctctgtcgtggtagcagatggtcccattattctagggtcttactctttgtatgatgaaaagaatgtgttatgaatcggtgctgtcagccctgctgtcagaccttcttccacagcaaatgagatgtatgcccaaagacggtagaattaaagaagagtaaaatggctgttgaagca

SEQ ID NO: 441407 - DNA, 1603 bp, Homo sapiens
  misc_feature (1321)..(1321): n is a, c, g, or t
  misc_feature (1596)..(1596): n is a, c, g, or t
  misc_feature (1598)..(1599): n is a, c, g, or t
  misc_feature (1601)..(1601): n is a, c, g, or t
agagatatttgcgattttaacagcattctcttgattgtgatgcagctggttcgcaaataggtaccctaaagaaatgacaggtgttaaatttaggatggccatcgcttgtatgccgggagaagcacacgctgggcccaatttatataggggctttcgtcctcagctcgagcagcctcagaaccccgacaacccacgccagcgctctgggcggattccgtcaggtggggaaggcctggtggagctctgggttctccccgcaatcgtttctccaggccggaggccccgcccccttcctcctggctcctcccctcctccgtgggccggccgccaacgacgccagagccggaaatgacgacaacggtgagggttctcgggcggggcctgggacaggcagctccggggtccgcggtttcacatcggaaacaaaacagcggctggtctggaaggaacctgagctacgagccgcggcggcagcggggcggcggggaagcgtatacctaatctgggagcctgcaagtgacaacagcctttgcggtccttagacagcttggcctggaggagaacacatgaaagaaagaacctcaagaggctttgttttctgtgaaacagtatttctatacagttgctccaatgacagagttacctgcaccgttgtcctacttccagaatgcacagatgtctgaggacaaccacctgagcaatactaatgacaatagagaacggcaggagcacaacgacagacggagccttggccaccctgagccattatctaatggacgaccccagggtaactcccggcaggtggtggagcaagatgaggaagaagatgaggagctgacattgaaatatggcgccaagcatgtgatcatgctctttgtccctgtgactctctgcatggtggtggtcgtggctaccattaagtcagtcagcttttatacccggaaggatgggcagctaatctataccccattcacagaagataccgagactgtgggccagagagccctgcactcaattctgaatgctgccatcatgatcagtgtcattgttgtcatgactatcctcctggtggttctgtataaatacaggtgctataaggtgagcatgagacacagatctttgctttccaccctgttcttcttatggttgggtattcttgtcacagtaacttaactgatctaggaaagaaaaaatgttttgtcttctagagataagttaatttttagttttcttcctcctcactgtggaacattcaaaaaatacaaaaaggaagccaggtgcatgtgtaatgccaggctcagaggctgaggcaggaggatcncttgggcccaggagttcacaagcagcttgggcaacgtagcaagaccctgcctctattaaagaaaacaaaaaacaaatattggaagtattttatatgcatggaatctatatgtcatgaaaaaattagtgtaaaatatatatattatgattagttatcaagatttagtgataatttatgttattttggatttcaatgcctttttaggccattgtctcaaaaaataaaagcagaaaacaaaaaaagttgtaactgaaaaataaacatttccatataanannanaa

SEQ ID NO: 441408 - DNA, 1041 bp, Homo sapiens
cgacccggcccagtgcgcaggcgcgggaaagttgaactaataaagtttgtacgagttcagtggaggagaccgcaagttgagtggaggaggcggcggtggggccccggaccaggtgcctccatggcaggctctgaagagctggggctccgggaagacacgctgagggtcctagctgccttccttaggcgtggtgaggctgccgggtctcctgttccaactccacctagaagccctgcccaagaagagccaacagacttcctgagccgccttcgaagatgtcttccctgctccctggggcgaggagcagccccctctgagtcccctcggccttgctctctgcccatccgcccctgctatggtttagagcctggcccagctactccagacttctatgctttggtggcccagcggctggaacagctggtccaagagcagctgaaatctccgcccagcccagaattacagggtcccccatcgacagagaaggaagccatactgcggaggctggtggccctgctggaggaggaggcagaagtcattaaccagaagctggcctcggaccccgccctgcgcagcaagctggtccgcctgtcctccgactctttcgcccgcctggtggagctgttctgtagccgggatgacagctctcgcccaagccgagcatgccccgggcccccgcctccttccccggagcccctggcccgcctggccctagccatggagctgagccggcgcgtggccgggctggggggcaccctggccggactcagcgtggagcacgtgcacagcttcacgccctggatccaggcccacgggggctgggagggcatcctggctgtttcacccgtggacttgaacttgccattggactgagctctttctcagaagctgctacaagatgacacctcatgtccctgccctcttcgtgtgcttttccaagtcttcctattccactcagggctgtggggtggtggttgccctacctgtttttgccaaaaataaattgtttaaaacttttcttattaaaaacgttacaaagta

SEQ ID NO: 441409 - DNA, 574 bp, Homo sapiens
cgacccggcccagtgcgcaggcgcgggaaagttgaactaataaagtttgtacgagttcagtggaggagaccgcaagttgagtggaggaggcggcggtggggccccggaccaggtgcctccatggcaggctctgaagagctggggctccgggaagacacgctgagggtcctagctgccttccttaggcgtggtgaggctgccgggtctcctgttccaactccacctagaagccctgcccaagaagagccaacagacttcctgagccgccttcgaagatgtcttccctgctccctggggcgaggacgtggagcacgtgcacagcttcacgccctggatccaggcccacgggggctgggagggcatcctggctgtttcacccgtggacttgaacttgccattggactgagctctttctcagaagctgctacaagatgacacctcatgtccctgccctcttcgtgtgcttttccaagtcttcctattccactcagggctgtggggtggtggttgccctacctgtttttgccaaaaataaattgtttaaaacttttcttattaaaaacgttacaaagta

SEQ ID NO: 441410 - DNA, 312 bp, Homo sapiens
ccggtttcagagttggattgggctccagcgtgctggccctgtggcttggcgactgtcgcagtctccctgagcggcactctccccactggtccagagggcatcctggctgtttcacccgtggacttgaacttgccattggactgagctctttctcagaagctgctacaagatgacacctcatgtccctgccctcttcgtgtgcttttccaagtcttcctattccactcagggctgtggggtggtggttgccctacctgtttttgccaaaaataaattgtttaaaacttttcttattaaaaacgttacaaagta

SEQ ID NO: 441411 - DNA, 668 bp, Homo sapiens
cgacccggcccagtgcgcaggcgcgggaaagttgaactaataaagtttgtacgagttcagtggaggagaccgcaagttgagtggaggaggcggcggtggggccccggaccaggtgcctccatggcaggctctgaagagctggggctccgggaagacacgctgagggtcctagctgccttccttaggcgtggtgaggctgccgggtctcctgttccaactccacctagaagccctgcccaagaagagccaacagacttcctgagccgccttcgaagatgtcttccctgctccctggggcgaggacgcctccttccccggagcccctggcccgcctggccctagccatggagctgagccggcgcgtggccgggctggggggcaccctggccggactcagcgtggagcacgtgcacagcttcacgccctggatccaggcccacgggggctgggagggcatcctggctgtttcacccgtggacttgaacttgccattggactgagctctttctcagaagctgctacaagatgacacctcatgtccctgccctcttcgtgtgcttttccaagtcttcctattccactcagggctgtggggtggtggttgccctacctgtttttgccaaaaataaattgtttaaaacttttcttattaaaaacgttacaaagta

SEQ ID NO: 441412 - DNA, 886 bp, Homo sapiens
gcttgactacactgtgtggagcaagttttaaagaagcaaaggactcagaattcatgattgaagaaatgcaagtgatccacccacctcggcctcccaaagtgctggaattacaggctgagctaccacgcctggacaatttcttaaaaaatttttttaaagtaggattgatagcagatgagttttctcggtgggccaggtcctctgctagggatttcaatggaatgatcccatttaaacccactacaacctcatggggctcttattgtcctcgtcttgtgggggcagagaggaaaagtccccagcatgcagagtgttggaatctggatttgtacacaaagccacgactctgaattgttcaaatcccaagactctcttccccatctctgactctgtcccccaactcttcactctctctggatctctgtctaatcccactccagtgtcctgaccctcctcgagctcaacctttcctcctcctgctaggaccctgccccctcatccctgtgcccttctgtctgggtctctgtccccttgtctgggtgtctgtcaccctccgctctctggttcctcgccttcccgtctctaatctcacagggctgatgtggacgctgctgtatggggggaacacctgccctgctcacagggctctgccacttttcccttccaggagggcatcctggctgtttcacccgtggacttgaacttgccattggactgagctctttctcagaagctgctacaagatgacacctcatgtccctgccctcttcgtgtgcttttccaagtcttcctattccactcagggctgtggggtggtggttgccctacctgtttttgccaaaaataaattgtttaaaacttttcttattaaaaacgttacaaagta

SEQ ID NO: 441413 - DNA, 625 bp, Homo sapiens
cgacccggcccagtgcgcaggcgcgggaaagttgaactaataaagtttgtacgagttcagtggaggagaccgcaagttgagtggaggaggcggcggtggggccccggaccaggtgcctccatggcaggctctgaagagctggggctccgggaagacacgctgagggtcctagctgccttccttaggcgtggtgaggctgccgggtctcctgttccaactccacctaggcccagctactccagacttctatgctttggtggcccagcggctggaacagctggtccaagagcagctgaaatctccgcccagcccagaattacagggtcccccatcgacagagaaggaagccatactgcggaggctggtggccctgctggaggaggaggcagaagtcattaaccagaaggagggcatcctggctgtttcacccgtggacttgaacttgccattggactgagctctttctcagaagctgctacaagatgacacctcatgtccctgccctcttcgtgtgcttttccaagtcttcctattccactcagggctgtggggtggtggttgccctacctgtttttgccaaaaataaattgtttaaaacttttcttattaaaaacgttacaaagta

SEQ ID NO: 441414 - DNA, 898 bp, Homo sapiens
cgacccggcccagtgcgcaggcgcgggaaagttgaactaataaagtttgtacgagttcagtggaggagaccgcaagttgagtggaggaggcggcggtggggccccggaccaggtgcctccatggcaggctctgaagagctggggctccgggaagacacgctgagggtcctagctgccttccttaggcgtggtgaggctgccgggtctcctgttccaactccacctaggcccagctactccagacttctatgctttggtggcccagcggctggaacagctggtccaagagcagctgaaatctccgcccagcccagaattacagggtcccccatcgacagagaaggaagccatactgcggaggctggtggccctgctggaggaggaggcagaagtcattaaccagaagctggcctcggaccccgccctgcgcagcaagctggtccgcctgtcctccgactctttcgcccgcctggtggagctgttctgtagccgggatgacagctctcgcccaagccgagcatgccccgggcccccgcctccttccccggagcccctggcccgcctggccctagccatggagctgagccggcgcgtggccgggctggggggcaccctggccggactcagcgtggagcacgtgcacagcttcacgccctggatccaggcccacgggggctgggagggcatcctggctgtttcacccgtggacttgaacttgccattggactgagctctttctcagaagctgctacaagatgacacctcatgtccctgccctcttcgtgtgcttttccaagtcttcctattccactcagggctgtggggtggtggttgccctacctgtttttgccaaaaataaattgtttaaaacttttcttattaaaaacgttacaaagta

SEQ ID NO: 441415 - DNA, 852 bp, Homo sapiens
  misc_feature (292)..(292): n is a, c, g, or t
gctcgtggcgtctgctgtggccccggcccaggtgcctccttgcgcaggctctgtgtagctggtgctccctgtagacacgtctgatggtcctctctgccttccttagtgcgtgtgtgagcgctgcctggagtcctccatgttccgctctcctatgctatcttcgctgacccgaaacatagccactgatagctgtccatgatccgcgcttcgaagatatgttttcccgtgacttcccatggcgtgccgaggtagcagtctcccatctgtagatcgccgctcgtgaccgttgttntcatctgtacgccatgtccgtacctgcctggctagtggttgtataaaggtctctggtcccacatcgtaacttactcgataactatcgtaatagcttattgtgtcggcccggacgctgcattggatacaagctggtcccaagagcagcttgaaatctccgcccagcccagaattacagggtcccccatcgacagagaaggaagccatactgcggaggctggtggccctgctggaggaggaggcagaagtcattaaccagaagctggcctcggaccccgccctgcgcagcaagctggtccgcctgtcctccgactctttcgcccgcctggtggagctgttctgtagccgggatgacagctctcgcccaagccgagcatgccccgggcccccgcctccttccccggagcccctggcccgcctggccctagccatggagctgagccggcgcgtggccgggctggggggcaccctggccggactcagcgtggagcacgtgcacagcttcacgccctggatccaggcccacgggggctgggtgagccgctgaagcctctctctccg

SEQ ID NO: 441416 - DNA, 768 bp, Homo sapiens
cgacccggcccagtgcgcaggcgcgggaaagttgaactaataaagtttgtacgagttcagtggaggagaccgcaagttgagtggaggaggcggcggtggggccccggaccaggtgcctccatggcaggctctgaagagctggggctccgggaagacacgctgagggtcctagctgccttccttaggcgtggtgaggctgccgggtctcctgttccaactccacctagaagccctgcccaagaagagccaacagacttcctgagccgccttcgaagatgtcttccctgctccctggggcgaggagcagccccctctgagtcccctcggccttgctctctgcccatccgcccctgctatggtttagagcctggcccagctactccagacttctatgctttggtggcccagcggctggaacagctggtccaagagcagctgaaatctccgcccagcccagaattacagggtcccccatcgacagagaaggaagccatactgcggaggctggtggccctgctggaggaggaggcagaagtcattaaccagaaggagggcatcctggctgtttcacccgtggacttgaacttgccattggactgagctctttctcagaagctgctacaagatgacacctcatgtccctgccctcttcgtgtgcttttccaagtcttcctattccactcagggctgtggggtggtggttgccctacctgtttttgccaaaaataaattgtttaaaacttttcttattaaaaacgttacaaagta

SEQ ID NO: 441417 - DNA, 1568 bp, Homo sapiens
ggcggggccggcgagggctgcctctggggggtccgctagtcgcggggcggcggcggcggctgcgggcgcgaggttcccagcaggatgccccggctctgcaggaagctgaagtgagaggcccggagagggcccagcccgcccggggcaggatgaccaaggcccggctgttccggctgtggctggtgctggggtcggtgttcatgatcctgctgatcatcgtgtactgggacagcgcaggcgccgcgcacttctacttgcacacgtccttctctaggccgcacacggggccgccgctgcccacgcccgggccggacagggacagggagctcacggccgactccgatgtcgacgagtttctggacaagtttctcagtgctggcgtgaagcagagcgaccttcccagaaaggagacggagcagccgcctgcgccggggagcatggaggagagcgtgagaggctacgactggtccccgcgcgacgcccggcgcagcccagaccagggccggcagcaggcggagcggaggagcgtgctgcggggcttctgcgccaactccagcctggccttccccaccaaggagcgcgcattcgacgacatccccaactcggagctgagccacctgatcgtggacgaccggcacggggccatctactgctacgtgcccaaggtggcctgcaccaactggaagcgcgtgatgatcgtgctgagcggaagcctgctgcaccgcggtgcgccctaccgcgacccgctgcgcatcccgcgcgagcacgtgcacaacgccagcgcgcacctgaccttcaacaagttctggcgccgctacgggaagctctcccgccacctcatgaaggtcaagctcaagaagtacaccaagttcctcttcgtgcgcgaccccttcgtgcgcctgatctccgccttccgcagcaagttcgagctggagaacgaggagttctaccgcaagttcgccgtgcccatgctgcggctgtacgccaaccacaccagcctgcccgcctcggcgcgcgaggccttccgcgctggcctcaaggtgtccttcgccaacttcatccagtacctgctggacccgcacacggagaagctggcgcccttcaacgagcactggcggcaggtgtaccgcctctgccacccgtgccagatcgactacgacttcgtggggaagctggagactctggacgaggacgccgcgcagctgctgcagctactccaggtggaccggcagctccgcttccccccgagctaccggaacaggaccgccagcagctgggaggaggactggttcgccaagatccccctggcctggaggcagcagctgtataaactctacgaggccgactttgttctcttcggctaccccaagcccgaaaacctcctccgagactgaaagctttcgcgttgctttttctcgcgtgcctggaacctgacgcacgcgcactccagtttttttatgacctacgattttgcaatctgggcttcttgttcactccactgcctctatccattgagtactgtatcgatattgttttttaagattaatatatttcaggtatttaatacg

SEQ ID NO: 441418 - DNA, 2283 bp, Homo sapiens
cgtggcctatcaatgttgtattttagcttgtgcccgtcggcttacaatttgcaagctgctgggcgcgaggttcccagcaggatgccccggctctgcaggaagctgaagtgagaggcccggagagggcccagcccgcccggggcaggatgaccaaggcccggctgttccggctgtggctggtgctggggtcggtgttcatgatcctgctgatcatcgtgtactgggacagcgcaggcgccgcgcacttctacttgcacacgtccttctctaggccgcacacggggccgccgctgcccacgcccgggccggacagggacagggagctcacggccgactccgatgtcgacgagtttctggacaagtttctcagtgctggcgtgaagcagagcgaccttcccagaaaggagacggagcagccgcctgcgccggggagcatggaggagagcgtgagaggctacgactggtccccgcgcgacgcccggcgcagcccagaccagggccggcagcaggcggagcggaggagcgtgctgcggggcttctgcgccaactccagcctggccttccccaccaaggagcgcgcattcgacgacatccccaactcggagctgagccacctgatcgtggacgaccggcacggggccatctactgctacgtgcccaaggtggcctgcaccaactggaagcgcgtgatgatcgtgctgagcggaagcctgctgcaccgcggtgcgccctaccgcgacccgctgcgcatcccgcgcgagcacgtgcacaacgccagcgcgcacctgaccttcaacaagttctggcgccgctacgggaagctctcccgccacctcatgaaggtcaagctcaagaagtacaccaagttcctcttcgtgcgcgaccccttcgtgcgcctgatctccgccttccgcagcaagttcgagctggagaacgaggagttctaccgcaagttcgccgtgcccatgctgcggctgtacgccaaccacaccagcctgcccgcctcggcgcgcgaggccttccgcgctggcctcaaggtgtccttcgccaacttcatccagtacctgctggacccgcacacggagaagctggcgcccttcaacgagcactggcggcaggtgtaccgcctctgccacccgtgccagatcgactacgacttcgtggggaagctggagactctggacgaggacgccgcgcagctgctgcagctactccaggtggaccggcagctccgcttccccccgagctaccggaacaggaccgccagcagctgggaggaggactggttcgccaagatccccctggcctggaggcagcagctgtataaactctacgaggccgactttgttctcttcggctaccccaagcccgaaaacctcctccgagactgaaagctttcgcgttgctttttctcgcgtgcctggaacctgacgcacgcgcactccagtttttttatgacctacgattttgcaatctgggcttcttgttcactccactgcctctatccattgagtactgtatcgatattgttttttaagattaatatatttcaggtatttaatacgaaatgtggaagggaatgctggagtaaaatatcccctctcccctccgcccgcccacccgcccgcccgctcgcccgctcgcccgctcctgtggtttttctgagcgtgcgggcgccgggaggggatgctgaggctgatggagctgcctccagggctagggccactcaccggaggagggcggggcctgcacttgaagtcaggccgcacctgtctgtttttggaagggtagccgacaaatccttccagagggaaagttctttgtttaagtgttgtacttgaaaaggtcaatcttcagggcttcctgtttgaagtcaagtcagaggtaaaccggtcagttacagaagcaggatttctaggatttctaactccagctgttcccatactgtctagtttaaattatggctgttaaggccgggcgggtgactcaggcaggtaatcccagaactttgggaggcccagacagaaggatcgcttgaggtcaggaatttgagacctggccaacatggtgaaaccctgtctctactaaaaaaaaaaaaaaaaaatgagtcgggtgtggtggtgtgcacctgtagtcccagctactcaggagttctgagatggaaagattgcttgaacccaggaggcagaggctgcagtgagctgagatcgcgacattgcactctagcctgggtgacagagtgagattccatctcaaaataaataaataaatattaatacatta

SEQ ID NO: 441419 - DNA, 2286 bp, Homo sapiens
ggcggggccggcgagggctgcctctggggggtccgctagtcgcggggcggcggcggcggctgcgggcgcgaggttcccagcaggatgccccggctctgcaggaagctgaagtgagaggcccggagagggcccagcccgcccggggcaggatgaccaaggcccggctgttccggctgtggctggtgctggggtcggtgttcatgatcctgctgatcatcgtgtactgggacagcgcaggcgccgcgcacttctacttgcacacgtccttctctaggccgcacacggggccgccgctgcccacgcccgggccggacagggacagggagctcacggccgactccgatgtcgacgagtttctggacaagtttctcagtgctggcgtgaagcagagcgaccttcccagaaaggagacggagcagccgcctgcgccggggagcatggaggagagcgtgagaggctacgactggtccccgcgcgacgcccggcgcagcccagaccagggccggcagcaggcggagcggaggagcgtgctgcggggcttctgcgccaactccagcctggccttccccaccaaggagcgcgcattcgacgacatccccaactcggagctgagccacctgatcgtggacgaccggcacggggccatctactgctacgtgcccaaggtggcctgcaccaactggaagcgcgtgatgatcgtgctgagcggaagcctgctgcaccgcggtgcgccctaccgcgacccgctgcgcatcccgcgcgagcacgtgcacaacgccagcgcgcacctgaccttcaacaagttctggcgccgctacgggaagctctcccgccacctcatgaaggtcaagctcaagaagtacaccaagttcctcttcgtgcgcgaccccttcgtgcgcctgatctccgccttccgcagcaagttcgagctggagaacgaggagttctaccgcaagttcgccgtgcccatgctgcggctgtacgccaaccacaccagcctgcccgcctcggcgcgcgaggccttccgcgctggcctcaaggtgtccttcgccaacttcatccagtacctgctggacccgcacacggagaagctggcgcccttcaacgagcactggcggcaggtgtaccgcctctgccacccgtgccagatcgactacgacttcgtggggaagctggagactctggacgaggacgccgcgcagctgctgcagctactccaggtggaccggcagctccgcttccccccgagctaccggaacaggaccgccagcagctgggaggaggactggttcgccaagatccccctggcctggaggcagcagctgtataaactctacgaggccgactttgttctcttcggctaccccaagcccgaaaacctcctccgagactgaaagctttcgcgttgctttttctcgcgtgcctggaacctgacgcacgcgcactccagtttttttatgacctacgattttgcaatctgggcttcttgttcactccactgcctctatccattgagtactgtatcgatattgttttttaagattaatatatttcaggtatttaatacgaaatgtggaagggaatgctggagtaaaatatcccctctcccctccgcccgcccacccgcccgcccgctcgcccgctcgcccgctcctgtggtttttctgagcgtgcgggcgccgggaggggatgctgaggctgatggagctgcctccagggctagggccactcaccggaggagggcggggcctgcacttgaagtcaggccgcacctgtctgtttttggaagggtagccgacaaatccttccagagggaaagttctttgtttaagtgttgtacttgaaaaggtcaatcttcagggcttcctgtttgaagtcaagtcagaggtaaaccggtcagttacagaagcaggatttctaggatttctaactccagctgttcccatactgtctagtttaaattatggctgttaaggccgggcgggtgactcaggcaggtaatcccagaactttgggaggcccagacagaaggatcgcttgaggtcaggaatttgagacctggccaacatggtgaaaccctgtctctactaaaaaaaaaaaaaaaaaatgagtcgggtgtggtggtgtgcacctgtagtcccagctactcaggagttctgagatggaaagattgcttgaacccaggaggcagaggctgcagtgagctgagatcgcgacattgcactctagcctgggtgacagagtgagattccatctcaaaataaataaataaatattaatacatta

SEQ ID NO: 441420 - DNA, 3625 bp, Homo sapiens
tgtctggggctgaggggaggcccggagcctttctggggcctgggggatcctcttgcactggtgggtggagagaagcgcctgcagccaaccagggtcaggctgtgctcacagtttcctctggcggcatgtaaaggctccacaaaggagttgggagttcaaatgaggctgctgcggacggcctgaggatggaccccaagccctggacctgccgagcgtggcactgaggcagcggctgacgctactgtgagggaaagaaggttgtgagcagccccgcaggacccctggccagccctggccccagcctctgccggagccctctgtggaggcagagccagtggagcccagtgaggcagggctgcttggcagccaccggcctgcaactcaggaacccctccagaggccatggacaggctgccccgctgacggccagggtgaagcatgtgaggagccgccccggagccaagcaggagggaagaggctttcatagattctattcacaaagaataaccaccattttgcaaggaccatgaggccactgtgcgtgacatgctggtggctcggactgctggctgccatgggagctgttgcaggccaggaggacggttttgagggcactgaggagggctcgccaagagagttcatttacctaaacaggtacaagcgggcgggcgagtcccaggacaagtgcacctacaccttcattgtgccccagcagcgggtcacgggtgccatctgcgtcaactccaaggagcctgaggtgcttctggagaaccgagtgcataagcaggagctagagctgctcaacaatgagctgctcaagcagaagcggcagatcgagacgctgcagcagctggtggaggtggacggcggcattgtgagcgaggtgaagctgctgcgcaaggagagccgcaacatgaactcgcgggtcacgcagctctacatgcagctcctgcacgagatcatccgcaagcgggacaacgcgttggagctctcccagctggagaacaggatcctgaaccagacagccgacatgctgcagctggccagcaagtacaaggacctggagcacaagtaccagcacctggccacactggcccacaaccaatcagagatcatcgcgcagcttgaggagcactgccagagggtgccctcggccaggcccgtcccccagccaccccccgctgccccgccccgggtctaccaaccacccacctacaaccgcatcatcaaccagatctctaccaacgagatccagagtgaccagaacctgaaggtgctgccaccccctctgcccactatgcccactctcaccagcctcccatcttccaccgacaagccgtcgggcccatggagagactgcctgcaggccctggaggatggccacgacaccagctccatctacctggtgaagccggagaacaccaaccgcctcatgcaggtgtggtgcgaccagagacacgaccccgggggctggaccgtcatccagagacgcctggatggctctgttaacttcttcaggaactgggagacgtacaagcaagggtttgggaacattgacggcgaatactggctgggcctggagaacatttactggctgacgaaccaaggcaactacaaactcctggtgaccatggaggactggtccggccgcaaagtctttgcagaatacgccagtttccgcctggaacctgagagcgagtattataagctgcggctggggcgctaccatggcaatgcgggtgactcctttacatggcacaacggcaagcagttcaccaccctggacagagatcatgatgtctacacaggaaactgtgcccactaccagaagggaggctggtggtataacgcctgtgcccactccaacctcaacggggtctggtaccgcgggggccattaccggagccgctaccaggacggagtctactgggctgagttccgaggaggctcttactcactcaagaaagtggtgatgatgatccgaccgaaccccaacaccttccactaagccagctccccctcctgacctctcgtggccattgccaggagcccaccctggtcacgctggccacagcacaaagaacaactcctcaccagttcatcctgaggctgggaggaccgggatgctggattctgttttccgaagtcactgcagcggatgatggaactgaatcgatacggtgttttctgtccctcctactttccttcacaccagacagcccctcatgtctccaggacaggacaggactacagacaactctttctttaaataaattaagtctctacaataaaaacacaactgcaaagtaccttcataatatacatgtgtatgagcctcccttgtgcacgtatgtgtataccacatatatatgcatttagatatacatcacatgtgatatatctagatccatatataggtttgccttagatacctaaatacacatatattcagttctcagatgttgaagctgtcaccagcagctttgctcttaggagaaaagcatttcattagtgttgtattacttgagtctaagggtagatcacagactgtgtggtctcaactgaaaggatcacccttggcatctgtgtgcctggattcttccagaatgtctacaatgctaatctctcacatagaggttcccagcttcttaagaaccccttttggcacctaatcaaatttcaaaatccctccccccacattttcatacttttccccattctcaggacttttcaccatccatcacccacttatcccttcatttgacaccattcattaagtgccttctgtgtgtcagtccctggccactcactgcagttcaaggccccctttccgctctgctgtactcctcgcctacctactccttgccttttctgtcgcacagccccttctttccaggcgagattcctcagcttctgagtaggaaacactccgggctccaggtttctggttgggaagggaaggccaggccaaaagctccaccggccgtatagataatgtactcgcagttttgtatcttccattcatactttaacctacaggtcatttgagtcttcacacaaataataacctatctggccaggagaattatctcagaacagaagtcatcagatcatcagagcccccagatggctacagaccagagattccacgctctcaggctgactagagtccgcatctcatctccaaactacacttccctggagaacaagtgccacaaaaatgaaaacaggccacttctcaggagttgaataatcaggggtcaccggaccccttggttgatgcactgcagcatggtggctttctgagtcctgttggccaccaagtgtcagcctcagcactcccgggactattgccaagaaggggcaagggatgagtcaagaaggtgagacccttcccggtgggcacgtgggccaggctgtgtgagatgttggatgtttggtactgtccatgtctgggtgtgtgcctattacctcagcatttctcacaaagtgtaccatgtagcatgttttgtgtatataaaagggagggtttttttaaaaatatattcccagattatccttgtaatgacacgaatctgcaataaaagccatcagtgctatttggatgtatctacaaaaaaaaata

SEQ ID NO: 441421 - DNA, 3610 bp, Homo sapiens
tgtctggggctgaggggaggcccggagcctttctggggcctgggggatcctcttgcactggtgggtggagagaagcgcctgcagccaaccagggtcaggctgtgctcacagtttcctctggcggcatgtaaaggctccacaaaggagttgggagttcaaatgaggctgctgcggacggcctgaggatggaccccaagccctggacctgccgagcgtggcactgaggcagcggctgacgctactgtgagggaaagaaggttgtgagcagccccgcaggacccctggccagccctggccccagcctctgccggagccctctgtggaggcagagccagtggagcccagtgaggcagggctgcttggcagccaccggcctgcaactcaggaacccctccagaggccatggacaggctgccccgctgacggccagggtgaagcatgtgaggagccgccccggagccaagcaggagggaagaggctttcatagattctattcacaaagaataaccaccattttgcaaggaccatgaggccactgtgcgtgacatgctggtggctcggactgctggctgccatgggagctgttgcaggccaggaggacggttttgagggcactgaggagggctcgccaagagagttcatttacctaaacaggtacaagcgggcgggcgagtcccaggacaagtgcacctacaccttcattgtgccccagcagcgggtcacgggtgccatctgcgtcaactccaaggagcctgaggtgcttctggagaaccgagtgcataagcaggagctagagctgctcaacaatgagctgctcaagcagaagcggcagatcgagacgctgcagcagctggtggaggtggacggcggcattgtgagcgaggtgaagctgctgcgcaaggagagccgcaacatgaactcgcgggtcacgcagctctacatgcagctcctgcacgagatcatccgcaagcgggacaacgcgttggagctctcccagctggagaacaggatcctgaaccagacagccgacatgctgcagctggccagcaagtacaaggacctggagcacaagtaccagcacctggccacactggcccacaaccaatcagagatcatcgcgcagcttgaggagcactgccagagggtgccctcggccaggcccgtcccccagccaccccccgctgccccgccccgggtctaccaaccacccacctacaaccgcatcatcaaccagatctctaccaacgagatccagagtgaccagaacctgaaggtgctgccaccccctctgcccactatgcccactctcaccagcctcccatcttccaccgacaagccgtcgggcccatggagagactgcctgcaggccctggaggatggccacgacaccagctccatctacctggtgaagccggagaacaccaaccgcctcatgcaggtgtggtgcgaccagagacacgaccccgggggctggaccgtcatccagagacgcctggatggctctgttaacttcttcaggaactgggagacgtacaagcaagggtttgggaacattgacggcgaatactggctgggcctggagaacatttactggctgacgaaccaaggcaactacaaactcctggtgaccatggaggactggtccggccgcaaagtctttgcagaatacgccagtttccgcctggaacctgagagcgagtattataagctgcggctggggcgctaccatggcaatgcgggtgactcctttacatggcacaacggcaagcagttcaccaccctggacagagatcatgatgtctacacaggaaactgtgcccactaccagaagggaggctggtggtataacgcctgtgcccactccaacctcaacggggtctggtaccgcgggggccattaccggagccgctaccaggacggagtctactgggctgagttccgaggaggctcttactcactcaagaaagtggtgatgatgatccgaccgaaccccaacaccttccactaagccagctccccctcctgacctctcgtggccattgccaggagcccaccctggtcacgctggccacagcacaaagaacaactcctcaccagttcatcctgaggctgggaggaccgggatgctggattctgttttccgaagtcactgcagcggatgatggaactgaatcgatacggtgttttctgtccctcctactttccttcacaccagacagcccctcatgtctccaggacaggacaggactacagacaactctttctttaaataaattaagtctctacaataaaaacacaactgcaaagtaccttcataatatacatgtgtatgagcctcccttgtgcacgtatgtgtataccacatatatatgcatttagatatacatcacatgtgatatatctagatccatatataggtttgccttagatacctaaatacacatatattcagttctcagatgttgaagctgtcaccagcagctttgctcttaggagaaaagcatttcattagtgttgtattacttgagtctaagggtagatcacagactgtgtggtctcaactgaaaggatcacccttggcatctgtgtgcctggattcttccagaatgtctacaatgctaatctctcacatagaggttcccagcttcttaagaaccccttttggcacctaatcaaatttcaaaatccctccccccacattttcatacttttccccattctcaggacttttcaccatccatcacccacttatcccttcatttgacaccattcattaagtgccttctgtgtgtcagtccctggccactcactgcagttcaaggccccctttccgctctgctgtactcctcgcctacctactccttgccttttctgtcgcacagccccttctttccaggcgagattcctcagcttctgagtaggaaacactccgggctccaggtttctggttgggaagggaaggccaggccaaaagctccaccggccgtatagataatgtactcgcagttttgtatcttccattcatactttaacctacaggtcatttgagtcttcacacaaataataacctatctggccaggagaattatctcagaacagaagtcatcagatcatcagagcccccagatggctacagaccagagattccacgctctcaggctgactagagtccgcatctcatctccaaactacacttccctggagaacaagtgccacaaaaatgaaaacaggccacttctcaggagttgaataatcaggggtcaccggaccccttggttgatgcactgcagcatggtggctttctgagtcctgttggccaccaagtgtcagcctcagcactcccgggactattgccaagaaggggcaagggatgagtcaagaaggtgagacccttcccggtgggcacgtgggccaggctgtgtgagatgttggatgtttggtactgtccatgtctgggtgtgtgcctattacgtatgcctatctccggaaagtccaccttgccccgtccactttcccatctcctcggtataaatcatgtttataagttatggaagaaccgggacattttccagaatctgcaataaaagccataattactatttggatgtaa

SEQ ID NO: 441422 - DNA, 2721 bp, Homo sapiens
tgtctggggctgaggggaggcccggagcctttctggggcctgggggatcctcttgcactggtgggtggagagaagcgcctgcagccaaccagggtcaggctgtgctcacagtttcctctggcggcatgtaaaggctccacaaaggagttgggagttcaaatgaggctgctgcggacggcctgaggatggaccccaagccctggacctgccgagcgtggcactgaggcagcggctgacgctactgtgagggaaagaaggttgtgagcagccccgcaggacccctggccagccctggccccagcctctgccggagccctctgtggaggcagagccagtggagcccagtgaggcagggctgcttggcagccaccggcctgcaactcaggaacccctccagaggccatggacaggctgccccgctgacggccagggtgaagcatgtgaggagccgccccggagccaagcaggagggaagaggctttcatagattctattcacaaagaataaccaccattttgcaaggaccatgaggccactgtgcgtgacatgctggtggctcggactgctggctgccatgggagctgttgcaggccaggaggacggttttgagggcactgaggagggctcgccaagagagttcatttacctaaacaggtacaagcgggcgggcgagtcccaggacaagtgcacctacaccttcattgtgccccagcagcgggtcacgggtgccatctgcgtcaactccaaggagcctgaggtgcttctggagaaccgagtgcataagcaggagctagagctgctcaacaatgagctgctcaagcagaagcggcagatcgagacgctgcagcagctggtggaggtggacggcggcattgtgagcgaggtgaagctgctgcgcaaggagagccgcaacatgaactcgcgggtcacgcagctctacatgcagctcctgcacgagatcatccgcaagcgggacaacgcgttggagctctcccagctggagaacaggatcctgaaccagacagccgacatgctgcagctggccagcaagtacaaggacctggagcacaagtaccagcacctggccacactggcccacaaccaatcagagatcatcgcgcagcttgaggagcactgccagagggtgccctcggccaggcccgtcccccagccaccccccgctgccccgccccgggtctaccaaccacccacctacaaccgcatcatcaaccagatctctaccaacgagatccagagtgaccagaacctgaaggtgctgccaccccctctgcccactatgcccactctcaccagcctcccatcttccaccgacaagccgtcgggcccatggagagactgcctgcaggccctggaggatggccacgacaccagctccatctacctggtgaagccggagaacaccaaccgcctcatgcaggtgtggtgcgaccagagacacgaccccgggggctggaccgtcatccagagacgcctggatggctctgttaacttcttcaggaactgggagacgtacaagcaagggtttgggaacattgacggcgaatactggctgggcctggagaacatttactggctgacgaaccaaggcaactacaaactcctggtgaccatggaggactggtccggccgcaaagtctttgcagaatacgccagtttccgcctggaacctgagagcgagtattataagctgcggctggggcgctaccatggcaatgcgggtgactcctttacatggcacaacggcaagcagttcaccaccctggacagagatcatgatgtctacacaggaaactgtgcccactaccagaagggaggctggtggtataacgcctgtgcccactccaacctcaacggggtctggtaccgcgggggccattaccggagccgctaccaggacggagtctactgggctgagttccgaggaggctcttactcactcaagaaagtggtgatgatgatccgaccgaaccccaacaccttccactaagccagctccccctcctgacctctcgtggccattgccaggagcccaccctggtcacgctggccacagcacaaagaacaactcctcaccagttcatcctgaggctgggaggaccgggatgctggattctgttttccgaagtcactgcagcggatgatggaactgaatcgatacggtgttttctgtccctcctactttccttcacaccagacagcccctcatgtctccaggacaggacaggactacagacaactctttctttaaataaattaagtctctacaataaaaacacaactgcaaagtaccttcataatatacatgtgtatgagcctcccttgtgcacgtatgtgtataccacatatatatgcatttagatatacatcacatgtgatatatctagatccatatataggtttgccttagatacctaaatacacatatattcagttctcagatgttgaagctgtcaccagcagctttgctcttaggagaaaagcatttcattagtgttggggtgatgttatcgccccacacagataatggaaaattactttgattcttcccgagtagatacattactgttaaatccctgggatagtttaattactgttaactatcttcctatcttaaaaatgtttaccggtgttagaagaaaattcttgccttcttgctagtgtttttacaggtattggtgcttctgccactcaaagccgttt

SEQ ID NO: 441423 - DNA, 1744 bp, Homo sapiens
gcatctgctcgggcgtatcatcaactgatgagcaagaaggatataattcctacgccctctcacccgatgaacatttggaatagttgttgggcgataaatactatttatccccaacaccttccactaagccagctccccctcctgacctctcgtggccattgccaggagcccaccctggtcacgctggccacagcacaaagaacaactcctcaccagttcatcctgaggctgggaggaccgggatgctggattctgttttccgaagtcactgcagcggatgatggaactgaatcgatacggtgttttctgtccctcctactttccttcacaccagacagcccctcatgtctccaggacaggacaggactacagacaactctttctttaaataaattaagtctctacaataaaaacacaactgcaaagtaccttcataatatacatgtgtatgagcctcccttgtgcacgtatgtgtataccacatatatatgcatttagatatacatcacatgtgatatatctagatccatatataggtttgccttagatacctaaatacacatatattcagttctcagatgttgaagctgtcaccagcagctttgctcttaggagaaaagcatttcattagtgttgtattacttgagtctaagggtagatcacagactgtgtggtctcaactgaaaggatcacccttggcatctgtgtgcctggattcttccagaatgtctacaatgctaatctctcacatagaggttcccagcttcttaagaaccccttttggcacctaatcaaatttcaaaatccctccccccacattttcatacttttccccattctcaggacttttcaccatccatcacccacttatcccttcatttgacaccattcattaagtgccttctgtgtgtcagtccctggccactcactgcagttcaaggccccctttccgctctgctgtactcctcgcctacctactccttgccttttctgtcgcacagccccttctttccaggcgagattcctcagcttctgagtaggaaacactccgggctccaggtttctggttgggaagggaaggccaggccaaaagctccaccggccgtatagataatgtactcgcagttttgtatcttccattcatactttaacctacaggtcatttgagtcttcacacaaataataacctatctggccaggagaattatctcagaacagaagtcatcagatcatcagagcccccagatggctacagaccagagattccacgctctcaggctgactagagtccgcatctcatctccaaactacacttccctggagaacaagtgccacaaaaatgaaaacaggccacttctcaggagttgaataatcaggggtcaccggaccccttggttgatgcactgcagcatggtggctttctgagtcctgttggccaccaagtgtcagcctcagcactcccgggactattgccaagaaggggcaagggatgagtcaagaaggtgagacccttcccggtgggcacgtgggccaggctgtgtgagatgttggatgtttggtactgtccatgtctgggtgtgtgcctattacctcagcatttctcacaaagtgtaccatgtagcatgttttgtgtatataaaagggagggtttttttaaaaatatattcccagattatccttgtaatgacacgaatctgcaataaaagccatcagtgctatttggatgtatctacaaaaaaaaata

SEQ ID NO: 441424 - DNA, 2366 bp, Homo sapiens
tgtctggggctgaggggaggcccggagcctttctggggcctgggggatcctcttgcactggtgggtggagagaagcgcctgcagccaaccagggtcaggctgtgctcacagtttcctctggcggcatgtaaaggctccacaaaggagttgggagttcaaatgaggctgctgcggacggcctgaggatggaccccaagccctggacctgccgagcgtggcactgaggcagcggctgacgctactgtgagggaaagaaggttgtgagcagccccgcaggacccctggccagccctggccccagcctctgccggagccctctgtggaggcagagccagtggagcccagtgaggcagggctgcttggcagccaccggcctgcaactcaggaacccctccagaggccatggacaggctgccccgctgacggccagggtgaagcatgtgaggagccgccccggagccaagcaggagggaagaggctttcatagattctattcacaaagaataaccaccattttgcaaggaccatgaggccactgtgcgtgacatgctggtggctcggactgctggctgccatgggagctgttgcaggccaggaggacggttttgagggcactgaggagggctcgccaagagagttcatttacctaaacaggtacaagcgggcgggcgagtcccaggacaagtgcacctacaccttcattgtgccccagcagcgggtcacgggtgccatctgcgtcaactccaaggagcctgaggtgcttctggagaaccgagtgcataagcaggagctagagctgctcaacaatgagctgctcaagcagaagcggcagatcgagacgctgcagcagctggtggaggtggacggcggcattgtgagcgaggtgaagctgctgcgcaaggagagccgcaacatgaactcgcgggtcacgcagctctacatgcagctcctgcacgagatcatccgcaagcgggacaacgcgttggagctctcccagctggagaacaggatcctgaaccagacagccgacatgctgcagctggccagcaagtacaaggacctggagcacaagtaccagcacctggccacactggcccacaaccaatcagagatcatcgcgcagcttgaggagcactgccagagggtgccctcggccaggcccgtcccccagccaccccccgctgccccgccccgggtctaccaaccacccacctacaaccgcatcatcaaccagatctctaccaacgagatccagagtgaccagaacctgaaggtgctgccaccccctctgcccactatgcccactctcaccagcctcccatcttccaccgacaagccgtcgggcccatggagagactgcctgcaggccctggaggatggccacgacaccagctccatctacctggtgaagccggagaacaccaaccgcctcatgcaggtgtggtgcgaccagagacacgaccccgggggctggaccgtcatccagagacgcctggatggctctgttaacttcttcaggaactgggagacgtacaagcaagggtttgggaacattgacggcgaatactggctgggcctggagaacatttactggctgacgaaccaaggcaactacaaactcctggtgaccatggaggactggtccggccgcaaagtctttgcagaatacgccagtttccgcctggaacctgagagcgagtattataagctgcggctggggcgctaccatggcaatgcgggtgactcctttacatggcacaacggcaagcagttcaccaccctggacagagatcatgatgtctacacaggaaactgtgcccactaccagaagggaggctggtggtataacgcctgtgcccactccaacctcaacggggtctggtaccgcgggggccattaccggagccgctaccaggacggagtctactgggctgagttccgaggaggctcttactcactcaagaaagtggtgatgatgatccgaccgaaccccaacaccttccactaagccagctccccctcctgacctctcgtggccattgccaggagcccaccctggtcacgctggccacagcacaaagaacaactcctcaccagttcatcctgaggctgggaggaccgggatgctggattctgttttccgaagtcactgcagcggatgatggaaccggatagcttgcccaagctatccggttcaatgtccggagagtatatcgtcgaagaggatagcaattagaaggatctggatgcggttgcttgcgttaggaaatacttgatggcagcttctgtggaacgagggttataatacaggttaaactgcaatagagctacatgttattctaggctactaggtaaaatcagtcgag

SEQ ID NO: 441425 - DNA, 1524 bp, Homo sapiens
tgtctggggctgaggggaggcccggagcctttctggggcctgggggatcctcttgcactggtgggtggagagaagcgcctgcagccaaccagggtcaggctgtgctcacagtttcctctggcggcatgtaaaggctccacaaaggagttgggagttcaaatgaggctgctgcggacggcctgaggatggaccccaagccctggacctgccgagcgtggcactgaggcagcggctgacgctactgtgagggaaagaaggttgtgagcagccccgcaggacccctggccagccctggccccagcctctgccggagccctctgtggaggcagagccagtggagcccagtgaggcagggctgcttggcagccaccggcctgcaactcaggaacccctccagaggccatggacaggctgccccgctgacggccagggtgaagcatgtgaggagccgccccggagccaagcaggagggaagaggctttcatagattctattcacaaagaataaccaccattttgcaaggaccatgaggccactgtgcgtgacatgctggtggctcggactgctggctgccatgggagctgttgcaggccaggaggacggttttgagggcactgaggagggctcgccaagagagttcatttacctaaacaggtacaagcgggcgggcgagtcccaggacaagtgcacctacaccttcattgtgccccagcagcgggtcacgggtgccatctgcgtcaactccaaggagcctgaggtgcttctggagaaccgagtgcataagcaggagctagagctgctcaacaatgagctgctcaagcagaagcggcagatcgagacgctgcagcagctggtggaggtggacggcggcattgtgagcgaggtgaagctgctgcgcaaggagagccgcaacatgaactcgcgggtcacgcagctctacatgcagctcctgcacgagatcatccgcaagcgggacaacgcgttggagctctcccagctggagaacaggatcctgaaccagacagccgacatgctgcagctggccagcaagtacaaggacctggagcacaagtaccagcacctggccacactggcccacaaccaatcagagatcatcgcgcagcttgaggagcactgccagagggtgccctcggccaggcccgtcccccagccaccccccgctgccccgccccgggtctaccaaccacccacctacaaccgcatcatcaaccagatctctaccaacgagatccagagtgaccagaacctgaaggtgctgccaccccctctgcccactatgcccactctcaccagcctcccatcttccaccgacaagccgtcgggactctaggaatcatcatttctggaagaagcaggccagaggctcccctgtcagaatgtcagcacacatccagtcccctgaagctcagccccttgttcatccagaacacctgagccttcccagtgggctgccatatgagaactatattcatctctgcataaatgaaccatgtatctactcca

SEQ ID NO: 441426 - DNA, 2314 bp, Homo sapiens
tgtctggggctgaggggaggcccggagcctttctggggcctgggggatcctcttgcactggtgggtggagagaagcgcctgcagccaaccagggtcaggctgtgctcacagtttcctctggcggcatgtaaaggctccacaaaggagttgggagttcaaatgaggctgctgcggacggcctgaggatggaccccaagccctggacctgccgagcgtggcactgaggcagcggctgacgctactgtgagggaaagaaggttgtgagcagccccgcaggacccctggccagccctggccccagcctctgccggagccctctgtggaggcagagccagtggagcccagtgaggcagggctgcttggcagccaccggcctgcaactcaggaacccctccagaggccatggacaggctgccccgctgacggccagggtgaagcatgtgaggagccgccccggagccaagcaggagggaagaggctttcatagattctattcacaaagaataaccaccattttgcaaggaccatgaggccactgtgcgtgacatgctggtggctcggactgctggctgccatgggagctgttgcaggccaggaggacggttttgagggcactgaggagggctcgccaagagagttcatttacctaaacaggtacaagcgggcgggcgagtcccaggacaagtgcacctacaccttcattgtgccccagcagcgggtcacgggtgccatctgcgtcaactccaaggagcctgaggtgcttctggagaaccgagtgcataagcaggagctagagctgctcaacaatgagctgctcaagcagaagcggcagatcgagacgctgcagcagctggtggaggtggacggcggcattgtgagcgaggtgaagctgctgcgcaaggagagccgcaacatgaactcgcgggtcacgcagctctacatgcagctcctgcacgagatcatccgcaagcgggacaacgcgttggagctctcccagctggagaacaggatcctgaaccagacagccgacatgctgcagctggccagcaagtacaaggacctggagcacaagtaccagcacctggccacactggcccacaaccaatcagagatcatcgcgcagcttgaggagcactgccagagggtgccctcggccaggcccgtcccccagccaccccccgctgccccgccccgggtctaccaaccacccacctacaaccgcatcatcaaccagatctctaccaacgagatccagagtgaccagaacctgaaggtgctgccaccccctctgcccactatgcccactctcaccagcctcccatcttccaccgacaagccgtcgggcccatggagagactgcctgcaggccctggaggatggccacgacaccagctccatctacctggtgaagccggagaacaccaaccgcctcatgcaggtgtggtgcgaccagagacacgaccccgggggctggaccgtcatccagagacgcctggatggctctgttaacttcttcaggaactgggagacgtacaagcaagggtttgggaacattgacggcgaatactggctgggcctggagaacatttactggctgacgaaccaaggcaactacaaactcctggtgaccatggaggactggtccggccgcaaagtctttgcagaatacgccagtttccgcctggaacctgagagcgagtattataagctgcggctggggcgctaccatggcaatgcgggtgactcctttacatggcacaacggcaagcagttcaccaccctggacagagatcatgatgtctacacaggaaactgtgcccactaccagaagggaggctggtggtataacgcctgtgcccactccaacctcaacggggtctggtaccgcgggggccattaccggagccgctaccaggacggagtctactgggctgagttccgaggaggctcttactcactcaagaaagtggtgatgatgatccgaccgaaccccaacaccttccactaagccagctccccctcctgacctctcgtggccattgccaggagcccaccctggtcacgctggccacagcacaaagaacaactcctcaccagttcatcctgaggctgggaggaccgggatgctggattctgttttccgaagtcactgcagcggatgatggaactgaatcgatacggtgttttctgtccctcctactttccttcacaccagacagcccctcatgtctccaggacaggacaggactacagacaactctttctttaaataaattaagtctctacaataaaaacacaactgcaaagtaccttc

SEQ ID NO: 441427 - DNA, 3427 bp, Homo sapiens
tgtctggggctgaggggaggcccggagcctttctggggcctgggggatcctcttgcactggtgggtggagagaagcgcctgcagccaaccagggtcaggctgtgctcacagtttcctctggcggcatgtaaaggctccacaaaggagttgggagttcaaatgaggctgctgcggacggcctgaggatggaccccaagccctggacctgccgagcgtggcactgaggcagcggctgacgctactgtgagggaaagaaggttgtgagcagccccgcaggacccctggccagccctggccccagcctctgccggagccctctgtggaggcagagccagtggagcccagtgaggcagggctgcttggcagccaccggcctgcaactcaggaacccctccaggaggacggttttgagggcactgaggagggctcgccaagagagttcatttacctaaacaggtacaagcgggcgggcgagtcccaggacaagtgcacctacaccttcattgtgccccagcagcgggtcacgggtgccatctgcgtcaactccaaggagcctgaggtgcttctggagaaccgagtgcataagcaggagctagagctgctcaacaatgagctgctcaagcagaagcggcagatcgagacgctgcagcagctggtggaggtggacggcggcattgtgagcgaggtgaagctgctgcgcaaggagagccgcaacatgaactcgcgggtcacgcagctctacatgcagctcctgcacgagatcatccgcaagcgggacaacgcgttggagctctcccagctggagaacaggatcctgaaccagacagccgacatgctgcagctggccagcaagtacaaggacctggagcacaagtaccagcacctggccacactggcccacaaccaatcagagatcatcgcgcagcttgaggagcactgccagagggtgccctcggccaggcccgtcccccagccaccccccgctgccccgccccgggtctaccaaccacccacctacaaccgcatcatcaaccagatctctaccaacgagatccagagtgaccagaacctgaaggtgctgccaccccctctgcccactatgcccactctcaccagcctcccatcttccaccgacaagccgtcgggcccatggagagactgcctgcaggccctggaggatggccacgacaccagctccatctacctggtgaagccggagaacaccaaccgcctcatgcaggtgtggtgcgaccagagacacgaccccgggggctggaccgtcatccagagacgcctggatggctctgttaacttcttcaggaactgggagacgtacaagcaagggtttgggaacattgacggcgaatactggctgggcctggagaacatttactggctgacgaaccaaggcaactacaaactcctggtgaccatggaggactggtccggccgcaaagtctttgcagaatacgccagtttccgcctggaacctgagagcgagtattataagctgcggctggggcgctaccatggcaatgcgggtgactcctttacatggcacaacggcaagcagttcaccaccctggacagagatcatgatgtctacacaggaaactgtgcccactaccagaagggaggctggtggtataacgcctgtgcccactccaacctcaacggggtctggtaccgcgggggccattaccggagccgctaccaggacggagtctactgggctgagttccgaggaggctcttactcactcaagaaagtggtgatgatgatccgaccgaaccccaacaccttccactaagccagctccccctcctgacctctcgtggccattgccaggagcccaccctggtcacgctggccacagcacaaagaacaactcctcaccagttcatcctgaggctgggaggaccgggatgctggattctgttttccgaagtcactgcagcggatgatggaactgaatcgatacggtgttttctgtccctcctactttccttcacaccagacagcccctcatgtctccaggacaggacaggactacagacaactctttctttaaataaattaagtctctacaataaaaacacaactgcaaagtaccttcataatatacatgtgtatgagcctcccttgtgcacgtatgtgtataccacatatatatgcatttagatatacatcacatgtgatatatctagatccatatataggtttgccttagatacctaaatacacatatattcagttctcagatgttgaagctgtcaccagcagctttgctcttaggagaaaagcatttcattagtgttgtattacttgagtctaagggtagatcacagactgtgtggtctcaactgaaaggatcacccttggcatctgtgtgcctggattcttccagaatgtctacaatgctaatctctcacatagaggttcccagcttcttaagaaccccttttggcacctaatcaaatttcaaaatccctccccccacattttcatacttttccccattctcaggacttttcaccatccatcacccacttatcccttcatttgacaccattcattaagtgccttctgtgtgtcagtccctggccactcactgcagttcaaggccccctttccgctctgctgtactcctcgcctacctactccttgccttttctgtcgcacagccccttctttccaggcgagattcctcagcttctgagtaggaaacactccgggctccaggtttctggttgggaagggaaggccaggccaaaagctccaccggccgtatagataatgtactcgcagttttgtatcttccattcatactttaacctacaggtcatttgagtcttcacacaaataataacctatctggccaggagaattatctcagaacagaagtcatcagatcatcagagcccccagatggctacagaccagagattccacgctctcaggctgactagagtccgcatctcatctccaaactacacttccctggagaacaagtgccacaaaaatgaaaacaggccacttctcaggagttgaataatcaggggtcaccggaccccttggttgatgcactgcagcatggtggctttctgagtcctgttggccaccaagtgtcagcctcagcactcccgggactattgccaagaaggggcaagggatgagtcaagaaggtgagacccttcccggtgggcacgtgggccaggctgtgtgagatgttggatgtttggtactgtccatgtctgggtgtgtgcctattacctcagcatttctcacaaagtgtaccatgtagcatgttttgtgtatataaaagggagggtttttttaaaaatatattcccagattatccttgtaatgacacgaatctgcaataaaagccatcagtgctatttggatgtatctacaaaaaaaaata

SEQ ID NO: 441428 - DNA, 1869 bp, Homo sapiens
cttagtcttcgctttctgaattggagtacgaggataacaaacctcacttctggaaactgtgcccactaccagaagggaggctggtggtataacgcctgtgcccactccaacctcaacggggtctggtaccgcgggggccattaccggagccgctaccaggacggagtctactgggctgagttccgaggaggctcttactcactcaagaaagtggtgatgatgatccgaccgaaccccaacaccttccactaagccagctccccctcctgacctctcgtggccattgccaggagcccaccctggtcacgctggccacagcacaaagaacaactcctcaccagttcatcctgaggctgggaggaccgggatgctggattctgttttccgaagtcactgcagcggatgatggaactgaatcgatacggtgttttctgtccctcctactttccttcacaccagacagcccctcatgtctccaggacaggacaggactacagacaactctttctttaaataaattaagtctctacaataaaaacacaactgcaaagtaccttcataatatacatgtgtatgagcctcccttgtgcacgtatgtgtataccacatatatatgcatttagatatacatcacatgtgatatatctagatccatatataggtttgccttagatacctaaatacacatatattcagttctcagatgttgaagctgtcaccagcagctttgctcttaggagaaaagcatttcattagtgttgtattacttgagtctaagggtagatcacagactgtgtggtctcaactgaaaggatcacccttggcatctgtgtgcctggattcttccagaatgtctacaatgctaatctctcacatagaggttcccagcttcttaagaaccccttttggcacctaatcaaatttcaaaatccctccccccacattttcatacttttccccattctcaggacttttcaccatccatcacccacttatcccttcatttgacaccattcattaagtgccttctgtgtgtcagtccctggccactcactgcagttcaaggccccctttccgctctgctgtactcctcgcctacctactccttgccttttctgtcgcacagccccttctttccaggcgagattcctcagcttctgagtaggaaacactccgggctccaggtttctggttgggaagggaaggccaggccaaaagctccaccggccgtatagataatgtactcgcagttttgtatcttccattcatactttaacctacaggtcatttgagtcttcacacaaataataacctatctggccaggagaattatctcagaacagaagtcatcagatcatcagagcccccagatggctacagaccagagattccacgctctcaggctgactagagtccgcatctcatctccaaactacacttccctggagaacaagtgccacaaaaatgaaaacaggccacttctcaggagttgaataatcaggggtcaccggaccccttggttgatgcactgcagcatggtggctttctgagtcctgttggccaccaagtgtcagcctcagcactcccgggactattgccaagaaggggcaagggatgagtcaagaaggtgagacccttcccggtgggcacgtgggccaggctgtgtgagatgttggatgtttggtactgtccatgtctgggtgtgtgcctattacctcagcatttctcacaaagtgtaccatgtagcatgttttgtgtatataaaagggagggtttttttaaaaatatattcccagattatccttgtaatgacacgaatctgcaataaaagccatcagtgctatttggatgtatctacaaaaaaaaata

SEQ ID NO: 441429 - DNA, 1990 bp, Homo sapiens
tgtctggggctgaggggaggcccggagcctttctggggcctgggggatcctcttgcactggtgggtggagagaagcgcctgcagccaaccagggtcaggctgtgctcacagtttcctctggcggcatgtaaaggctccacaaaggagttgggagttcaaatgaggctgctgcggacggcctgaggatggaccccaagccctggacctgccgagcgtggcactgaggcagcggctgacgctactgtgagggaaagaaggttgtgagcagccccgcaggacccctggccagccctggccccagcctctgccggagccctctgtggaggcagagccagtggagcccagtgaggcagggctgcttggcagccaccggcctgcaactcaggaacccctccagaggccatggacaggctgccccgctgacggccagggtgaagcatgtgaggagccgccccggagccaagcaggagggaagaggctttcatagattctattcacaaagaataaccaccattttgcaaggaccatgaggccactgtgcgtgacatgctggtggctcggactgctggctgccatgggagctgttgcaggccaggaggacggttttgagggcactgaggagggctcgccaagagagttcatttacctaaacaggtacaagcgggcgggcgagtcccaggacaagtgcacctacaccttcattgtgccccagcagcgggtcacgggtgccatctgcgtcaactccaaggagcctgaggtgcttctggagaaccgagtgcataagcaggagctagagctgctcaacaatgagctgctcaagcagaagcggcagatcgagacgctgcagcagctggtggaggtggacggcggcattgtgagcgaggtgaagctgctgcgcaaggagagccgcaacatgaactcgcgggtcacgcagctctacatgcagctcctgcacgagatcatccgcaagcgggacaacgcgttggagctctcccagctggagaacaggatcctgaaccagacagccgacatgctgcagctggccagcaagtacaaggacctggagcacaagtaccagcacctggccacactggcccacaaccaatcagagatcatcgcgcagcttgaggagcactgccagagggtgccctcggccaggcccgtcccccagccaccccccgctgccccgccccgggtctaccaaccacccacctacaaccgcatcatcaaccagatctctaccaacgagatccagagtgaccagaacctgaaggtgctgccaccccctctgcccactatgcccactctcaccagcctcccatcttccaccgacaagccgtcgggcccatggagagactgcctgcaggccctggaggatggccacgacaccagctccatctacctggtgaagccggagaacaccaaccgcctcatgcaggtgtggtgcgaccagagacacgaccccgggggctggaccgtcatccagagacgcctggatggctctgttaacttcttcaggaactgggagacgtacaagcaagggtttgggaacattgacggcgaatactggctgggcctggagaacatttactggctgacgaaccaaggcaactacaaactcctggtgaccatggaggactggtccggccgcaaagtctttgcagaatacgccagtttccgcctggaacctgagagcgagtattataagctgcggctggggcgctaccatggcaatgcgggtgactcctttacatggcacaacggcaagcagttcaccaccctggacagagatgttggatgtttggtactgtccatgtctgggtgtgtgcctattacctcagcatttctcacaaagtgtaccatgtagcatgttttgtgtatataaaagggagggtttttttaaaaatatattcccagattatccttgtaatgacacgaatctgcaataaaagccatcagtgctatttggatgtatctacaaaaaaaaata

SEQ ID NO: 441430 - DNA, 2094 bp, Homo sapiens
  misc_feature (1504)..(1506): n is a, c, g, or t
  misc_feature (1545)..(1545): n is a, c, g, or t
  misc_feature (1720)..(1720): n is a, c, g, or t
  misc_feature (1740)..(1740): n is a, c, g, or t
  misc_feature (1987)..(1987): n is a, c, g, or t
aaaaagaaatatctgagtctgggtaatttataaagaaaagaggtttcattgagtcatggttctgcaggctgtacaggaagcatgacacaggcatctgctcagtttctggaaaggcctcagggagtgtaccatcatggcagagggggagcaggagcaagagagagagcagggaaataccacacacttttaaatggccccggatctcatgagaactcactcactatcatggggacagtgccaagatgatggtgctaaaccatgcgtgagaaatctgcccctgtgatccagtcacctccaaccagaccccacctccaacactggggactccagttcaacatgagatttgggcaaggacaaatatcgaaactctaccacccccacacccgtgagcacagtcagtttcccttgctgtggggaacttccaaggaaaagctggtgaagcagtcattttaagcttatccaagtacaaaaagaaaataagccatattaacaggctttttaagcagaataatgaaaagtattttgtttaaaaaaaaaatgccaaggaatcagctggagttttgtggacgtggaagtagacttgtgtggattgtgttcggtctgagccaggcagaaatgccgtgaactcaggacatgatagaaatccaggttccagggggaaacaaacattccccagggcaatgtcacgacttggtcttcccgaggagccagtcagaaacagtttgctagatgatgctaaggcccgcttaagaaagtatgatattggaggcaaatattctcacttgccatataacaaatactccgtccttttgccattggtggctaaagaaggaaaactccatttgttgttcaccgtccggtcagagaaggtaggtggacaaaaaatttcctgcccttaaacctcaggacatcagaagacctcacgagattttgtcacttgcacacactttgatgccaaaattctcaaaagggctttcaaaattgtgatgtcagaggcatacaaccacaagccacaggataacatggtgtttcttggagaaggtttaacaagaaaatgaaggaatttagctagcaagcagtttaaaacgctttcacactagggttacctaaccttggtgctattggcatttggggctgaataattctttggtgtggaggctgtcctgtataatgtggtgtgtttaccatcatccttggcctctacccaccagatgccagtagcacacacaaacacaagctcacacacacctttgtccctttgtccagtatgccagtagcacacacaccacaaatgtcttcagaattgcctactatcctggcaggattgggggtgccaaattgccccccaccaagggccactgttttagactatcccacccccagtataatgtgaaaatactagagcatagaagttaacggcctaggctctaaagctagctgtccacgttgaatccaggctctctccttgccagctgtgactttggcctcgttacttgccctctcnnnacttcagtcttttcacttgtaaaatgaggacaaaatatnagtaactgcttcatacagctgctatgaacatttcacagggtaacaaatgtaaagcacctatataacccaggtacttggcaaggaagaattcagtaagttttagctgtcatcgttagtgtcaagtgacctgtcagacatgacctgaagttttaagataaatgatgtcactttacanaaataatgggctgggaatgnagtttctggctcaccccttgtattggtccattcttgcattgctataacgaaatacctgaggctgggtatggtggctcaagcatgtaatcccagcactttgagaggccaaggtgggaggatacgaggtcagcagttcgagacaagcctgaccaacatagtgaaaccccatctctactaaaaatacaaaagaattagccaggcatggtggcacacacctgtaatcccagctactcaggaggctgaggcnggagaaacacttgaaaccaggaggcggaggttgcagtgagccgagattgtgccactgcgctccagcctgaggaacagcgagactccatctcaaaaaagaaaaaaaaa

SEQ ID NO: 441431 - DNA, 472 bp, Homo sapiens
atatatatatttttaatctgttgtacatgtaacagaaacttctggtcatccatcaaaatctatcttccctgtcttctatggtggtagagtttaagctgggtccccagcactccaggtataaacagcattactccggatcccttgcaattcaagttgactctgggacttactttaggccaatgggttatgggtgaaagttgactttccaggtcatctccaatctaagacataagccagtgttcttgagtccctttggttctttttttccatgagctgcaacatggacttctctgcaacccagccttgaccatacaaatgaggacattctctgggggaatggcagaaccgaaagatgtcagagcttgaatcgatgaatgactctgtggagcaaagtaaccttctaacctgggctcttcacttggtactgttacatcagaaaagaataaaattctgtatcatccgtctgccactg

SEQ ID NO: 441432 - DNA, 1179 bp, Homo sapiens
cgaccgagcagctccgaggagtccgcccggaaacaaacattccccagggcaatgtcacgacttggtcttcccgaggagccagtcagaaacagtttgctagatgatgctaaggcccgcttaagaaagtatgatattggaggcaaatattctcacttgccatataacaaatactccgtccttttgccattggtggctaaagaaggaaaactccatttgttgttcaccgtccggtcagagaagctaagaagggcccctggagaagtttgcttccctggaggtaagcgtgaccctacagacatggatgatgcagccacagctctccgggaagcccaggaggaagtgggtctccgtcctcaccaagtggaagttgtctgctgcctggtgccatgtcttattgatagatgggggtctcgctatgttgatgaggctggtctcgagctcctggcctcaagtgatcctcccacctcagcctcccaaagtgctgggattacagacagatacattgataactccatttgtgggtttaatagaccacaacttccaggcccagccgaatcctgctgaagttaaggatgtattcctggtgcctctggcctatttcctgcatccacaggtccatgaccagcattacgtcacacgtcttggtcaccgttttattaatcatatctttgagtacacaaaccctgaagacggtgtcacttaccagatcaagggaatgacggcaaaccttgcagtgttggtggcctttatcattttggaaaaaaaacccacctttgaggttcaatttaatcttaatgatgtattagcatcctctgaagagttattcctgaaggttcataaaaaagctacaagcaggttatgatttactagagcaagagacaaagaactattcacgaggattctgtgtgtgcttattcgtagaacaacaacaatgccagctgttggaatttgacaggtgtgaatattttttctgcagtatgtagttagaatccttgcctcttttccagttgccttctattgtctgaaaaagtaaaagccattcaaaaatgaaaactatgttcatagtgttgcatattttcacccacaatatgttaataatatttttcttacacatataataaagaatatctggcacatactaggcccttaataaagattttttgaatataaaaaaaagtg

SEQ ID NO: 441433 - DNA, 1127 bp, Homo sapiens
ctaatttatataacctaaatgcctataaagtgaagagtgataactttagaatttggggctgttgttgaaactaattcttcaggtttatacttgtgtcttttcttactggtaggaatttatcatacagatacacaaatgcaattcccaggtcaaagcgaacacatttttatgatactgccaaattgccattccaaaagattgtactactttatgttcatacaagaaatcattttcagagtcatctcatagatgtcacctcaggtagagcaggatgactcccattttagggggaacataaatttgtttccggaataagctttcttccccttctcccaggttcggtgtattttcttagctcacctagaagtggcatgattttaggatttgaagcagtatcacttcacttcttaatttgtctgttttgttttctgcttttagacaacagatacattgataactccatttgtgggtttaatagaccacaacttccaggcccagccgaatcctgctgaagttaaggatgtattcctggtgcctctggcctatttcctgcatccacaggtccatgaccagcattacgtcacacgtcttggtcaccgttttattaatcatatctttgagtacacaaaccctgaagacggtgtcacttaccagatcaagggaatgacggcaaaccttgcagtgttggtggcctttatcattttggaaaaaaaacccacctttgaggttcaatttaatcttaatgatgtattagcatcctctgaagagttattcctgaaggttcataaaaaagctacaagcaggttatgatttactagagcaagagacaaagaactattcacgaggattctgtgtgtgcttattcgtagaacaacaacaatgccagctgttggaatttgacaggtgtgaatattttttctgcagtatgtagttagaatccttgcctcttttccagttgccttctattgtctgaaaaagtaaaagccattcaaaaatgaaaactatgttcatagtgttgcatattttcacccacaatatgttaataatatttttcttacacatataataaagaatatctggcacatactaggcccttaataaagattttttgaatataaaaaaaagtg

SEQ ID NO: 441434 - DNA, 1085 bp, Homo sapiens
cgaccgagcagctccgaggagtccgcccggaaacaaacattccccagggcaatgtcacgacttggtcttcccgaggagccagtcagaaacagtttgctagatgatgctaaggcccgcttaagaaagtatgatattggaggcaaatattctcacttgccatataacaaatactccgtccttttgccattggtggctaaagaaggaaaactccatttgttgttcaccgtccggtcagagaagctaagaagggcccctggagaagtttgcttccctggaggtaagcgtgaccctacagacatggatgatgcagccacagctctccgggaagcccaggaggaagtgggtctccgtcctcaccaagtggaagttgtctgctgcctggtgccatgtcttattgatacagatacattgataactccatttgtgggtttaatagaccacaacttccaggcccagccgaatcctgctgaagttaaggatgtattcctggtgcctctggcctatttcctgcatccacaggtccatgaccagcattacgtcacacgtcttggtcaccgttttattaatcatatctttgagtacacaaaccctgaagacggtgtcacttaccagatcaagggaatgacggcaaaccttgcagtgttggtggcctttatcattttggaaaaaaaacccacctttgaggttcaatttaatcttaatgatgtattagcatcctctgaagagttattcctgaaggttcataaaaaagctacaagcaggttatgatttactagagcaagagacaaagaactattcacgaggattctgtgtgtgcttattcgtagaacaacaacaatgccagctgttggaatttgacaggtgtgaatattttttctgcagtatgtagttagaatccttgcctcttttccagttgccttctattgtctgaaaaagtaaaagccattcaaaaatgaaaactatgttcatagtgttgcatattttcacccacaatatgttaataatatttttcttacacatataataaagaatatctggcacatactaggcccttaataaagattttttgaatataaaaaaaagtg

SEQ ID NO: 441435 - DNA, 889 bp, Homo sapiens
cgaccgagcagctccgaggagtccgcccggaaacaaacattccccagggcaatgtcacgacttggtcttcccgaggagccagtcagaaacagtttgctagatgatgctaaggcccgcttaagaaagtatgatattggaggcaaatattctcacttgccatataacaaatactccgtccttttgccattggtggctaaagaaggacagatacattgataactccatttgtgggtttaatagaccacaacttccaggcccagccgaatcctgctgaagttaaggatgtattcctggtgcctctggcctatttcctgcatccacaggtccatgaccagcattacgtcacacgtcttggtcaccgttttattaatcatatctttgagtacacaaaccctgaagacggtgtcacttaccagatcaagggaatgacggcaaaccttgcagtgttggtggcctttatcattttggaaaaaaaacccacctttgaggttcaatttaatcttaatgatgtattagcatcctctgaagagttattcctgaaggttcataaaaaagctacaagcaggttatgatttactagagcaagagacaaagaactattcacgaggattctgtgtgtgcttattcgtagaacaacaacaatgccagctgttggaatttgacaggtgtgaatattttttctgcagtatgtagttagaatccttgcctcttttccagttgccttctattgtctgaaaaagtaaaagccattcaaaaatgaaaactatgttcatagtgttgcatattttcacccacaatatgttaataatatttttcttacacatataataaagaatatctggcacatactaggcccttaataaagattttttgaatataaaaaaaagtg

SEQ ID NO: 441436 - DNA, 1080 bp, Homo sapiens
  misc_feature (1062)..(1062): n is a, c, g, or t
  misc_feature (1080)..(1080): n is a, c, g, or t
cgaccgagcagctccgaggagtccgcccggaaacaaacattccccagggcaatgtcacgacttggtcttcccgaggagccagtcagaaacagtttgctagatgatgctaaggcccgcttaagaaagtatgatattggaggcaaatattctcacttgccatataacaaatactccgtccttttgccattggtggctaaagaaggaaaactccatttgttgttcaccgtccggtcagagaagctaagaagggcccctggagaagtttgcttccctggaggtaagcgtgaccctacagacatggatgatgcagccacagctctccgggaagcccaggaggaagtgggtctccgtcctcaccaagtggaagttgtctgctgcctggtgccatgtcttattgatagatgggggtctcgctatgttgatgaggctggtctcgagctcctggcctcaagtgatcctcccacctcagcctcccaaagtgctgggattacagacagatacattgataactccatttgtgggtttaatagaccacaacttccaggcccagccgaatcctgctgaagttaaggatgtattcctggtgcctctggcctatttcctgcatccacaggtccatgaccagcattacgtcacacgtcttggtcaccgttttattaatcatatctttgagtacacaaaccctgaagacggtgtcacttaccagatcaagggaatgacggcaaaccttgcagtgttggtggcctttatcattttggaaaaaaaacccacctttgaggttcaatttaatcttaatgatgtattagcatcctctgaagagttattcctgaaggttcataaaaaagctacaagcaggttatgatttactagagcaagagacaaagaactattcacgaggattctgtgtgtgcttattcgtagaacaacaacaatgccagctgttggaatttgacaggtgtgaatattttttctgcagtatgtagttagaatccttgcctcttttccagttgccttctattgtctgaaaaagtaaaagccattcaaaaatgttcttacacatanttataaagataatctgcn

SEQ ID NO: 441437 - DNA, 1465 bp, Homo sapiens
  misc_feature (875)..(877): n is a, c, g, or t
  misc_feature (916)..(916): n is a, c, g, or t
  misc_feature (1091)..(1091): n is a, c, g, or t
  misc_feature (1111)..(1111): n is a, c, g, or t
  misc_feature (1358)..(1358): n is a, c, g, or t
cgaccgagcagctccgaggagtccgcccggaaacaaacattccccagggcaatgtcacgacttggtcttcccgaggagccagtcagaaacagtttgctagatgatgctaaggcccgcttaagaaagtatgatattggaggcaaatattctcacttgccatataacaaatactccgtccttttgccattggtggctaaagaaggaaaactccatttgttgttcaccgtccggtcagagaaggtaggtggacaaaaaatttcctgcccttaaacctcaggacatcagaagacctcacgagattttgtcacttgcacacactttgatgccaaaattctcaaaagggctttcaaaattgtgatgtcagaggcatacaaccacaagccacaggataacatggtgtttcttggagaaggtttaacaagaaaatgaaggaatttagctagcaagcagtttaaaacgctttcacactagggttacctaaccttggtgctattggcatttggggctgaataattctttggtgtggaggctgtcctgtataatgtggtgtgtttaccatcatccttggcctctacccaccagatgccagtagcacacacaaacacaagctcacacacacctttgtccctttgtccagtatgccagtagcacacacaccacaaatgtcttcagaattgcctactatcctggcaggattgggggtgccaaattgccccccaccaagggccactgttttagactatcccacccccagtataatgtgaaaatactagagcatagaagttaacggcctaggctctaaagctagctgtccacgttgaatccaggctctctccttgccagctgtgactttggcctcgttacttgccctctcnnnacttcagtcttttcacttgtaaaatgaggacaaaatatnagtaactgcttcatacagctgctatgaacatttcacagggtaacaaatgtaaagcacctatataacccaggtacttggcaaggaagaattcagtaagttttagctgtcatcgttagtgtcaagtgacctgtcagacatgacctgaagttttaagataaatgatgtcactttacanaaataatgggctgggaatgnagtttctggctcaccccttgtattggtccattcttgcattgctataacgaaatacctgaggctgggtatggtggctcaagcatgtaatcccagcactttgagaggccaaggtgggaggatacgaggtcagcagttcgagacaagcctgaccaacatagtgaaaccccatctctactaaaaatacaaaagaattagccaggcatggtggcacacacctgtaatcccagctactcaggaggctgaggcnggagaaacacttgaaaccaggaggcggaggttgcagtgagccgagattgtgccactgcgctccagcctgaggaacagcgagactccatctcaaaaaagaaaaaaaaa

SEQ ID NO: 441438 - DNA, 926 bp, Homo sapiens
cgaccgagcagctccgaggagtccgcccggaaacaaacattccccagggcaatgtcacgacttggtcttcccgaggagccagtcagaaacagtttgctagatgatgctaaggcccgcttaagaaagtatgatattggaggcaaatattctcacttgccatataacaaatactccgtccttttgccattggtggctaaagaaggaaaactccatttgttgttcaccgtccggtcagagaagacagatacattgataactccatttgtgggtttaatagaccacaacttccaggcccagccgaatcctgctgaagttaaggatgtattcctggtgcctctggcctatttcctgcatccacaggtccatgaccagcattacgtcacacgtcttggtcaccgttttattaatcatatctttgagtacacaaaccctgaagacggtgtcacttaccagatcaagggaatgacggcaaaccttgcagtgttggtggcctttatcattttggaaaaaaaacccacctttgaggttcaatttaatcttaatgatgtattagcatcctctgaagagttattcctgaaggttcataaaaaagctacaagcaggttatgatttactagagcaagagacaaagaactattcacgaggattctgtgtgtgcttattcgtagaacaacaacaatgccagctgttggaatttgacaggtgtgaatattttttctgcagtatgtagttagaatccttgcctcttttccagttgccttctattgtctgaaaaagtaaaagccattcaaaaatgaaaactatgttcatagtgttgcatattttcacccacaatatgttaataatatttttcttacacatataataaagaatatctggcacatactaggcccttaataaagattttttgaatataaaaaaaagtg

SEQ ID NO: 441439 - DNA, 772 bp, Homo sapiens
cgaccgagcagctccgaggagtccgcccggaaacaaacattccccagggcaatgtcacgacttggtcttcccgaggagccagtcagacagatacattgataactccatttgtgggtttaatagaccacaacttccaggcccagccgaatcctgctgaagttaaggatgtattcctggtgcctctggcctatttcctgcatccacaggtccatgaccagcattacgtcacacgtcttggtcaccgttttattaatcatatctttgagtacacaaaccctgaagacggtgtcacttaccagatcaagggaatgacggcaaaccttgcagtgttggtggcctttatcattttggaaaaaaaacccacctttgaggttcaatttaatcttaatgatgtattagcatcctctgaagagttattcctgaaggttcataaaaaagctacaagcaggttatgatttactagagcaagagacaaagaactattcacgaggattctgtgtgtgcttattcgtagaacaacaacaatgccagctgttggaatttgacaggtgtgaatattttttctgcagtatgtagttagaatccttgcctcttttccagttgccttctattgtctgaaaaagtaaaagccattcaaaaatgaaaactatgttcatagtgttgcatattttcacccacaatatgttaataatatttttcttacacatataataaagaatatctggcacatactaggcccttaataaagattttttgaatataaaaaaaagtg

SEQ ID NO: 441440 - DNA, 1323 bp, Homo sapiens
cgaccgagcagctccgaggagtccgcccggaaacaaacattccccagggcaatgtcacgacttggtcttcccgaggagccagtcagaaacagtttgctagatgatgctaaggcccgcttaagaaagtatgatattggaggcaaatattctcacttgccatataacaaatactccgtccttttgccattggtggctaaagaaggaaaactccatttgttgttcaccgtccggtcagagaagctaagaagggcccctggagaagtttgcttccctggaggtaagcgtgaccctacagacatggatgatgcagccacagctctccgggaagcccaggaggaagtgggtctccgtcctcaccaagtggaagttgtctgctgcctggtgccatgtcttattgatagatgggggtctcgctatgttgatgaggctggtctcgagctcctggcctcaagtgatcctcccacctcagcctcccaaagtgctgggattacagacagatacattgataactccatttgtgggtttaatagaccacaacttccaggcccagccgaatcctgctgaagttaaggatgtattcctggtgcctctggcctatttcctgcatccacaggtccatgaccagcattacgtcacacgtcttggtcaccgttttattaatcatatctttgagtacacaaaccctgaagacggtgtcacttaccagatcaagggaatgacggcaaaccttgcagtgttggtggcctttatcattttggaaaaaaaacccacctttgaggttcaatttaatcttaatgatgtattagcatcctctgaagagttattcctgaaggttcataaaaaagctacaagcaggttatgatttactagagcaagagacaaagaactattcacgaggattctgtgtgtgcttattcgtagaacaacaacaatgccagctgttggaatttgacaggtgtgaatattttttctgcagtatgtagttagaatccttgcctcttttccagttgccttctattgttttaggccaatgggttatgggtgaaagttgactttccaggtcatctccaatctaagacataagccagtgttcttgagtccctttggttctttttttccatgagctgcaacatggacttctctgcaacccagccttgaccatacaaatgaggacattctctgggggaatggcagaaccgaaagatgtcagagcttgaatcgatgaatgactctgtggagcaaagtaaccttctaacctgggctcttcacttggtactgttacatcagaaaagaataaaattctgtatcatccgtctgccactg

SEQ ID NO: 441441 - DNA, 560 bp, Homo sapiens
ctaatcgagctcggctaccagttcgacggagactctcgagagtggactgccaccagctggctgacagctttcgagagtgaggcctgccagcaggccagggactcagcgtcccctgctactcctgtgctctggaggctgcagagctgacccagagtggagtctgagtctgagtcctgtctctgcctgcggcccagaagtttccctcaaatgcgcgtgtgcacgtgtgcgtgtgcgtgcgtgtgtgtgtgtttgtgagcatgggtgtgcccttggggtaagccagagcctggggtgttctctttggtgttacacagcccaagaggactgagactggcacttagcccaagaggtctgagccctggtgtgtttccagatcgatcctggattcactcactcactcattccttcactcatccagccacctaaaaacatttactgaccatgtactacgtgccagctctagttttcagccttgggaggttttattctgacttcctctgattttggcatgtggagacactcctataaggagctccgtcgaactggtaccgagcatgatt

SEQ ID NO: 441442 - DNA, 510 bp, Homo sapiens
ctcggtacccagttcgacggagactctctagttcgacggagactctcgagagtggactgccaccagctggctgacagctttcgagagtgaggcctgccagcaggccagggactcagcgtcccctgctactcctgtgctctggaggctgcagagctgacccagagtggagtctgagtctgagtcctgtctctgcctgcggcccagaagtttccctcaaatgcgcgtgtgcacgtgtgcgtgtgcgtgcgtgtgtgtgtgtttgtgagcatgggtgtgcccttggggtaagccagagcctggggtgttctctttggtgttacacagcccaagaggactgagactggcacttagcccaagaggtctgagccctggtgtgtttccagatcgatcctggattcactcactcagcaagccctccagctcaaccatacacgatcccacattccctgaacatcctctacgtgtccccgtgtaactattcatgcccttgggacgagttactaccgatcc

SEQ ID NO: 441443 - DNA, 607 bp, Homo sapiens
  misc_feature (267)..(267): n is a, c, g, or t
caggaaggagaacgtgggtgggaggctgggttggtgtgacgctctgacctcttccggtgctgacctctccttatcgctacctgaatacagacaaggacgagggtgaccaccccaacaacagcttcagcccctgtagcgcccatgaccgcaggtgcctgcagaagcacttcgccaaaattcgagaccggagcaccagtgggggcaagatgaaggtcaatggggcgccccgggaggatgcccggcctgtgcccccaggaggtcctgccnagagccgagccttgcaccagtgggcgcctggaaggcggggctgggcctgcttttcaccagaggcgcggcaagcacacgaactggagggaaccattcataactaattcagttcccacaagtccacacaaaacttggcggacccgcgaaaactgtgcacaaagcatttcccaatacacccaataggccacgttgttcaacccccaagccttcattggaatttggggcccaagaccgttggggcccaacggttgccataggggttggtaggttcggaaaccccgggagaaggaacacgggggggcggtcttgaaaagggccgtttaccccgagagggagagag

SEQ ID NO: 441444 - DNA, 2670 bp, Homo sapiens
ggtataaagtccgggggagccggtcccgggcagccgctcagccccctgcccctcgccgcccgccgcctgcctgggccgggccgaggatgcggcgcacgcctcggcggccaggcttgctcccctccggcacgcctgctaacttcccccgctacgtccccgttcgcccgccgggccgccccgtctccccgcgccctccgggtcgggtcctccaggagcgccaggcgctgccgccgtgtgccctccgccgctcgcccgcgcgcccgcgctccccgcctgcgcccagcgccccgcgcccgcgcccagtcctcgggcggtcatgctgcccctctgcctcgtggccgccctgctgctggccgccgggcccgggccgagcctgggcgacgaagccatccactgcccgccctgctccgaggagaagctggcgcgctgccgcccccccgtgggctgcgaggagctggtgcgagagccgggctgcggctgttgcgccacttgcgccctgggcttggggatgccctgcggggtgtacaccccccgttgcggctcgggcctgcgctgctacccgccccgaggggtggagaagcccctgcacacactgatgcacgggcaaggcgtgtgcatggagctggcggagatcgaggccatccaggaaagcctgcagccctctgacaaggacgagggtgaccaccccaacaacagcttcagcccctgtagcgcccatgaccgcaggtgcctgcagaagcacttcgccaaaattcgagaccggagcaccagtgggggcaagatgaaggtcaatggggcgccccgggaggatgcccggcctgtgccccagggctcctgccagagcgagctgcaccgggcgctggagcggctggccgcttcacagagccgcacccacgaggacctctacatcatccccatccccaactgcgaccgcaacggcaacttccaccccaagcagtgtcacccagctctggatgggcagcgtggcaagtgctggtgtgtggaccggaagacgggggtgaagcttccggggggcctggagccaaagggggagctggactgccaccagctggctgacagctttcgagagtgaggcctgccagcaggccagggactcagcgtcccctgctactcctgtgctctggaggctgcagagctgacccagagtggagtctgagtctgagtcctgtctctgcctgcggcccagaagtttccctcaaatgcgcgtgtgcacgtgtgcgtgtgcgtgcgtgtgtgtgtgtttgtgagcatgggtgtgcccttggggtaagccagagcctggggtgttctctttggtgttacacagcccaagaggactgagactggcacttagcccaagaggtctgagccctggtgtgtttccagatcgatcctggattcactcactcactcattccttcactcatccagccacctaaaaacatttactgaccatgtactacgtgccagctctagttttcagccttgggaggttttattctgacttcctctgattttggcatgtggagacactcctataaggagagttcaagcctgtgggagtagaaaaatctcattcccagagtcagaggagaagagacatgtaccttgaccatcgtccttcctctcaagctagccagagggtgggagcctaaggaagcgtggggtagcagatggagtaatggtcacgaggtccagacccactcccaaagctcagacttgccaggctccctttctcttcttccccaggtccttcctttaggtctggttgttgcaccatctgcttggttggctggcagctgagagccctgctgtgggagagcgaagggggtcaaaggaagacttgaagcacagagggctagggaggtggggtacatttctctgagcagtcagggtgggaagaaagaatgcaagagtggactgaatgtgcctaatggagaagacccacgtgctaggggatgaggggcttcctgggtcctgttccctaccccatttgtggtcacagccatgaagtcaccgggatgaacctatccttccagtggctcgctccctgtagctctgcctccctctccatatctccttcccctacacctccctccccacacctccctactcccctgggcatcttctggcttgactggatggaaggagacttaggaacctaccagttggccatgatgtcttttcttctttttcttttttttaacaaaacagaacaaaaccaaaaaatgtccaaaaaaaaaaaaaaaaaaaaaaaaaaaaaaaaaaaaaaacccccggggccctataatttagcgggcggcggcggacaaaagcggcggtgaatagagaaatgcgcgcccattggcgccgtcaagagtgttctcctggcacccactttcttctgtgtgtcccacagggtgcggaaaactctctccgcgggctcccccaatatatggaggccgccgcgataattaattcttccataatagccccgccgcggcgttaaaccccgcgcgatctttaggagacttctgccgcgacacagctgtcccaccccgcagctactatcccccgcccgcccctcactttccccaccccgacgacctaaccttcacaccggtcgtctcccgcctattccctgccctggcagcatcccctttttattctgtcgcgccccacactcctccc

SEQ ID NO: 441445 - DNA, 2371 bp, Homo sapiens
ggtataaagtccgggggagccggtcccgggcagccgctcagccccctgcccctcgccgcccgccgcctgcctgggccgggccgaggatgcggcgcacgcctcggcggccaggcttgctcccctccggcacgcctgctaacttcccccgctacgtccccgttcgcccgccgggccgccccgtctccccgcgccctccgggtcgggtcctccaggagcgccaggcgctgccgccgtgtgccctccgccgctcgcccgcgcgcccgcgctccccgcctgcgcccagcgccccgcgcccgcgcccagtcctcgggcggtcatgctgcccctctgcctcgtggccgccctgctgctggccgccgggcccgggccgagcctgggcgacgaagccatccactgcccgccctgctccgaggagaagctggcgcgctgccgcccccccgtgggctgcgaggagctggtgcgagagccgggctgcggctgttgcgccacttgcgccctgggcttggggatgccctgcggggtgtacaccccccgttgcggctcgggcctgcgctgctacccgccccgaggggtggagaagcccctgcacacactgatgcacgggcaaggcgtgtgcatggagctggcggagatcgaggccatccaggaaagcctgcagccctctgacaaggacgagggtgaccaccccaacaacagcttcagcccctgtagcgcccatgaccgcaggtgcctgcagaagcacttcgccaaaattcgagaccggagcaccagtgggggcaagatgaaggtcaatggggcgccccgggaggatgcccggcctgtgccccagggctcctgccagagcgagctgcaccgggcgctggagcggctggccgcttcacagagccgcacccacgaggacctctacatcatccccatccccaactgcgaccgcaacggcaacttccaccccaagcagtgtcacccagctctggatgggcagcgtggcaagtgctggtgtgtggaccggaagacgggggtgaagcttccggggggcctggagccaaagggggagctggactgccaccagctggctgacagctttcgagagtgaggcctgccagcaggccagggactcagcgtcccctgctactcctgtgctctggaggctgcagagctgacccagagtggagtctgagtctgagtcctgtctctgcctgcggcccagaagtttccctcaaatgcgcgtgtgcacgtgtgcgtgtgcgtgcgtgtgtgtgtgtttgtgagcatgggtgtgcccttggggtaagccagagcctggggtgttctctttggtgttacacagcccaagaggactgagactggcacttagcccaagaggtctgagccctggtgtgtttccagatcgatcctggattcactcactcactcattccttcactcatccagccacctaaaaacatttactgaccatgtactacgtgccagctctagttttcagccttgggaggttttattctgacttcctctgattttggcatgtggagacactcctataaggagagttcaagcctgtgggagtagaaaaatctcattcccagagtcagaggagaagagacatgtaccttgaccatcgtccttcctctcaagctagccagagggtgggagcctaaggaagcgtggggtagcagatggagtaatggtcacgaggtccagacccactcccaaagctcagacttgccaggctccctttctcttcttccccaggtccttcctttaggtctggttgttgcaccatctgcttggttggctggcagctgagagccctgctgtgggagagcgaagggggtcaaaggaagacttgaagcacagagggctagggaggtggggtacatttctctgagcagtcagggtgggaagaaagaatgcaagagtggactgaatgtgcctaatggagaagacccacgtgctaggggatgaggggcttcctgggtcctgttccctaccccatttgtggtcacagccatgaagtcaccgggatgaacctatccttccagtggctcgctccctgtagctctgcctccctctccatatctccttcccctacacctccctccccacacctccctactcccctgggcatcttctggcttgactggatggaaggagacttaggaacctaccagttggccatgatgtcttttcttctttttcttttttttaacaaaacagaacaaaaccaaaaaatgtccaaaaaaaaaaaaaaaccaaaaatccaaaaaagaaccaaaaacaaaatcaaccatatgatgcgccagttacaagtcaatggccgtaagtaacctactatgtgtgggtgaaaagaaggtggaaacccaatttaagtctc

SEQ ID NO: 441446 - DNA, 1466 bp, Homo sapiens
taaaatcgagctcggtaccgggtggggagtacggaatcggcaacttccacgcccaagcagtgtcacccagctctggatgggcagcgtggcaagtgctggtgtgtggaccggaagacgggggtgaagcttccggggggcctggagccaaagggggagctggactgccaccagctggctgacagctttcgagagtgaggcctgccagcaggccagggactcagcgtcccctgctactcctgtgctctggaggctgcagagctgacccagagtggagtctgagtctgagtcctgtctctgcctgcggcccagaagtttccctcaaatgcgcgtgtgcacgtgtgcgtgtgcgtgcgtgtgtgtgtgtttgtgagcatgggtgtgcccttggggtaagccagagcctggggtgttctctttggtgttacacagcccaagaggactgagactggcacttagcccaagaggtctgagccctggtgtgtttccagatcgatcctggattcactcactcactcattccttcactcatccagccacctaaaaacatttactgaccatgtactacgtgccagctctagttttcagccttgggaggttttattctgacttcctctgattttggcatgtggagacactcctataaggagagttcaagcctgtgggagtagaaaaatctcattcccagagtcagaggagaagagacatgtaccttgaccatcgtccttcctctcaagctagccagagggtgggagcctaaggaagcgtggggtagcagatggagtaatggtcacgaggtccagacccactcccaaagctcagacttgccaggctccctttctcttcttccccaggtccttcctttaggtctggttgttgcaccatctgcttggttggctggcagctgagagccctgctgtgggagagcgaagggggtcaaaggaagacttgaagcacagagggctagggaggtggggtacatttctctgagcagtcagggtgggaagaaagaatgcaagagtggactgaatgtgcctaatggagaagacccacgtgctaggggatgaggggcttcctgggtcctgttccctaccccatttgtggtcacagccatgaagtcaccgggatgaacctatccttccagtggctcgctccctgtagctctgcctccctctccatatctccttcccctacacctccctccccacacctccctactcccctgggcatcttctggcttgactggatggaaggagacttaggaacctaccagttggccatgatgtcttttcttctttttcttttttttaacaaaacagaacaaaaccaaaaaatgtccaaaaaaaaaaaaaagacatcatggccaactggtaggttcctaagtctccttccatccagtcaagccatgatgtcttttcttctttttcttttttttaacaaaacagaacaaaaccaaaaaatgtccagaa

SEQ ID NO: 441447 - DNA, 1351 bp, Homo sapiens
ctaatcgagctcggctaccagttcgacggagactctcgagagtggactgccaccagctggctgacagctttcgagagtgaggcctgccagcaggccagggactcagcgtcccctgctactcctgtgctctggaggctgcagagctgacccagagtggagtctgagtctgagtcctgtctctgcctgcggcccagaagtttccctcaaatgcgcgtgtgcacgtgtgcgtgtgcgtgcgtgtgtgtgtgtttgtgagcatgggtgtgcccttggggtaagccagagcctggggtgttctctttggtgttacacagcccaagaggactgagactggcacttagcccaagaggtctgagccctggtgtgtttccagatcgatcctggattcactcactcactcattccttcactcatccagccacctaaaaacatttactgaccatgtactacgtgccagctctagttttcagccttgggaggttttattctgacttcctctgattttggcatgtggagacactcctataaggagagttcaagcctgtgggagtagaaaaatctcattcccagagtcagaggagaagagacatgtaccttgaccatcgtccttcctctcaagctagccagagggtgggagcctaaggaagcgtggggtagcagatggagtaatggtcacgaggtccagacccactcccaaagctcagacttgccaggctccctttctcttcttccccaggtccttcctttaggtctggttgttgcaccatctgcttggttggctggcagctgagagccctgctgtgggagagcgaagggggtcaaaggaagacttgaagcacagagggctagggaggtggggtacatttctctgagcagtcagggtgggaagaaagaatgcaagagtggactgaatgtgcctaatggagaagacccacgtgctaggggatgaggggcttcctgggtcctgttccctaccccatttgtggtcacagccatgaagtcaccgggatgaacctatccttccagtggctcgctccctgtagctctgcctccctctccatatctccttcccctacacctccctccccacacctccctactcccctgggcatcttctggcttgactggatggaaggagacttaggaacctaccagttggccatgatgtcttttcttctttttcttttttttaacaaaacagaacaaaaccaaaaaatgtccaaaaaaaaaaaaaagacatcatggccaactggtaggttcctaagtctccttccatccagtcaagccatgatgtcttttcttctttttcttttttttaacaaaacagaacaaaaccaaaaaatgtccagaa

SEQ ID NO: 441448 - DNA, 1344 bp, Homo sapiens
  misc_feature (33)..(33): n is a, c, g, or t
atcagctcggcccagtttacggagactctcganagtggactgccaccagctggctgacagctttcgagagtgaggcctgccagcaggccagggactcagcgtcccctgctactcctgtgctctggaggctgcagagctgacccagagtggagtctgagtctgagtcctgtctctgcctgcggcccagaagtttccctcaaatgcgcgtgtgcacgtgtgcgtgtgcgtgcgtgtgtgtgtgtttgtgagcatgggtgtgcccttggggtaagccagagcctggggtgttctctttggtgttacacagcccaagaggactgagactggcacttagcccaagaggtctgagccctggtgtgtttccagatcgatcctggattcactcactcactcattccttcactcatccagccacctaaaaacatttactgaccatgtactacgtgccagctctagttttcagccttgggaggttttattctgacttcctctgattttggcatgtggagacactcctataaggagagttcaagcctgtgggagtagaaaaatctcattcccagagtcagaggagaagagacatgtaccttgaccatcgtccttcctctcaagctagccagagggtgggagcctaaggaagcgtggggtagcagatggagtaatggtcacgaggtccagacccactcccaaagctcagacttgccaggctccctttctcttcttccccaggtccttcctttaggtctggttgttgcaccatctgcttggttggctggcagctgagagccctgctgtgggagagcgaagggggtcaaaggaagacttgaagcacagagggctagggaggtggggtacatttctctgagcagtcagggtgggaagaaagaatgcaagagtggactgaatgtgcctaatggagaagacccacgtgctaggggatgaggggcttcctgggtcctgttccctaccccatttgtggtcacagccatgaagtcaccgggatgaacctatccttccagtggctcgctccctgtagctctgcctccctctccatatctccttcccctacacctccctccccacacctccctactcccctgggcatcttctggcttgactggatggaaggagacttaggaacctaccagttggccatgatgtcttttcttctttttcttttttttaacaaaacagaacaaaaccaaaaaatgtccaaaaaaaaaaaaaagacatcatggccaactggtaggttcctaagtctccttccatccagtcaagccatgatgtcttttcttctttttcttttttttaacaaaacagaacaaaaccaaaaaatgtccagaa

SEQ ID NO: 441449 - DNA, 1375 bp, Homo sapiens
  misc_feature (45)..(45): n is a, c, g, or t
aatttgggggcaaataaccggagtaggtttgttcctgtgccttgncgagtcgcggcctgctgggaatggactgccaccagctggctgacagctttcgagagtgaggcctgccagcaggccagggactcagcgtcccctgctactcctgtgctctggaggctgcagagctgacccagagtggagtctgagtctgagtcctgtctctgcctgcggcccagaagtttccctcaaatgcgcgtgtgcacgtgtgcgtgtgcgtgcgtgtgtgtgtgtttgtgagcatgggtgtgcccttggggtaagccagagcctggggtgttctctttggtgttacacagcccaagaggactgagactggcacttagcccaagaggtctgagccctggtgtgtttccagatcgatcctggattcactcactcactcattccttcactcatccagccacctaaaaacatttactgaccatgtactacgtgccagctctagttttcagccttgggaggttttattctgacttcctctgattttggcatgtggagacactcctataaggagagttcaagcctgtgggagtagaaaaatctcattcccagagtcagaggagaagagacatgtaccttgaccatcgtccttcctctcaagctagccagagggtgggagcctaaggaagcgtggggtagcagatggagtaatggtcacgaggtccagacccactcccaaagctcagacttgccaggctccctttctcttcttccccaggtccttcctttaggtctggttgttgcaccatctgcttggttggctggcagctgagagccctgctgtgggagagcgaagggggtcaaaggaagacttgaagcacagagggctagggaggtggggtacatttctctgagcagtcagggtgggaagaaagaatgcaagagtggactgaatgtgcctaatggagaagacccacgtgctaggggatgaggggcttcctgggtcctgttccctaccccatttgtggtcacagccatgaagtcaccgggatgaacctatccttccagtggctcgctccctgtagctctgcctccctctccatatctccttcccctacacctccctccccacacctccctactcccctgggcatcttctggcttgactggatggaaggagacttaggaacctaccagttggccatgatgtcttttcttctttttcttttttttaacaaaacagaacaaaaccaaaaaatgtccaaaaaaaaaaaaaagacatcatggccaactggtaggttcctaagtctccttccatccagtcaagccatgatgtcttttcttctttttcttttttttaacaaaacagaacaaaaccaaaaaatgtccagaa

SEQ ID NO: 441450 - DNA, 1361 bp, Homo sapiens
ctcggtacccagttcgacggagactctctagttcgacggagactctcgagagtggactgccaccagctggctgacagctttcgagagtgaggcctgccagcaggccagggactcagcgtcccctgctactcctgtgctctggaggctgcagagctgacccagagtggagtctgagtctgagtcctgtctctgcctgcggcccagaagtttccctcaaatgcgcgtgtgcacgtgtgcgtgtgcgtgcgtgtgtgtgtgtttgtgagcatgggtgtgcccttggggtaagccagagcctggggtgttctctttggtgttacacagcccaagaggactgagactggcacttagcccaagaggtctgagccctggtgtgtttccagatcgatcctggattcactcactcactcattccttcactcatccagccacctaaaaacatttactgaccatgtactacgtgccagctctagttttcagccttgggaggttttattctgacttcctctgattttggcatgtggagacactcctataaggagagttcaagcctgtgggagtagaaaaatctcattcccagagtcagaggagaagagacatgtaccttgaccatcgtccttcctctcaagctagccagagggtgggagcctaaggaagcgtggggtagcagatggagtaatggtcacgaggtccagacccactcccaaagctcagacttgccaggctccctttctcttcttccccaggtccttcctttaggtctggttgttgcaccatctgcttggttggctggcagctgagagccctgctgtgggagagcgaagggggtcaaaggaagacttgaagcacagagggctagggaggtggggtacatttctctgagcagtcagggtgggaagaaagaatgcaagagtggactgaatgtgcctaatggagaagacccacgtgctaggggatgaggggcttcctgggtcctgttccctaccccatttgtggtcacagccatgaagtcaccgggatgaacctatccttccagtggctcgctccctgtagctctgcctccctctccatatctccttcccctacacctccctccccacacctccctactcccctgggcatcttctggcttgactggatggaaggagacttaggaacctaccagttggccatgatgtcttttcttctttttcttttttttaacaaaacagaacaaaaccaaaaaatgtccaaaaaaaaaaaaaagacatcatggccaactggtaggttcctaagtctccttccatccagtcaagccatgatgtcttttcttctttttcttttttttaacaaaacagaacaaaaccaaaaaatgtccagaa

SEQ ID NO: 441451 - DNA, 1212 bp, Homo sapiens
aggactctgtgctctggaggctgcgagctgaccagatggtcgtcctgcggcccagaagtttccctcaaatgcgcgtgtgcacgtgtgcgtgtgcgtgcgtgtgtgtgtgtttgtgagcatgggtgtgcccttggggtaagccagagcctggggtgttctctttggtgttacacagcccaagaggactgagactggcacttagcccaagaggtctgagccctggtgtgtttccagatcgatcctggattcactcactcactcattccttcactcatccagccacctaaaaacatttactgaccatgtactacgtgccagctctagttttcagccttgggaggttttattctgacttcctctgattttggcatgtggagacactcctataaggagagttcaagcctgtgggagtagaaaaatctcattcccagagtcagaggagaagagacatgtaccttgaccatcgtccttcctctcaagctagccagagggtgggagcctaaggaagcgtggggtagcagatggagtaatggtcacgaggtccagacccactcccaaagctcagacttgccaggctccctttctcttcttccccaggtccttcctttaggtctggttgttgcaccatctgcttggttggctggcagctgagagccctgctgtgggagagcgaagggggtcaaaggaagacttgaagcacagagggctagggaggtggggtacatttctctgagcagtcagggtgggaagaaagaatgcaagagtggactgaatgtgcctaatggagaagacccacgtgctaggggatgaggggcttcctgggtcctgttccctaccccatttgtggtcacagccatgaagtcaccgggatgaacctatccttccagtggctcgctccctgtagctctgcctccctctccatatctccttcccctacacctccctccccacacctccctactcccctgggcatcttctggcttgactggatggaaggagacttaggaacctaccagttggccatgatgtcttttcttctttttcttttttttaacaaaacagaacaaaaccaaaaaatgtccaaaaaaaaaaaaaagacatcatggccaactggtaggttcctaagtctccttccatccagtcaagccatgatgtcttttcttctttttcttttttttaacaaaacagaacaaaaccaaaaaatgtccagaa

SEQ ID NO: 441452 - DNA, 964 bp, Homo sapiens
tagcgacgccagaggaccccgttacgctcagccacctaaaaacatttactgaccatgtactacgtgccagctctagttttcagccttgggaggttttattctgacttcctctgattttggcatgtggagacactcctataaggagagttcaagcctgtgggagtagaaaaatctcattcccagagtcagaggagaagagacatgtaccttgaccatcgtccttcctctcaagctagccagagggtgggagcctaaggaagcgtggggtagcagatggagtaatggtcacgaggtccagacccactcccaaagctcagacttgccaggctccctttctcttcttccccaggtccttcctttaggtctggttgttgcaccatctgcttggttggctggcagctgagagccctgctgtgggagagcgaagggggtcaaaggaagacttgaagcacagagggctagggaggtggggtacatttctctgagcagtcagggtgggaagaaagaatgcaagagtggactgaatgtgcctaatggagaagacccacgtgctaggggatgaggggcttcctgggtcctgttccctaccccatttgtggtcacagccatgaagtcaccgggatgaacctatccttccagtggctcgctccctgtagctctgcctccctctccatatctccttcccctacacctccctccccacacctccctactcccctgggcatcttctggcttgactggatggaaggagacttaggaacctaccagttggccatgatgtcttttcttctttttcttttttttaacaaaacagaacaaaaccaaaaaatgtccaaaaaaaaaaaaaagacatcatggccaactggtaggttcctaagtctccttccatccagtcaagccatgatgtcttttcttctttttcttttttttaacaaaacagaacaaaaccaaaaaatgtccagaa

SEQ ID NO: 441453 - DNA, 965 bp, Homo sapiens
ggggtgctcagaggatccccgtcacgctccagccacctaaaaacatttactgaccatgtactacgtgccagctctagttttcagccttgggaggttttattctgacttcctctgattttggcatgtggagacactcctataaggagagttcaagcctgtgggagtagaaaaatctcattcccagagtcagaggagaagagacatgtaccttgaccatcgtccttcctctcaagctagccagagggtgggagcctaaggaagcgtggggtagcagatggagtaatggtcacgaggtccagacccactcccaaagctcagacttgccaggctccctttctcttcttccccaggtccttcctttaggtctggttgttgcaccatctgcttggttggctggcagctgagagccctgctgtgggagagcgaagggggtcaaaggaagacttgaagcacagagggctagggaggtggggtacatttctctgagcagtcagggtgggaagaaagaatgcaagagtggactgaatgtgcctaatggagaagacccacgtgctaggggatgaggggcttcctgggtcctgttccctaccccatttgtggtcacagccatgaagtcaccgggatgaacctatccttccagtggctcgctccctgtagctctgcctccctctccatatctccttcccctacacctccctccccacacctccctactcccctgggcatcttctggcttgactggatggaaggagacttaggaacctaccagttggccatgatgtcttttcttctttttcttttttttaacaaaacagaacaaaaccaaaaaatgtccaaaaaaaaaaaaaagacatcatggccaactggtaggttcctaagtctccttccatccagtcaagccatgatgtcttttcttctttttcttttttttaacaaaacagaacaaaaccaaaaaatgtccagaa

SEQ ID NO: 441454 - DNA, 1922 bp, Homo sapiens
ggtataaagtccgggggagccggtcccgggcagccgctcagccccctgcccctcgccgcccgccgcctgcctgggccgggccgaggatgcggcgcacgcctcggcggccaggcttgctcccctccggcacgcctgctaacttcccccgctacgtccccgttcgcccgccgggccgccccgtctccccgcgccctccgggtcgggtcctccaggagcgccaggcgctgccgccgtgtgccctccgccgctcgcccgcgcgcccgcgctccccgcctgcgcccagcgccccgcgcccgcgcccagtcctcgggcggtcatgctgcccctctgcctcgtggccgccctgctgctggccgccgggcccgggccgagcctgggcgacgaagccatccactgcccgccctgctccgaggagaagctggcgcgctgccgcccccccgtgggctgcgaggagctggtgcgagagccgggctgcggctgttgcgccacttgcgccctgggcttggggatgccctgcggggtgtacaccccccgttgcggctcgggcctgcgctgctacccgccccgaggggtggagaagcccctgcacacactgatgcacgggcaaggcgtgtgcatggagctggcggagatcgaggccatccaggaaagcctgcagccctctgacaaggacgagggtgaccaccccaacaacagcttcagcccctgtagcgcccatgaccgcaggtgcctgcagaagcacttcgccaaaattcgagaccggagcaccagtgggggcaagatgaaggtcaatggggcgccccgggaggatgcccggcctgtgccccagggctcctgccagagcgagctgcaccgggcgctggagcggctggccgcttcacagagccgcacccacgaggacctctacatcatccccatccccaactgcgaccgcaacggcaacttccaccccaagcagtgtcacccagctctggatgggcagcgtggcaagtgctggtgtgtggaccggaagacgggggtgaagcttccggggggcctggagccaaagggggagctggactgccaccagctggctgacagctttcgagagtgaggcctgccagcaggccagggactcagcgtcccctgctactcctgtgctctggaggctgcagagctgacccagagtggagtctgagtctgagtcctgtctctgcctgcggcccagaagtttccctcaaatgcgcgtgtgcacgtgtgcgtgtgcgtgcgtgtgtgtgtgtttgtgagcatgggtgtgcccttggggtaagccagagcctggggtgttctctttggtgttacacagcccaagaggactgagactggcacttagcccaagaggtctgagccctggtgtgtttccagatcgatcctggattcactcactcactcattccttcactcatccagccacctaaaaacatttactgaccatgtactacgtgccagctctagttttcagccttgggaggttttattctgacttcctctgattttggcatgtggagacactcctataaggagagttcaagcctgtgggagtagaaaaatctcattcccagagtcagaggagaagagacatgtaccttgaccatcgtccttcctctcaagctagccagagggtgggagcctaaggaagcgtggggtagcagatggagtaatggtcacgaggtccagacccactcccaaagctcagacttgccaggctccctttctcttcttccccaggtccttcctttaggtctggttgttgcaccatctgcttggttggctggcagctgagagccctgctgtgggagagcgaagggggtcaaaggaagacttgaagcacagaggcggctggccgcttcacagagccgcacccacgaggacctctacatcatccccatccccaaccgcat

SEQ ID NO: 441455 - DNA, 2319 bp, Homo sapiens
ggtataaagtccgggggagccggtcccgggcagccgctcagccccctgcccctcgccgcccgccgcctgcctgggccgggccgaggatgcggcgcacgcctcggcggccaggcttgctcccctccggcacgcctgctaacttcccccgctacgtccccgttcgcccgccgggccgccccgtctccccgcgccctccgggtcgggtcctccaggagcgccaggcgctgccgccgtgtgccctccgccgctcgcccgcgcgcccgcgctccccgcctgcgcccagcgccccgcgcccgcgcccagtcctcgggcggtcatgctgcccctctgcctcgtggccgccctgctgctggccgccgggcccgggccgagcctgggcgacgaagccatccactgcccgccctgctccgaggagaagctggcgcgctgccgcccccccgtgggctgcgaggagctggtgcgagagccgggctgcggctgttgcgccacttgcgccctgggcttggggatgccctgcggggtgtacaccccccgttgcggctcgggcctgcgctgctacccgccccgaggggtggagaagcccctgcacacactgatgcacgggcaaggcgtgtgcatggagctggcggagatcgaggccatccaggaaagcctgcagccctctgacaaggacgagggtgaccaccccaacaacagcttcagcccctgtagcgcccatgaccgcaggtgcctgcagaagcacttcgccaaaattcgagaccggagcaccagtgggggcaagatgaaggtcaatggggcgccccgggaggatgcccggcctgtgccccagggctcctgccagagcgagctgcaccgggcgctggagcggctggccgcttcacagagccgcacccacgaggacctctacatcatccccatccccaactgcgaccgcaacggcaacttccaccccaagcagtgtcacccagctctggatgggcagcgtggcaagtgctggtgtgtggaccggaagacgggggtgaagcttccggggggcctggagccaaagggggagctggactgccaccagctggctgacagctttcgagagtgaggcctgccagcaggccagggactcagcgtcccctgctactcctgtgctctggaggctgcagagctgacccagagtggagtctgagtctgagtcctgtctctgcctgcggcccagaagtttccctcaaatgcgcgtgtgcacgtgtgcgtgtgcgtgcgtgtgtgtgtgtttgtgagcatgggtgtgcccttggggtaagccagagcctggggtgttctctttggtgttacacagcccaagaggactgagactggcacttagcccaagaggtctgagccctggtgtgtttccagatcgatcctggattcactcactcactcattccttcactcatccagccacctaaaaacatttactgaccatgtactacgtgccagctctagttttcagccttgggaggttttattctgacttcctctgattttggcataaatctcattcccagagtcagaggagaagagacatgtaccttgaccatcgtccttcctctcaagctagccagagggtgggagcctaaggaagcgtggggtagcagatggagtaatggtcacgaggtccagacccactcccaaagctcagacttgccaggctccctttctcttcttccccaggtccttcctttaggtctggttgttgcaccatctgcttggttggctggcagctgagagccctgctgtgggagagcgaagggggtcaaaggaagacttgaagcacagagggctagggaggtggggtacatttctctgagcagtcagggtgggaagaaagaatgcaagagtggactgaatgtgcctaatggagaagacccacgtgctaggggatgaggggcttcctgggtcctgttccctaccccatttgtggtcacagccatgaagtcaccgggatgaacctatccttccagtggctcgctccctgtagctctgcctccctctccatatctccttcccctacacctccctccccacacctccctactcccctgggcatcttctggcttgactggatggaaggagacttaggaacctaccagttggccatgatgtcttttcttctttttcttttttttaacaaaacagaacaaaaccaaaaaatgtccaaaaaaaaaaaaaagacatcatggccaactggtaggttcctaagtctccttccatccagtcaagccatgatgtcttttcttctttttcttttttttaacaaaacagaacaaaaccaaaaaatgtccagaa

SEQ ID NO: 441456 - DNA, 2224 bp, Homo sapiens
ggtataaagtccgggggagccggtcccgggcagccgctcagccccctgcccctcgccgcccgccgcctgcctgggccgggccgaggatgcggcgcacgcctcggcggccaggcttgctcccctccggcacgcctgctaacttcccccgctacgtccccgttcgcccgccgggccgccccgtctccccgcgccctccgggtcgggtcctccaggagcgccaggcgctgccgccgtgtgccctccgccgctcgcccgcgcgcccgcgctccccgcctgcgcccagcgccccgcgcccgcgcccagtcctcgggcggtcatgctgcccctctgcctcgtggccgccctgctgctggccgccgggcccgggccgagcctgggcgacgaagccatccactgcccgccctgctccgaggagaagctggcgcgctgccgcccccccgtgggctgcgaggagctggtgcgagagccgggctgcggctgttgcgccacttgcgccctgggcttggggatgccctgcggggtgtacaccccccgttgcggctcgggcctgcgctgctacccgccccgaggggtggagaagcccctgcacacactgatgcacgggcaaggcgtgtgcatggagctggcggagatcgaggccatccaggaaagcctgcagccctctgacaaggacgagggtgaccaccccaacaacagcttcagcccctgtagcgcccatgaccgcaggtgcctgcagaagcacttcgccaaaattcgagaccggagcaccagtgggggcaagatgaaggtcaatggggcgccccgggaggatgcccggcctgtgccccagggctcctgccagagcgagctgcaccgggcgctggagcggctggccgcttcacagagccgcacccacgaggacctctacatcatccccatccccaactgcgaccgcaacggcaacttccaccccaagcagtgtcacccagctctggatgggcagcgtggcaagtgctggtgtgtggaccggaagacgggggtgaagcttccggggggcctggagccaaagggggagctggactgccaccagctggctgacagctttcgagagtgaggcctgccagcaggccagggactcagcgtcccctgctactcctgtgctctggaggctgcagagctgacccagagtggagtctgagtctgagtcctgtctctgcctgcggcccagaagtttccctcaaatgcgcgtgtgcacgtgtgcgtgtgcgtgcgtgtgtgtgtgtttgtgagcatgggtgtgcccttggggtaagccagagcctggggtgttctctttggtgttacacagcccaagaggactgagactggcacttagcccaagaggtctgagccctggtgtgtttccagatcgatcctggattcactcactcactcattccttcactcatccagccacctaaaaacatttactgaccatgtactacgtgccagctctagttttcagccttgggaggttttattctgacttcctctgattttggcatgtggagacactcctataaggagagttcaagcctgtgggagtagaaaaatctcattcccagagtcagaggagaagagacatgtaccttgaccatcgtccttcctctcaagctagccagagggtgggagcctaaggaagcgtggggtagcagatggagtaatggtcacgaggtccagacccactcccaaagctcaggctagggaggtggggtacatttctctgagcagtcagggtgggaagaaagaatgcaagagtggactgaatgtgcctaatggagaagacccacgtgctaggggatgaggggcttcctgggtcctgttccctaccccatttgtggtcacagccatgaagtcaccgggatgaacctatccttccagtggctcgctccctgtagctctgcctccctctccatatctccttcccctacacctccctccccacacctccctactcccctgggcatcttctggcttgactggatggaaggagacttaggaacctaccagttggccatgatgtcttttcttctttttcttttttttaacaaaacagaacaaaaccaaaaaatgtccaaaaaaaaaaaaaagacatcatggccaactggtaggttcctaagtctccttccatccagtcaagccatgatgtcttttcttctttttcttttttttaacaaaacagaacaaaaccaaaaaatgtccagaa

SEQ ID NO: 441457 - DNA, 1775 bp, Homo sapiens
ggtataaagtccgggggagccggtcccgggcagccgctcagccccctgcccctcgccgcccgccgcctgcctgggccgggccgaggatgcggcgcacgcctcggcggccaggcttgctcccctccggcacgcctgctaacttcccccgctacgtccccgttcgcccgccgggccgccccgtctccccgcgccctccgggtcgggtcctccaggagcgccaggcgctgccgccgtgtgccctccgccgctcgcccgcgcgcccgcgctccccgcctgcgcccagcgccccgcgcccgcgcccagtcctcgggcggtcatgctgcccctctgcctcgtggccgccctgctgctggccgccgggcccgggccgagcctgggcgacgaagccatccactgcccgccctgctccgaggagaagctggcgcgctgccgcccccccgtgggctgcgaggagctggtgcgagagccgggctgcggctgttgcgccacttgcgccctgggcttggggatgccctgcggggtgtacaccccccgttgcggctcgggcctgcgctgctacccgccccgaggggtggagaagcccctgcacacactgatgcacgggcaaggcgtgtgcatggagctggcggagatcgaggccatccaggaaagcctgcagccctctgacaaggacgagggtgaccaccccaacaacagcttcagcccctgtagcgcccatgaccgcaggtgcctgcagaagcacttcgccaaaattcgagaccggagcaccagtgggggcaagatgaaggtcaatggggcgccccgggaggatgcccggcctgtgccccagggctcctgccagagcgagctgcaccgggcgctggagcggctggccgcttcacagagccgcacccacgaggacctctacatcatccccatccccaactgcgaccgcaacggcaacttccaccccaagcagtgtcacccagctctggatgggcagcgtggcaagtgctggtgtgtggaccggaagacgggggtgaagcttccggggggcctggagccaaagggggagctggactgccaccagctggctgacagctttcgagagtgaggcctgccagcaggccagggactcagcgtcccctgctactcctgtgctctggaggctgcagagctgacccagagtggagtctgagtctgagtcctgtctctgcctgcggcccagaagtttccctcaaatgcgcgtgtgcacgtgtgcgtgtgcgtgcgtgtgtgtgtgtttgtgagcatgggtgtgcccttggggtaagccagagcctggggtgttctctttggtgttacacagcccaagaggactgagactggcacttagcccaagaggtctgagccctggtgtgtttccagatcgatcctggattcactcactcactcattccttcactcatccagccacctaaaaacatttactgaccatgtactacgtgccagctctagttttcagccttgggaggttttattctgacttcctctgattttggcatgtggagacactcctataaggagagttcaagcctgtgggagtagaaaaatctcattcccagagtcagaggagaagagacatgtaccttgaccatcgtccttcctctcaagctagccagagggtgggagcctaaggaagcgtggggtagcagatggagtaatggtcacgaggtccagacccactcccaaagctcagcctttgacccccttcgctctcccacagcagggctctcagctgccagccaacctcgtgc

SEQ ID NO: 441458 - DNA, 710 bp, Homo sapiens
tgagggacgaaaacaaaggattttagagagcatcctatatcaaccctcttgaaacaagaggaaagcaggaaaaggaaggaaaaagatcttccaaggtccttcctttaggtctggttgttgcaccatctgcttggttggctggcagctgagagccctgctgtgggagagcgaagggggtcaaaggaagacttgaagcacagagggctagggaggtggggtacatttctctgagcagtcagggtgggaagaaagaatgcaagagtggactgaatgtgcctaatggagaagacccacgtgctaggggatgaggggcttcctgggtcctgttccctaccccatttgtggtcacagccatgaagtcaccgggatgaacctatccttccagtggctcgctccctgtagctctgcctccctctccatatctccttcccctacacctccctccccacacctccctactcccctgggcatcttctggcttgactggatggaaggagacttaggaacctaccagttggccatgatgtcttttcttctttttcttttttttaacaaaacagaacaaaaccaaaaaatgtccaaaaaaaaaaaaaagacatcatggccaactggtaggttcctaagtctccttccatccagtcaagccatgatgtcttttcttctttttcttttttttaacaaaacagaacaaaaccaaaaaatgtccagaa

SEQ ID NO: 441459 - DNA, 754 bp, Homo sapiens
cgcaacctgcggcccatgcgggagcggactgctgtccagggccagtacctgacagtggagcagctcacactagacttcatgctgcacaccaagtaccaggtggtctaccccttccccaccttccagcccgccttccagctcaagaaggaccaggtggtgctgctcaacaccagctactcccggtgggaagtcgacttcccaccgggggagagcgaagggggtcaaaggaagacttgaagcacagagggctagggaggtggggtacatttctctgagcagtcagggtgggaagaaagaatgcaagagtggactgaatgtgcctaatggagaagacccacgtgctaggggatgaggggcttcctgggtcctgttccctaccccatttgtggtcacagccatgaagtcaccgggatgaacctatccttccagtggctcgctccctgtagctctgcctccctctccatatctccttcccctacacctccctccccacacctccctactcccctgggcatcttctggcttgactggatggaaggagacttaggaacctaccagttggccatgatgtcttttcttctttttcttttttttaacaaaacagaacaaaaccaaaaaatgtccaaaaaaaaaaaaaagacatcatggccaactggtaggttcctaagtctccttccatccagtcaagccatgatgtcttttcttctttttcttttttttaacaaaacagaacaaaaccaaaaaatgtccagaa

SEQ ID NO: 441460 - DNA, 1429 bp, Homo sapiens
ggtataaagtccgggggagccggtcccgggcagccgctcagccccctgcccctcgccgcccgccgcctgcctgggccgggccgaggatgcggcgcacgcctcggcggccaggcttgctcccctccggcacgcctgctaacttcccccgctacgtccccgttcgcccgccgggccgccccgtctccccgcgccctccgggtcgggtcctccaggagcgccaggcgctgccgccgtgtgccctccgccgctcgcccgcgcgcccgcgctccccgcctgcgcccagcgccccgcgcccgcgcccagtcctcgggcggtcatgctgcccctctgcctcgtggccgccctgctgctggccgccgggcccgggccgagcctgggcgacgaagccatccactgcccgccctgctccgaggagaagctggcgcgctgccgcccccccgtgggctgcgaggagctggtgcgagagccgggctgcggctgttgcgccacttgcgccctgggcttggggatgccctgcggggtgtacaccccccgttgcggctcgggcctgcgctgctacccgccccgaggggtggagaagcccctgcacacactgatgcacgggcaaggcgtgtgcatggagctggcggagatcgaggccatccaggaaagcctgcagccctctgacaaggacgagggtgaccaccccaacaacagcttcagcccctgtagcgcccatgaccgcaggtgcctgcagaagcacttcgccaaaattcgagaccggagcaccagtgggggcaagatgaaggtcaatggggcgccccgggaggatgcccggcctgtgccccagggctcctgccagagcgagctgcaccgggcgctggagcggctggccgcttcacagagccgcacccacgaggacctctacatcatccccatccccaactgcgaccgcaacggcaacttccaccccaagcagtgtcacccagctctggatgggcagcgtggcaagtgctggtgtgtggaccggaagacgggggtgaagcttccggggggcctggagccaaagggggagctggactgccaccagctggctgacagctttcgagagtgaggcctgccagcaggccagggactcagcgtcccctgctactcctgtgctctggaggctgcagagctgacccagagtggagtctgagtctgagtcctgtctctgcctgcggcccagaagtttccctcaaatgcgcgtgtgcacgtgtgcgtgtgcgtgcgtgtgtgtgtgtttgtgagcatgggtgtgcccttggggtaagccagagcctggggtgttctctttggtgttacacagcccaagaggactgagactggcacttacgacgagcagtctgaagcctgcatgcctgccagtctgagatctagaagatactcaatcacacacaacgccacatga

SEQ ID NO: 441461 - DNA, 527 bp, Homo sapiens
  misc_feature (205)..(205): n is a, c, g, or t
ggccaaaaaaaaaaaaaaaaactataataacataatactaccgttctcggtctcatttgtgcgaagagaagaggttcaaaacaccaaagtaagactgacacctccacagaagtaccacatatcatggagaaaaaaagaggagtctacaagagaaaaaaacaaacaaaaaacccaccaccaaaaatttttttctagtttggtgggnccaccacccaacaactaacccaacctaacaaaatagcattccctaacacctccctccccacacctccctactcccctgggcatcttctggcttgactggatggaaggagacttaggaacctaccagttggccatgatgtcttttcttctttttcttttttttaacaaaacagaacaaaaccaaaaaatgtccaaaaaaaaaaaaaagacatcatggccaactggtaggttcctaagtctccttccatccagtcaagccatgatgtcttttcttctttttcttttttttaacaaaacagaacaaaaccaaaaaatgtccagaa

SEQ ID NO: 441462 - DNA, 962 bp, Homo sapiens
  misc_feature (840)..(840): n is a, c, g, or t
  misc_feature (878)..(878): n is a, c, g, or t
  misc_feature (882)..(882): n is a, c, g, or t
  misc_feature (887)..(887): n is a, c, g, or t
  misc_feature (889)..(889): n is a, c, g, or t
  misc_feature (892)..(892): n is a, c, g, or t
  misc_feature (897)..(897): n is a, c, g, or t
  misc_feature (955)..(955): n is a, c, g, or t
ggtataaagtccgggggagccggtcccgggcagccgctcagccccctgcccctcgccgcccgccgcctgcctgggccgggccgaggatgcggcgcacgcctcggcggccaggcttgctcccctccggcacgcctgctaacttcccccgctacgtccccgttcgcccgccgggccgccccgtctccccgcgccctccgggtcgggtcctccaggagcgccaggcgctgccgccgtgtgccctccgccgctcgcccgcgcgcccgcgctccccgcctgcgcccagcgccccgcgcccgcgcccagtcctcgggcggtcatgctgcccctctgcctcgtggccgccctgctgctggccgccgggcccgggccgagcctgggcgacgaagccatccactgcccgccctgctccgaggagaagctggcgcgctgccgcccccccgtgggctgcgaggagctggtgcgagagccgggctgcggctgttgcgccacttgcgccctgggcttggggatgccctgcggggtgtacaccccccgttgcggctcgggcctgcgctgctacccgccccgaggggtggagaagcccctgcacacactgatgcacgggcaaggcgtgtgcatggagctggcggagatcgaggccatccaggaaagcctgcagccctctgacaaggacgagggtgaccaccccaacaacagcttcagcccctgtagcgcccatgaccgcaggtgcctgcagaagcacttcgccaaaattcgagaccggagcaccagtgggggcaagatgaaggtcaatggggcgccccgggaggatgcccggcctgtgcccccggactcctgaangcgcgagctgccccgggcactggcaaggaaggccgctncccncaaananaancagcngcctctccctctaaacctcctccctggacgagccgggcctttcccccccgcgtgtcancaatttg

SEQ ID NO: 441463 - DNA, 711 bp, Homo sapiens
gtttccctgactttttaatgattgccattctaactgttgtgagatggtatctcattgtggttttgatttgcatttctctgatagccagtgatgatgagcattttttcatgtgtgtttggctgcataaatgtcttcttttgagaagtgtctgttcatatcctttgcccactttctgatggggttgtatgtttttttcttgtaaatttgtttgagttcattgtagattctggatattagccctttgtcagatgagtaggttgcgaaaattttctcccattttgtaggttgcctgtttactctgatggtagtttcttttgttgtgcaaaagctctttagtttaattagatccccttaagctgataagcaacttcagcaaagtctcaggatacaaaatcaatgtacaaaaatcacaagcattcttatacaccaataacagacaaacagagagccaaatcatgagtgaactcccattcacaattgcttcaaagagaataaaatacttaggaacctaccagttggccatgatgtcttttcttctttttcttttttttaacaaaacagaacaaaaccaaaaaatgtccaaaaaaaaaaaaaagacatcatggccaactggtaggttcctaagtctccttccatccagtcaagccatgatgtcttttcttctttttcttttttttaacaaaacagaacaaaaccaaaaaatgtccagaa

SEQ ID NO: 441464 - DNA, 924 bp, Homo sapiens
  misc_feature (752)..(752): n is a, c, g, or t
  misc_feature (767)..(767): n is a, c, g, or t
  misc_feature (855)..(855): n is a, c, g, or t
  misc_feature (871)..(871): n is a, c, g, or t
  misc_feature (920)..(920): n is a, c, g, or t
ggtataaagtccgggggagccggtcccgggcagccgctcagccccctgcccctcgccgcccgccgcctgcctgggccgggccgaggatgcggcgcacgcctcggcggccaggcttgctcccctccggcacgcctgctaacttcccccgctacgtccccgttcgcccgccgggccgccccgtctccccgcgccctccgggtcgggtcctccaggagcgccaggcgctgccgccgtgtgccctccgccgctcgcccgcgcgcccgcgctccccgcctgcgcccagcgccccgcgcccgcgcccagtcctcgggcggtcatgctgcccctctgcctcgtggccgccctgctgctggccgccgggcccgggccgagcctgggcgacgaagccatccactgcccgccctgctccgaggagaagctggcgcgctgccgcccccccgtgggctgcgaggagctggtgcgagagccgggctgcggctgttgcgccacttgcgccctgggcttggggatgccctgcggggtgtacaccccccgttgcggctcgggcctgcgctgctacccgccccgaggggtggagaagcccctgcacacactgatgcacgggcaaggcgtgtgcatggagctggcggagatcgaggccatccaggaaagcctgcagccctctgacaaggacgagggtgaccaccccaacaacagcttcagcccctgtagcgcccatgaccgcaggtgcctgcaggaaagcaacttttggnccaaaaaattcggangaacccgggaggccacccaagttgggggggggccaaaaggaatggaaaaggggtccaaattggggggggcggccccccccgggggaangggaattggccccccnggggcctttgttgggcccccccaaagggggcttttccctgggccccaanaaaa

SEQ ID NO: 441465 - DNA, 2364 bp, Homo sapiens
ggtataaagtccgggggagccggtcccgggcagccgctcagccccctgcccctcgccgcccgccgcctgcctgggccgggccgaggatgcggcgcacgcctcggcggccaggcttgctcccctccggcacgcctgctaacttcccccgctacgtccccgttcgcccgccgggccgccccgtctccccgcgccctccgggtcgggtcctccaggagcgccaggcgctgccgccgtgtgccctccgccgctcgcccgcgcgcccgcgctccccgcctgcgcccagcgccccgcgcccgcgcccagtcctcgggcggtcatgctgcccctctgcctcgtggccgccctgctgctggccgccgggcccgggccgagcctgggcgacgaagccatccactgcccgccctgctccgaggagaagctggcgcgctgccgcccccccgtgggctgcgaggagctggtgcgagagccgggctgcggctgttgcgccacttgcgccctgggcttggggatgccctgcggggtgtacaccccccgttgcggctcgggcctgcgctgctacccgccccgaggggtggagaagcccctgcacacactgatgcacgggcaaggcgtgtgcatggagctggcggagatcgaggccatccaggaaagcctgcagccctctgacaaggacgagggtgaccaccccaacaacagcttcagcccctgtagcgcccatgaccgcaggtgcctgcagaagcacttcgccaaaattcgagaccggagcaccagtgggggcaagatgaaggtcaatggggcgccccgggaggatgcccggcctgtgccccagggctcctgccagagcgagctgcaccgggcgctggagcggctggccgcttcacagagccgcacccacgaggacctctacatcatccccatccccaactgcgaccgcaacggcaacttccaccccaagcagtgtcacccagctctggatgggcagcgtggcaagtgctggtgtgtggaccggaagacgggggtgaagcttccggggggcctggagccaaagggggagctggactgccaccagctggctgacagctttcgagagtgaggcctgccagcaggccagggactcagcgtcccctgctactcctgtgctctggaggctgcagagctgacccagagtggagtctgagtctgagtcctgtctctgcctgcggcccagaagtttccctcaaatgcgcgtgtgcacgtgtgcgtgtgcgtgcgtgtgtgtgtgtttgtgagcatgggtgtgcccttggggtaagccagagcctggggtgttctctttggtgttacacagcccaagaggactgagactggcacttagcccaagaggtctgagccctggtgtgtttccagatcgatcctggattcactcactcactcattccttcactcatccagccacctaaaaacatttactgaccatgtactacgtgccagctctagttttcagccttgggaggttttattctgacttcctctgattttggcatgtggagacactcctataaggagagttcaagcctgtgggagtagaaaaatctcattcccagagtcagaggagaagagacatgtaccttgaccatcgtccttcctctcaagctagccagagggtgggagcctaaggaagcgtggggtagcagatggagtaatggtcacgaggtccagacccactcccaaagctcagacttgccaggctccctttctcttcttccccaggtccttcctttaggtctggttgttgcaccatctgcttggttggctggcagctgagagccctgctgtgggagagcgaagggggtcaaaggaagacttgaagcacagagggctagggaggtggggtacatttctctgagcagtcagggtgggaagaaagaatgcaagagtggactgaatgtgcctaatggagaagacccacgtgctaggggatgaggggcttcctgggtcctgttccctaccccatttgtggtcacagccatgaagtcaccgggatgaacctatccttccagtggctcgctccctgtagctctgcctccctctccatatctccttcccctacacctccctccccacacctccctactcccctgggcatcttctggcttgactggatggaaggagacttaggaacctaccagttggccatgatgtcttttcttctttttcttttttttaacaaaacagaacaaaaccaaaaaatgtccaaaaaaaaaaaaaagacatcatggccaactggtaggttcctaagtctccttccatccagtcaagccatgatgtcttttcttctttttcttttttttaacaaaacagaacaaaaccaaaaaatgtccagaa

SEQ ID NO: 441466 - DNA, 1977 bp, Homo sapiens
ggtataaagtccgggggagccggtcccgggcagccgctcagccccctgcccctcgccgcccgccgcctgcctgggccgggccgaggatgcggcgcacgcctcggcggccaggcttgctcccctccggcacgcctgctaacttcccccgctacgtccccgttcgcccgccgggccgccccgtctccccgcgccctccgggtcgggtcctccaggagcgccaggcgctgccgccgtgtgccctccgccgctcgcccgcgcgcccgcgctccccgcctgcgcccagcgccccgcgcccgcgcccagtcctcgggcggtcatgctgcccctctgcctcgtggccgccctgctgctggccgccgggcccgggccgagcctgggcgacgaagccatccactgcccgccctgctccgaggagaagctggcgcgctgccgcccccccgtgggctgcgaggagctggtgcgagagccgggctgcggctgttgcgccacttgcgccctgggcttggggatgccctgcggggtgtacaccccccgttgcggctcgggcctgcgctgctacccgccccgagggtgtcacccagctctggatgggcagcgtggcaagtgctggtgtgtggaccggaagacgggggtgaagcttccggggggcctggagccaaagggggagctggactgccaccagctggctgacagctttcgagagtgaggcctgccagcaggccagggactcagcgtcccctgctactcctgtgctctggaggctgcagagctgacccagagtggagtctgagtctgagtcctgtctctgcctgcggcccagaagtttccctcaaatgcgcgtgtgcacgtgtgcgtgtgcgtgcgtgtgtgtgtgtttgtgagcatgggtgtgcccttggggtaagccagagcctggggtgttctctttggtgttacacagcccaagaggactgagactggcacttagcccaagaggtctgagccctggtgtgtttccagatcgatcctggattcactcactcactcattccttcactcatccagccacctaaaaacatttactgaccatgtactacgtgccagctctagttttcagccttgggaggttttattctgacttcctctgattttggcatgtggagacactcctataaggagagttcaagcctgtgggagtagaaaaatctcattcccagagtcagaggagaagagacatgtaccttgaccatcgtccttcctctcaagctagccagagggtgggagcctaaggaagcgtggggtagcagatggagtaatggtcacgaggtccagacccactcccaaagctcagacttgccaggctccctttctcttcttccccaggtccttcctttaggtctggttgttgcaccatctgcttggttggctggcagctgagagccctgctgtgggagagcgaagggggtcaaaggaagacttgaagcacagagggctagggaggtggggtacatttctctgagcagtcagggtgggaagaaagaatgcaagagtggactgaatgtgcctaatggagaagacccacgtgctaggggatgaggggcttcctgggtcctgttccctaccccatttgtggtcacagccatgaagtcaccgggatgaacctatccttccagtggctcgctccctgtagctctgcctccctctccatatctccttcccctacacctccctccccacacctccctactcccctgggcatcttctggcttgactggatggaaggagacttaggaacctaccagttggccatgatgtcttttcttctttttcttttttttaacaaaacagaacaaaaccaaaaaatgtccaaaaaaaaaaaaaagacatcatggccaactggtaggttcctaagtctccttccatccagtcaagccatgatgtcttttcttctttttcttttttttaacaaaacagaacaaaaccaaaaaatgtccagaa

SEQ ID NO: 441467 - DNA, 2045 bp, Homo sapiens
  misc_feature (2023)..(2023): n is a, c, g, or t
  misc_feature (2025)..(2025): n is a, c, g, or t
  misc_feature (2040)..(2040): n is a, c, g, or t
ggtataaagtccgggggagccggtcccgggcagccgctcagccccctgcccctcgccgcccgccgcctgcctgggccgggccgaggatgcggcgcacgcctcggcggccaggcttgctcccctccggcacgcctgctaacttcccccgctacgtccccgttcgcccgccgggccgccccgtctccccgcgccctccgggtcgggtcctccaggagcgccaggcgctgccgccgtgtgccctccgccgctcgcccgcgcgcccgcgctccccgcctgcgcccagcgccccgcgcccgcgcccagtcctcgggcggtcatgctgcccctctgcctcgtggccgccctgctgctggccgccgggcccgggccgagcctgggcgacgaagccatccactgcccgccctgctccgaggagaagctggcgcgctgccgcccccccgtgggctgcgaggagctggtgcgagagccgggctgcggctgttgcgccacttgcgccctgggcttggggatgccctgcggggtgtacaccccccgttgcggctcgggcctgcgctgctacccgccccgaggggtggagaagcccctgcacacactgatgcacgggcaaggcgtgtgcatggagctggcggagatcgaggccatccaggaaagcctgcagccctctgacaaggacgagggtgaccaccccaacaacagcttcagcccctgtagcgcccatgaccgcaggtgcctgcagaagcacttcgccaaaattcgagaccggagcaccagtgggggcaagatgaaggtcaatggggcgccccgggaggatgcccggcctgtgccccagggctcctgccagagcgagctgcaccgggcgctggagcggctggccgcttcacagagccgcacccacgaggacctctacatcatccccatccccaactgcgaccgcaacggcaacttccaccccaagcagtgtcacccagctctggatgggcagcgtggcaagtgctggtgtgtggaccggaagacgggggtgaagcttccggggggcctggagccaaagggggagctggactgccaccagctggctgacagctttcgagagtgaggcctgccagcaggccagggactcagcgtcccctgctactcctgtgctctggaggctgcagagctgacccagagtggagtctgagtctgagtcctgtctctgcctgcggcccagaagtttccctcaaatgcgcgtgtgcacgtgtgcgtgtgcgtgcgtgtgtgtgtgtttgtgagcatgggtgtgcccttggggtaagccagagcctggggtgttctctttggtgttacacagcccaagaggactgagactggcacttagcccaagaggtctgagccctggtgtgtttccagatcgatcctggattcactcactcactcattccttcactcatccagccacctaaaaacatttactgaccatgtactacgtgccagctctagttttcagccttgggaggttttattctgacttcctctgattttggcatgtggagacactcctataaggagagttcaagcctgtgggagtagaaaaatctcattcccagagtcagaggagaagagacatgtaccttgaccatcgtccttcctctcaagctagccagagggtgggagcctaaggaagcgtggggtagcagatggagtaatggtcacgaggtccagacccactcccaaagctcagacttgccaggctccctttctcttcttccccaggtccttcctttaggtctggttgttgcaccatctgcttggttggctggcagctgagagccctgctgtgggagagcgaagggggtcaaaggaagacttgaagcacagagggctagggaggtggggtacatttctctgagcagtcagggtgggaagaaagaatgcaagagtggactgaatgtgcctaatggagaagacccacgtgctaggggatgaggggcttcctgggtcctgttccctaccccatttgtggtcacagcacgaagggggatgacananatcctctagagtcancccaa

SEQ ID NO: 441468 - DNA, 2212 bp, Homo sapiens
  misc_feature (2192)..(2192): n is a, c, g, or t
ggtataaagtccgggggagccggtcccgggcagccgctcagccccctgcccctcgccgcccgccgcctgcctgggccgggccgaggatgcggcgcacgcctcggcggccaggcttgctcccctccggcacgcctgctaacttcccccgctacgtccccgttcgcccgccgggccgccccgtctccccgcgccctccgggtcgggtcctccaggagcgccaggcgctgccgccgtgtgccctccgccgctcgcccgcgcgcccgcgctccccgcctgcgcccagcgccccgcgcccgcgcccagtcctcgggcggtcatgctgcccctctgcctcgtggccgccctgctgctggccgccgggcccgggccgagcctgggcgacgaagccatccactgcccgccctgctccgaggagaagctggcgcgctgccgcccccccgtgggctgcgaggagctggtgcgagagccgggctgcggctgttgcgccacttgcgccctgggcttggggatgccctgcggggtgtacaccccccgttgcggctcgggcctgcgctgctacccgccccgaggggtggagaagcccctgcacacactgatgcacgggcaaggcgtgtgcatggagctggcggagatcgaggccatccaggaaagcctgcagccctctgacaaggacgagggtgaccaccccaacaacagcttcagcccctgtagcgcccatgaccgcaggtgcctgcagaagcacttcgccaaaattcgagaccggagcaccagtgggggcaagatgaaggtcaatggggcgccccgggaggatgcccggcctgtgccccagggctcctgccagagcgagctgcaccgggcgctggagcggctggccgcttcacagagccgcacccacgaggacctctacatcatccccatccccaactgcgaccgcaacggcaacttccaccccaagcagtgtcacccagctctggatgggcagcgtggcaagtgctggtgtgtggaccggaagacgggggtgaagcttccggggggcctggagccaaagggggagctggactgccaccagctggctgacagctttcgagagtgaggcctgccagcaggccagggactcagcgtcccctgctactcctgtgctctggaggctgcagagctgacccagagtggagtctgagtctgagtcctgtctctgcctgcggcccagaagtttccctcaaatgcgcgtgtgcacgtgtgcgtgtgcgtgcgtgtgtgtgtgtttgtgagcatgggtgtgcccttggggtaagccagagcctggggtgttctctttggtgttacacagcccaagaggactgagactggcacttagcccaagaggtctgagccctggtgtgtttccagatcgatcctggattcactcactcactcattccttcactcatccagccacctaaaaacatttactgaccatgtactacgtgccagctctagttttcagccttgggaggttttattctgacttcctctgattttggcatgtggagacactcctataaggagagttcaagcctgtgggagtagaaaaatctcattcccagagtcagaggagaagagacatgtaccttgaccatcgtccttcctctcaagctagccagagggtgggagcctaaggaagcgtggggtagcagatggagtaatggtcacgaggtccagacccactcccaaagctcagacttgccaggctccctttctcttcttccccaggtccttcctttaggtctggttgttgcaccatctgcttggttggctggcagctgagagccctgctgtgtctccgtcgaacttctcaggtgatccgcctgcctcagccttcccaagtgttgggattacaggcatgagtcaccaagtcccgccatagatcttttttttttttcttaaccacctgacatatctttatttactgcctacaaacctgtatagatccctttctatagtataagcactaagtttagtgcaggaactttgttttacttgctactcaacctcccctagtatagaacagtgcaaaaatacctagtgaatattttttggatgaaaaaattacctagaatttttaaaaagatgaataaagttatacattggaagaaatggcattcataataactccaaatgagtggttaaacgaagtatgatttgataaactacanctgagagtctccgtcgaact

SEQ ID NO: 441469 - DNA, 1000 bp, Homo sapiens
agctcgcacccggagaggatccgcaccccccggacttgctctctgatgaagggcatgtcgttcagtgccccagcagtcagaagcagttcttgtggaactaaaacgaataatgttaccctcacaaaggaaatgttcttttactaagttattgctgattcttgaatgtctgttatataactgggtcggctatcaaggaggtgccctctggctagcttgagaggaaggacgatggacgacatgtaccttgaccatcgtccttcctctcaagctagccagagggtgggagcctaaggaagcgtggggtagcagatggagtaatggtcacgaggtccagacccactcccaaagctcagacttgccaggctccctttctcttcttccccaggtccttcctttaggtctggttgttgcaccatctgcttggttggctggcagctgagagccctgctgtgggagagcgaagggggtcaaaggaagacttgaagcacagagggctagggaggtggggtacatttctctgagcagtcagggtgggaagaaagaatgcaagagtggactgaatgtgcctaatggagaagacccacgtgctaggggatgaggggcttcctgggtcctgttccctaccccatttgtggtcacagccatgaagtcaccgggatgaacctatccttccagtggctcgctccctgtagctctgcctccctctccatatctccttcccctacacctccctccccacacctccctactcccctgggcatcttctggcttgactggatggaaggagacttaggaacctaccagttggccatgatgtcttttcttctttttcttttttttaacaaaacagaacaaaaccaaaaaatgtccaaaaaaaaaaaaaagacatcatggccaactggtaggttcctaagtctccttccatccagtcaagccatgatgtcttttcttctttttcttttttttaacaaaacagaacaaaaccaaaaaatgtccagaa

SEQ ID NO: 441470 - DNA, 1814 bp, Homo sapiens
ggtataaagtccgggggagccggtcccgggcagccgctcagccccctgcccctcgccgcccgccgcctgcctgggccgggccgaggatgcggcgcacgcctcggcggccaggcttgctcccctccggcacgcctgctaacttcccccgctacgtccccgttcgcccgccgggccgccccgtctccccgcgccctccgggtcgggtcctccaggagcgccaggcgctgccgccgtgtgccctccgccgctcgcccgcgcgcccgcgctccccgcctgcgcccagcgccccgcgcccgcgcccagtcctcgggcggtcatgctgcccctctgcctcgtggccgccctgctgctggccgccgggcccgggccgagcctgggcgacgaagccatccactgcccgccctgctccgaggagaagctggcgcgctgccgcccccccgtgggctgcgaggagctggtgcgagagccgggctgcggctgttgcgccacttgcgccctgggcttggggatgccctgcggggtgtacaccccccgttgcggctcgggcctgcgctgctacccgccccgaggggtggagaagcccctgcacacactgatgcacgggcaaggcgtgtgcatggagctggcggagatcgaggccatccaggaaagcctgcagccctctgacaaggacgagggtgaccaccccaacaacagcttcagcccctgtagcgcccatgaccgcaggtgcctgcagaagcacttcgccaaaattcgagaccggagcaccagtgggggcaagatgaaggtcaatggggcgccccgggaggatgcccggcctgtgccccagggctcctgccagagcgagctgcaccgggcgctggagcggctggccgcttcacagagccgcacccacgaggacctctacatcatccccatccccaactgcgaccgcaacggcaacttccaccccaagcagtgtcacccagctctggatgggcagcgtggcaagtgctggtgtgtggaccggaagacgggggtgaagcttccggggggcctggagccaaagggggagctggactgccaccagctggctgacagctttcgagagtgaggcctgccagcaggccagggactcagcgtcccctgctactcctgtgctctggaggctgcagagctgacccagagtggagtctgagtctgagtcctgtctctgcctgcggcccagaagtttccctcaaatgcgcgtgtgcacgtgtgcgtgtgcgtgcgtgtgtgtgtgtttgtgagcatgggtgtgcccttggggtaagccagagcctggggtgttctctttggtgttacacagcccaagaggactgagactggcacttagcccaagaggtctgagccctggtgtgtttccagatcgatcctggattcactcactcactcattccttcactcatccagccacctaaaaacatttactgaccatgtactacgtgccagctctagttttcagccttgggaggttttattctgacttcctctgattttggcatgtggagacactcctataaggagagttcaagcctgtgggagtagaaaaatctcattcccagagtcagaggagaagagacatgtaccttgaccatcgtccttcctctcaagctagccagagggtgggagcctaaggaagcgtggggtagcagatggagtaatggtcacgaggtccagacccactcccaaagctcaggcacaagtgtccaagctacggtcaggttatagctctggccatgacttataaatttggctctggtaacacttgtaccttgtatgcgctagcaactgca

SEQ ID NO: 441471 - DNA, 1573 bp, Homo sapiens
ggtataaagtccgggggagccggtcccgggcagccgctcagccccctgcccctcgccgcccgccgcctgcctgggccgggccgaggatgcggcgcacgcctcggcggccaggcttgctcccctccggcacgcctgctaacttcccccgctacgtccccgttcgcccgccgggccgccccgtctccccgcgccctccgggtcgggtcctccaggagcgccaggcgctgccgccgtgtgccctccgccgctcgcccgcgcgcccgcgctccccgcctgcgcccagcgccccgcgcccgcgcccagtcctcgggcggtcatgctgcccctctgcctcgtggccgccctgctgctggccgccgggcccgggccgagcctgggcgacgaagccatccactgcccgccctgctccgaggagaagctggcgcgctgccgcccccccgtgggctgcgaggagctggtgcgagagccgggctgcggctgttgcgccacttgcgccctgggcttggggatgccctgcggggtgtacaccccccgttgcggctcgggcctgcgctgctacccgccccgaggggtggagaagcccctgcacacactgatgcacgggcaaggcgtgtgcatggagctggcggagatcgaggccatccaggaaagcctgcagccctctgacaaggacgagggtgaccaccccaacaacagcttcagcccctgtagcgcccatgaccgcaggtgcctgcagaagcacttcgccaaaattcgagaccggagcaccagtgggggcaagatgaaggtcaatggggcgccccgggaggatgcccggcctgtgccccagggctcctgccagagcgagctgcaccgggcgctggagcggctggccgcttcacagagccgcacccacgaggacctctacatcatccccatccccaactgcgaccgcaacggcaacttccaccccaagcagtgtcacccagctctggatgggcagcgtggcaagtgctggtgtgtggaccggaagacgggggtgaagcttccggggggcctggagccaaagggggagctggactgccaccagctggctgacagctttcgagagtgaggcctgccagcaggccagggactcagcgtcccctgctactcctgtgctctggaggctgcagagctgacccagagtggagtctgagtctgagtcctgtctctgcctgcggcccagaagtttccctcaaatgcgcgtgtgcacgtgtgcgtgtgcgtgcgtgtgtgtgtgtttgtgagcatgggtgtgcccttggggtaagccagagcctggggtgttctctttggtgttacacagcccaagaggactgagactggcacttagcccaagaggtctgagccctggtgtgtttccagatcgatcctggattcactcactcactcattccttcactcatccagccacctaaaaacatttactgaccatgtactacgtgccagctctagttttcagccttgggaggttttattctgacttcctctgattttggcatgtggagacactcctataaggagctccgtcgaactggtaccgagcatgatt

SEQ ID NO: 441472 - DNA, 1014 bp, Homo sapiens
ggtataaagtccgggggagccggtcccgggcagccgctcagccccctgcccctcgccgcccgccgcctgcctgggccgggccgaggatgcggcgcacgcctcggcggccaggcttgctcccctccggcacgcctgctaacttcccccgctacgtccccgttcgcccgccgggccgccccgtctccccgcgccctccgggtcgggtcctccaggagcgccaggcgctgccgccgtgtgccctccgccgctcgcccgcgcgcccgcgctccccgcctgcgcccagcgccccgcgcccgcgcccagtcctcgggcggtcatgctgcccctctgcctcgtggccgccctgctgctggccgccgggcccgggccgagcctgggcgacgaagccatccactgcccgccctgctccgaggagaagctggcgcgctgccgcccccccgtgggctgcgaggagctggtgcgagagccgggctgcggctgttgcgccacttgcgccctgggcttggggatgccctgcggggtgtacaccccccgttgcggctcgggcctgcgctgctacccgccccgaggggtggagaagcccctgcacacactgatgcacgggcaaggcgtgtgcatggagctggcggagatcgaggccatccaggaaagcctgcagccctctgacaaggacgagggtgaccaccccaacaacagcttcagcccctgtagcgcccatgaccgcaggtgcctgcagaagcacttcgccaaaattcgagaccggagcaccagtgggggcaagatgaaggtcaatggggcgccccgggaggatgcccggcctgtggtaaggacctccgatgcacaaatgtgcatgtgcatagacacacacacacacatgccccctgccccccacatgcacgcacccacacacaccatcaccaccagatctggggcgtgttcattcagcacacattctagggtgactactgtgtgcaaggtgcaactagtgtgagtcatcaggacccagagaaagca

SEQ ID NO: 441473 - DNA, 566 bp, Homo sapiens
  misc_feature (424)..(424): n is a, c, g, or t
  misc_feature (426)..(426): n is a, c, g, or t
  misc_feature (429)..(432): n is a, c, g, or t
  misc_feature (434)..(439): n is a, c, g, or t
  misc_feature (441)..(444): n is a, c, g, or t
  misc_feature (458)..(458): n is a, c, g, or t
  misc_feature (464)..(464): n is a, c, g, or t
  misc_feature (469)..(470): n is a, c, g, or t
  misc_feature (563)..(563): n is a, c, g, or t
ggtataaagtccgggggagccggtcccgggcagccgctcagccccctgcccctcgccgcccgccgcctgcctgggccgggccgaggatgcggcgcacgcctcggcggccaggcttgctcccctccggcacgcctgctaacttcccccgctacgtccccgttcgcccgccgggccgccccgtctccccgcgccctccgggtcgggtcctccaggagcgccaggcgctgccgccgtgtgccctccgccgctcgcccgcgcgcccgcgctccccgcctgcgcccagcgccccgcgcccgcgcccagtcctcgggcggtcatgctgcccctctgcctcgtggccgccctgctgctggccgccgggcccgggccgagcctgggcgacgaagccatccactgcccgccctgctccgaggagaagccagcncncgnnnncnnnnnncnnnncttctccttcctcntcctcncactnnctctcatcaccatgcggcacaaaaggtcacaatagcccatgtcccccgcaaatgcacccctctaataaaaaacggcaccatacccaatcacancat

SEQ ID NO: 441474 - DNA, 609 bp, Homo sapiens
agaataggcatacactgtgactttaggaagaactctcacaaaatcagaggttgccctatgtaatatcacactttttaccttgagcaggtggatagcctgggagttcttgttatacctcaatcttggtccattctatttgttcccctgtccttcagcagtgcccttaggcttgctttaaacattaacagcattcataaggcatggtttctagggtcagagcccagcctccctccacccacccggctccctacacaccttgacagtgctcctttgagatgcctcagttctagtctcccttgtaattgtgcacagtagatgtctgaacaaatagaccagagtcctgcaaaagtgatcttgaaatcacaattaaaagagactttggagagatctactcaggaaaattttctgaatagacaaatgcttttaaagggggttctagacagtccgtcttttctgcctccttctgcgaagtagggctacactaaaaccttgtcacaatgtgacctgagcaaaaccattatcaagtgatttagttgtcttgaaccagacaaaagaaaattgacatgatttcaagataggtttagaaaaataatctgactagcaaaaaaa

SEQ ID NO: 441475 - DNA, 2087 bp, Homo sapiens
tcgtcgctccgtggagcctcctcctctcgcgagagcgcgaggcgtggagtcgacggctggagagaagccgggagcgagcccaggcggcagtcttgattcccttttggccagcagtttttaggtctgtcagtactgcactgcaagaatggcagattttgggatctctgctggccagtttgtggcagtggtctgggataagtcatccccagtggaggctctgaaaggtctggtggataagcttcaagcgttaaccggcaatgagggccgcgtgtctgtggaaaacatcaagcagctgttgcaatctgcccacaaagaatccagctttgacattattttgtcaggtttagtcccaggaagcaccactctgcacagtgctgagattttggctgaaatcgcccggatccttcggcctggtggatgtctttttctgaaggagccagtagagacagctgtagataacaatagcaaagtgaagacagcatctaagctgtgttcagccctgactctttctggtcttgtggaagtgaaagagctgcagcgggagcccctaacccctgaggaagtacagtctgttcgagaacaccttggtcatgaaagtgacaacctgctgtttgttcagatcacaggcaaaaaaccaaactttgaagtgggttcttctaggcagcttaagctttccatcaccaagaagtcttctccttcagtgaaacctgctgtggaccctgctgctgccaagctgtggaccctctcagccaacgatatggaggacgacagcatggatctcattgactcagatgagctgctggatccagaagatttgaagaagccagatccagcttccctgcgggctgcttcttgtggggaagggaaaaagaggaaggcctgtaagaactgcacctgtggccttgccgaagaactggaaaaagagaagtcaagggaacagatgagctcccaacccaagtcagcttgtggaaactgctacctgggcgatgccttccgctgtgccagctgcccctaccttgggatgccagccttcaaacctggggaaaaggtgcttctgagtgatagcaatcttcatgatgcctaggaggttcctgacatgggacccatctgctcctccagccaactcctgtccctcacatcccaccatggtggctcctcccacctcctctggatttgttcactctgagatctgtttgcagagtgggtgcttagcagacagagtgaagctggctggggggcacagtggtgtgtagtgctgctgtgtatcaaaagaccaaggtattatgggacctggtttcagaatgggatgggtttcttcacctcatgttaagagaagggagtgtgtcctgaagaagcccttcttctgatgttaaaatgctgaccagaacgctcttgagcccaggcatcgttgagcattaacactctgtgacagagctgcagacccctgccttgagtctcatctcagcaatgctgccaccctcttgtctttcagagttgttagtttactccattctttgtgacacgagtcaagtggctcacaacctcctcagggcaccagaggactcactcactggttgctgtgatgatatccagtgtccctctgcccccttccatccccaaccacatttgactgtagcattgcatctgtgtcctgttgtcatttatgttaaccttcaggtattaaacttgctgcatatcttgacatatcttgagattctgcatgtcttgtaaagagaggggatgtgcatttgtgtgtgatgttggatagtcatccacgctcagtttggaccattggaggaacttagtgtcacgcacaaatggggctattcctacgcttagaatagggcttgtctgcccactttagaagagtccaggttggtgagcatttagagggaagcagggcagaactctgaacgacaatacgtctctctgagcagagacccctttgttcttgttatccacccatatggacttggaatcaatcttgccaaatatttggagagattgtgtggatttaagagacctggatttttatattttaccagtaaataaaagttttcattgatatctgtccttgaaaaaagatt

SEQ ID NO: 441476 - DNA, 2048 bp, Homo sapiens
tcgtcgctccgtggagcctcctcctctcgcgagagcgcgaggcgtggagtcgacggctggagagaagccgggagcgagcccaggcggcagtcttgattcccttttggccagcagtttttaggtctgtcagtactgcactgcaagaatggcagattttgggatctctgctggccagtttgtggcagtggtctgggataagtcatccccagtggaggctctgaaaggtctggtggataagcttcaagcgttaaccggcaatgagggccgcgtgtctgtggaaaacatcaagcagctgttgcaatgtttagtcccaggaagcaccactctgcacagtgctgagattttggctgaaatcgcccggatccttcggcctggtggatgtctttttctgaaggagccagtagagacagctgtagataacaatagcaaagtgaagacagcatctaagctgtgttcagccctgactctttctggtcttgtggaagtgaaagagctgcagcgggagcccctaacccctgaggaagtacagtctgttcgagaacaccttggtcatgaaagtgacaacctgctgtttgttcagatcacaggcaaaaaaccaaactttgaagtgggttcttctaggcagcttaagctttccatcaccaagaagtcttctccttcagtgaaacctgctgtggaccctgctgctgccaagctgtggaccctctcagccaacgatatggaggacgacagcatggatctcattgactcagatgagctgctggatccagaagatttgaagaagccagatccagcttccctgcgggctgcttcttgtggggaagggaaaaagaggaaggcctgtaagaactgcacctgtggccttgccgaagaactggaaaaagagaagtcaagggaacagatgagctcccaacccaagtcagcttgtggaaactgctacctgggcgatgccttccgctgtgccagctgcccctaccttgggatgccagccttcaaacctggggaaaaggtgcttctgagtgatagcaatcttcatgatgcctaggaggttcctgacatgggacccatctgctcctccagccaactcctgtccctcacatcccaccatggtggctcctcccacctcctctggatttgttcactctgagatctgtttgcagagtgggtgcttagcagacagagtgaagctggctggggggcacagtggtgtgtagtgctgctgtgtatcaaaagaccaaggtattatgggacctggtttcagaatgggatgggtttcttcacctcatgttaagagaagggagtgtgtcctgaagaagcccttcttctgatgttaaaatgctgaccagaacgctcttgagcccaggcatcgttgagcattaacactctgtgacagagctgcagacccctgccttgagtctcatctcagcaatgctgccaccctcttgtctttcagagttgttagtttactccattctttgtgacacgagtcaagtggctcacaacctcctcagggcaccagaggactcactcactggttgctgtgatgatatccagtgtccctctgcccccttccatccccaaccacatttgactgtagcattgcatctgtgtcctgttgtcatttatgttaaccttcaggtattaaacttgctgcatatcttgacatatcttgagattctgcatgtcttgtaaagagaggggatgtgcatttgtgtgtgatgttggatagtcatccacgctcagtttggaccattggaggaacttagtgtcacgcacaaatggggctattcctacgcttagaatagggcttgtctgcccactttagaagagtccaggttggtgagcatttagagggaagcagggcagaactctgaacgacaatacgtctctctgagcagagacccctttgttcttgttatccacccatatggacttggaatcaatcttgccaaatatttggagagattgtgtggatttaagagacctggatttttatattttaccagtaaataaaagttttcattgatatctgtccttgaaaaaagatt

SEQ ID NO: 441477 - DNA, 2034 bp, Homo sapiens
tcgtcgctccgtggagcctcctcctctcgcgagagcgcgaggcgtggagtcgacggctggagagaagccgggagcgagcccaggcggcagtcttgattcccttttggccagcagtttttaggtctgtcagtactgcactgcaagaatggcagattttgggatctctgctggccagtttgtggcagtggtctgggataagtcatccccagtggaggctctgaaaggtctggtggataagcttcaagcgttaaccggcaatgagggccgcgtgtctgtggaaaacatcaagcagctgttgcaatctgcccacaaagaatccagctttgacattattttgtcaggtttagtcccaggaagcaccactctgcacagtgctgagattttggctgaaatcgcccggatccttcggcctggtggatgtctttttctgaaggagccagtagagacagctgtagataacaatagcaaagtgaagacagcatctaagctgtgttcagccctgactctttctggtcttgtggaagtgaaagagctgcagcgggagcccctaacccctgaggaagtacagtctgttcgagaacaccttggtcatgaaagtgacaacctgctgtttgttcagatcacaggcaaaaaaccaaactttgaagtgggttcttctaggcagcttaagctttccatcaccaagaagtcttctccttcagtgaaacctgctgtggaccctgctgctgccaagctgtggaccctctcagccaacgatatggaggacgacagcatggatctcattgactcagatgagctgctggatccagaagatttgaagaagccagatccagcttccctgcgggctgcttcttgtggggaagggaaaaagaggaaggcctgtaagaactgcacctgtggccttgccgaagaactggaaaaagagaagtcaagggaacagatgagctcccaacccaagtcagcttgtggaaactgctacctgggcgatgccttccgctgtgccagctgcccctaccttgggatgccagccttcaaacctggggaaaaggtgcttctgagtgatagcaatcttcatgatgcctaggaggttcctgacatgggacccatctgctcctccagccaactcctgtccctcacatcccaccatggtggctcctcccacctcctctggatttgttcactctgagatctgtttgcagagtgggtgcttagcagacagagtgaagctggctggggggcacagtggtgtgtagtgctgctgtgtatcaaaagaccaaggtattatgggacctggtttcagaatgggatgggtttcttcacctcatgttaagagaagggagtgtgtcctgaagaagcccttcttctgatgtctgtgacagagctgcagacccctgccttgagtctcatctcagcaatgctgccaccctcttgtctttcagagttgttagtttactccattctttgtgacacgagtcaagtggctcacaacctcctcagggcaccagaggactcactcactggttgctgtgatgatatccagtgtccctctgcccccttccatccccaaccacatttgactgtagcattgcatctgtgtcctgttgtcatttatgttaaccttcaggtattaaacttgctgcatatcttgacatatcttgagattctgcatgtcttgtaaagagaggggatgtgcatttgtgtgtgatgttggatagtcatccacgctcagtttggaccattggaggaacttagtgtcacgcacaaatggggctattcctacgcttagaatagggcttgtctgcccactttagaagagtccaggttggtgagcatttagagggaagcagggcagaactctgaacgacaatacgtctctctgagcagagacccctttgttcttgttatccacccatatggacttggaatcaatcttgccaaatatttggagagattgtgtggatttaagagacctggatttttatattttaccagtaaataaaagttttcattgatatctgtccttgaaaaaagatt

SEQ ID NO: 441478 - DNA, 1524 bp, Homo sapiens
tcgtcgctccgtggagcctcctcctctcgcgagagcgcgaggcgtggagtcgacggctggagagaagccgggagcgagcccaggcggcagtcttgattcccttttggccagcagtttttaggtctgtcagtactgcactgcaagaatggcagattttgggatctctgctggccagtttgtggcagtggtctgggataagtcatccccagtggaggctctgaaaggtctggtggataagcttcaagcgttaaccggcaatgagggccgcgtgtctgtggaaaacatcaagcagctgttgcaatctgcccacaaagaatccagctttgacattattttgtcaggtttagtcccaggaagcaccactctgcacagtgctgagattttggctgaaatcgcccggatccttcggcctggtggatgtctttttctgaaggagccagtagagacagctgtagataacaatagcaaagtgaagacagcatctaagctgtgttcagccctgactctttctggtcttgtggaagtgaaagagctgcagcgggagcccctaacccctgaggaagtacagtctgttcgagaacaccttggtcatgaaagtgacaacctgctgtttgttcagatcacaggcaaaaaaccaaactttgaagtgggttcttctaggcagcttaagctttccatcaccaagaagtcttctccttcagtgaaacctgctgtggaccctgctgctgccaagctgtggaccctctcagccaacgatatggaggacgacagcatggatctcattgactcagatgagctgctggatccagaagatttgaagaagccagatccagcttccctgcgggctgcttcttgtggggaagggaaaaagaggaaggcctgtaagaactgcacctgtggccttgccgaagaactggaaaaagagaagtcaagggaacagatgagctcccaacccaagtcagcttgtggaaactgctacctgggcgatgccttccgctgtgccagctgcccctaccttgggatgccagccttcaaacctggggaaaaggtgcttctgagtgatagcaatcttcatgatgcctaggaggttcctgacatgggacccatctgctcctccagccaactcctgtccctcacatcccaccatggtggctcctcccacctcctctggatttgttcactctgagatctgtttgcagagtgggtgcttagcagacagagtgaagctggctggggggcacagtggtgtgtagtgctgctgtgtatcaaaagaccaaggtattatgggagctcatctgttcccttgacttctctttttccagttcttcggcaaggccacaggtgcagttcttacagaccttcctctttttcccttcaccacaagaagcagcccgcagagaagctggatctggcttcttcaaatcttctggatccagcaactcatctgagtcaatgagatacatgctgtcgtcctccatatcagttggctgagagggtccacagcttggcagcagcagggtccac

SEQ ID NO: 441479 - DNA, 2291 bp, Homo sapiens
tcgtcgctccgtggagcctcctcctctcgcgagagcgcgaggcgtggagtcgacggctggagagaagccgggagcgagcccaggcggcagtcttgattcccttttggccagcagtttttaggtctgtcagtactgcactgcaagaatggcagattttgggatctctgctggccagtttgtggcagtggtctgggataagtcatccccagtggaggctctgaaaggtctggtggataagcttcaagcgttaaccggcaatgagggccgcgtgtctgtggaaaacatcaagcagctgttgcaatctgcccacaaagaatccagctttgacattattttgtcaggtttagtcccaggaagcaccactctgcacagtgctgagattttggctgaaatcgcccggatccttcggcctggtggatgtctttttctgaaggagccagtagagacagctgtagataacaatagcaaagtgaagacagcatctaagctgtgttcagccctgactctttctggtcttgtggaagtgaaagagctgcagcgggagcccctaacccctgaggaagtacagtctgttcgagaacaccttggtcatgaaagtgacaacctgctgtttgttcagatcacaggcaaaaaaccaaactttgaagtgggttcttctaggcagcttaagctttccatcaccaagaagtcttctccttcagtgaaacctgctgtggaccctgctgctgccaagctgtggaccctctcagccaacgatatggaggacgacagcatgtgcatcttctgtggatgtagtttaactcaccgttggcctcttgagcatgtggtcaggttgaacatgatgatcaaccaaaaggaggacagggtggacaccttctttaccctggactccaagtttcctctcgaagcctgcagtcactttagcttttcattagcagagaccacgactgtatcactcattgctttgaacactctccaggatctcattgactcagatgagctgctggatccagaagatttgaagaagccagatccagcttccctgcgggctgcttcttgtggggaagggaaaaagaggaaggcctgtaagaactgcacctgtggccttgccgaagaactggaaaaagagaagtcaagggaacagatgagctcccaacccaagtcagcttgtggaaactgctacctgggcgatgccttccgctgtgccagctgcccctaccttgggatgccagccttcaaacctggggaaaaggtgcttctgagtgatagcaatcttcatgatgcctaggaggttcctgacatgggacccatctgctcctccagccaactcctgtccctcacatcccaccatggtggctcctcccacctcctctggatttgttcactctgagatctgtttgcagagtgggtgcttagcagacagagtgaagctggctggggggcacagtggtgtgtagtgctgctgtgtatcaaaagaccaaggtattatgggacctggtttcagaatgggatgggtttcttcacctcatgttaagagaagggagtgtgtcctgaagaagcccttcttctgatgttaaaatgctgaccagaacgctcttgagcccaggcatcgttgagcattaacactctgtgacagagctgcagacccctgccttgagtctcatctcagcaatgctgccaccctcttgtctttcagagttgttagtttactccattctttgtgacacgagtcaagtggctcacaacctcctcagggcaccagaggactcactcactggttgctgtgatgatatccagtgtccctctgcccccttccatccccaaccacatttgactgtagcattgcatctgtgtcctgttgtcatttatgttaaccttcaggtattaaacttgctgcatatcttgacatatcttgagattctgcatgtcttgtaaagagaggggatgtgcatttgtgtgtgatgttggatagtcatccacgctcagtttggaccattggaggaacttagtgtcacgcacaaatggggctattcctacgcttagaatagggcttgtctgcccactttagaagagtccaggttggtgagcatttagagggaagcagggcagaactctgaacgacaatacgtctctctgagcagagacccctttgttcttgttatccacccatatggacttggaatcaatcttgccaaatatttggagagattgtgtggatttaagagacctggatttttatattttaccagtaaataaaagttttcattgatatctgtccttgaaaaaagatt

SEQ ID NO: 441480 - DNA, 2252 bp, Homo sapiens
tcgtcgctccgtggagcctcctcctctcgcgagagcgcgaggcgtggagtcgacggctggagagaagccgggagcgagcccaggcggcagtcttgattcccttttggccagcagtttttaggtctgtcagtactgcactgcaagaatggcagattttgggatctctgctggccagtttgtggcagtggtctgggataagtcatccccagtggaggctctgaaaggtctggtggataagcttcaagcgttaaccggcaatgagggccgcgtgtctgtggaaaacatcaagcagctgttgcaatgtttagtcccaggaagcaccactctgcacagtgctgagattttggctgaaatcgcccggatccttcggcctggtggatgtctttttctgaaggagccagtagagacagctgtagataacaatagcaaagtgaagacagcatctaagctgtgttcagccctgactctttctggtcttgtggaagtgaaagagctgcagcgggagcccctaacccctgaggaagtacagtctgttcgagaacaccttggtcatgaaagtgacaacctgctgtttgttcagatcacaggcaaaaaaccaaactttgaagtgggttcttctaggcagcttaagctttccatcaccaagaagtcttctccttcagtgaaacctgctgtggaccctgctgctgccaagctgtggaccctctcagccaacgatatggaggacgacagcatgtgcatcttctgtggatgtagtttaactcaccgttggcctcttgagcatgtggtcaggttgaacatgatgatcaaccaaaaggaggacagggtggacaccttctttaccctggactccaagtttcctctcgaagcctgcagtcactttagcttttcattagcagagaccacgactgtatcactcattgctttgaacactctccaggatctcattgactcagatgagctgctggatccagaagatttgaagaagccagatccagcttccctgcgggctgcttcttgtggggaagggaaaaagaggaaggcctgtaagaactgcacctgtggccttgccgaagaactggaaaaagagaagtcaagggaacagatgagctcccaacccaagtcagcttgtggaaactgctacctgggcgatgccttccgctgtgccagctgcccctaccttgggatgccagccttcaaacctggggaaaaggtgcttctgagtgatagcaatcttcatgatgcctaggaggttcctgacatgggacccatctgctcctccagccaactcctgtccctcacatcccaccatggtggctcctcccacctcctctggatttgttcactctgagatctgtttgcagagtgggtgcttagcagacagagtgaagctggctggggggcacagtggtgtgtagtgctgctgtgtatcaaaagaccaaggtattatgggacctggtttcagaatgggatgggtttcttcacctcatgttaagagaagggagtgtgtcctgaagaagcccttcttctgatgttaaaatgctgaccagaacgctcttgagcccaggcatcgttgagcattaacactctgtgacagagctgcagacccctgccttgagtctcatctcagcaatgctgccaccctcttgtctttcagagttgttagtttactccattctttgtgacacgagtcaagtggctcacaacctcctcagggcaccagaggactcactcactggttgctgtgatgatatccagtgtccctctgcccccttccatccccaaccacatttgactgtagcattgcatctgtgtcctgttgtcatttatgttaaccttcaggtattaaacttgctgcatatcttgacatatcttgagattctgcatgtcttgtaaagagaggggatgtgcatttgtgtgtgatgttggatagtcatccacgctcagtttggaccattggaggaacttagtgtcacgcacaaatggggctattcctacgcttagaatagggcttgtctgcccactttagaagagtccaggttggtgagcatttagagggaagcagggcagaactctgaacgacaatacgtctctctgagcagagacccctttgttcttgttatccacccatatggacttggaatcaatcttgccaaatatttggagagattgtgtggatttaagagacctggatttttatattttaccagtaaataaaagttttcattgatatctgtccttgaaaaaagatt

SEQ ID NO: 441481 - DNA, 2019 bp, Homo sapiens
tcgtcgctccgtggagcctcctcctctcgcgagagcgcgaggcgtggagtcgacggctggagagaagccgggagcgagcccaggcggcagtcttgattcccttttggccagcagtttttaggtctgtcagtactgcactgcaagaatggcagattttgggatctctgctggccagtttgtggcagtggtctgggataagtcatccccagtggaggctctgaaaggtctggtggataagcttcaagcgttaaccggcaatgagggccgcgtgtctgtggaaaacatcaagcagctgttgcaatctgcccacaaagaatccagctttgacattattttgtcaggtttagtcccaggaagcaccactctgcacagtgctgagattttggctgaaatcgcccggatccttcggcctggtggatgtctttttctgaaggagccagtagagacagctgtagataacaatagcaaagtgaagacagcatctaagctgtgttcagccctgactctttctggtcttgtggaagtgaaagagctgcagcgggagcccctaacccctgaggaagtacagtctgttcgagaacaccttggtcatgaaagtgacaacctgctgtttgttcagatcacaggcaaaaatgaaacctgctgtggaccctgctgctgccaagctgtggaccctctcagccaacgatatggaggacgacagcatggatctcattgactcagatgagctgctggatccagaagatttgaagaagccagatccagcttccctgcgggctgcttcttgtggggaagggaaaaagaggaaggcctgtaagaactgcacctgtggccttgccgaagaactggaaaaagagaagtcaagggaacagatgagctcccaacccaagtcagcttgtggaaactgctacctgggcgatgccttccgctgtgccagctgcccctaccttgggatgccagccttcaaacctggggaaaaggtgcttctgagtgatagcaatcttcatgatgcctaggaggttcctgacatgggacccatctgctcctccagccaactcctgtccctcacatcccaccatggtggctcctcccacctcctctggatttgttcactctgagatctgtttgcagagtgggtgcttagcagacagagtgaagctggctggggggcacagtggtgtgtagtgctgctgtgtatcaaaagaccaaggtattatgggacctggtttcagaatgggatgggtttcttcacctcatgttaagagaagggagtgtgtcctgaagaagcccttcttctgatgttaaaatgctgaccagaacgctcttgagcccaggcatcgttgagcattaacactctgtgacagagctgcagacccctgccttgagtctcatctcagcaatgctgccaccctcttgtctttcagagttgttagtttactccattctttgtgacacgagtcaagtggctcacaacctcctcagggcaccagaggactcactcactggttgctgtgatgatatccagtgtccctctgcccccttccatccccaaccacatttgactgtagcattgcatctgtgtcctgttgtcatttatgttaaccttcaggtattaaacttgctgcatatcttgacatatcttgagattctgcatgtcttgtaaagagaggggatgtgcatttgtgtgtgatgttggatagtcatccacgctcagtttggaccattggaggaacttagtgtcacgcacaaatggggctattcctacgcttagaatagggcttgtctgcccactttagaagagtccaggttggtgagcatttagagggaagcagggcagaactctgaacgacaatacgtctctctgagcagagacccctttgttcttgttatccacccatatggacttggaatcaatcttgccaaatatttggagagattgtgtggatttaagagacctggatttttatattttaccagtaaataaaagttttcattgatatctgtccttgaaaaaagatt

SEQ ID NO: 441482 - DNA, 1488 bp, Homo sapiens
tcgtcgctccgtggagcctcctcctctcgcgagagcgcgaggcgtggagtcgacggctggagagaagccgggagcgagcccaggcggcagtcttgattcccttttggccagcagtttttaggtctgtcagtactgcactgcaagaatggcagattttgggatctctgctggccagtttgtggcagtggtctgggataagtcatccccagtggaggctctgaaaggtctggtggataagcttcaagcgttaaccggcaatgagggccgcgtgtctgtggaaaacatcaagcagctgttgcaatctgcccacaaagaatccagctttgacattattttgtcaggtttagtcccaggaagcaccactctgcacagtgctgagattttggctgaaatcgcccggatccttcggcctggtggatgtctttttctgaaggagccagtagagacagctgtagataacaatagcaaagtgaagacagcatctaagctgtgttcagccctgactctttctggtcttgtggaagtgaaagagctgcagcgggagcccctaacccctgaggaagtacagtctgttcgagaacaccttggtcatgaaagtgacaacctgctgtttgttcagatcacaggcaaaaaaccaaactttgaagtgggttcttctaggcagcttaagctttccatcaccaagaagtcttctccttcagtgaaacctgctgtggaccctgctgctgccaagctgtggaccctctcagccaacgatatggaggacgacagcatggatctcattgactcagatgagctgctggatccagaagatttgaagaagccagatccagcttccctgcgggctgcttcttgtggggaagggaaaaagaggaaggcctgtaagaactggtgagtgctggggtgactggagcctgccatgctgcctccagtggcttcatgctgaagacatcgcggtgctgtactatttttagaacatacattttccaggctgggcaacacagggagaccatctctgcaaataattaaaaaaaaaaaaaaattagccaggcatggtggtatgtacctgtggtcccagctacttgggaggcaaaggcaggaggatcacttgagcctgggaggtcgaggctgcagtgagccgtaattgtgccatgtatctaatttcactctccctcaaaaccctaccagtaagccactattgtgccactgcactccagcatgggcatcagagcgagaccttggtgtcttcacatttgtttttataaatggatgggaaggattgtagaaagttaatcagtgatgttcatcatcagcgttaatcatcagtgttttttaaatgtaaaagctgccagcatttacaaatcaggaaatttcaagtgaaaacacagatttttttcccttctgttcttgaatttggaaaatatggcaatctgggtccactttccccagcatgataaccagctgaagcttgagtagtggctgccctct

SEQ ID NO: 441483 - DNA, 1807 bp, Homo sapiens
tcgtcgctccgtggagcctcctcctctcgcgagagcgcgaggcgtggagtcgacggctggagagaagccgggagcgagcccaggcggcagtcttgattcccttttggccagcagtttttaggtctgtcagtactgcactgcaagaatggcagattttgggatctctgctggccagtttgtggcagtggtctgggataagtcatccccagtggaggctctgaaaggtctggtggataagcttcaagcgttaaccggcaatgagggccgcgtgtccctgaggaagtacagtctgttcgagaacaccttggtcatgaaagtgacaacctgctgtttgttcagatcacaggcaaaaaaccaaactttgaagtgggttcttctaggcagcttaagctttccatcaccaagaagtcttctccttcagtgaaacctgctgtggaccctgctgctgccaagctgtggaccctctcagccaacgatatggaggacgacagcatggatctcattgactcagatgagctgctggatccagaagatttgaagaagccagatccagcttccctgcgggctgcttcttgtggggaagggaaaaagaggaaggcctgtaagaactgcacctgtggccttgccgaagaactggaaaaagagaagtcaagggaacagatgagctcccaacccaagtcagcttgtggaaactgctacctgggcgatgccttccgctgtgccagctgcccctaccttgggatgccagccttcaaacctggggaaaaggtgcttctgagtgatagcaatcttcatgatgcctaggaggttcctgacatgggacccatctgctcctccagccaactcctgtccctcacatcccaccatggtggctcctcccacctcctctggatttgttcactctgagatctgtttgcagagtgggtgcttagcagacagagtgaagctggctggggggcacagtggtgtgtagtgctgctgtgtatcaaaagaccaaggtattatgggacctggtttcagaatgggatgggtttcttcacctcatgttaagagaagggagtgtgtcctgaagaagcccttcttctgatgttaaaatgctgaccagaacgctcttgagcccaggcatcgttgagcattaacactctgtgacagagctgcagacccctgccttgagtctcatctcagcaatgctgccaccctcttgtctttcagagttgttagtttactccattctttgtgacacgagtcaagtggctcacaacctcctcagggcaccagaggactcactcactggttgctgtgatgatatccagtgtccctctgcccccttccatccccaaccacatttgactgtagcattgcatctgtgtcctgttgtcatttatgttaaccttcaggtattaaacttgctgcatatcttgacatatcttgagattctgcatgtcttgtaaagagaggggatgtgcatttgtgtgtgatgttggatagtcatccacgctcagtttggaccattggaggaacttagtgtcacgcacaaatggggctattcctacgcttagaatagggcttgtctgcccactttagaagagtccaggttggtgagcatttagagggaagcagggcagaactctgaacgacaatacgtctctctgagcagagacccctttgttcttgttatccacccatatggacttggaatcaatcttgccaaatatttggagagattgtgtggatttaagagacctggatttttatattttaccagtaaataaaagttttcattgatatctgtccttgaaaaaagatt

SEQ ID NO: 441484 - DNA, 1498 bp, Homo sapiens
  misc_feature (60)..(60): n is a, c, g, or t
cagatgtgtaagcgtcccgatgttattcatcacagggcgggcttcgatgttatggagagnagccgggagcgagcccaggcggcagtcttgattcccttttggccagcagttttgaaacctgctgtggaccctgctgctgccaagctgtggaccctctcagccaacgatatggaggacgacagcatggatctcattgactcagatgagctgctggatccagaagatttgaagaagccagatccagcttccctgcgggctgcttcttgtggggaagggaaaaagaggaaggcctgtaagaactgcacctgtggccttgccgaagaactggaaaaagagaagtcaagggaacagatgagctcccaacccaagtcagcttgtggaaactgctacctgggcgatgccttccgctgtgccagctgcccctaccttgggatgccagccttcaaacctggggaaaaggtgcttctgagtgatagcaatcttcatgatgcctaggaggttcctgacatgggacccatctgctcctccagccaactcctgtccctcacatcccaccatggtggctcctcccacctcctctggatttgttcactctgagatctgtttgcagagtgggtgcttagcagacagagtgaagctggctggggggcacagtggtgtgtagtgctgctgtgtatcaaaagaccaaggtattatgggacctggtttcagaatgggatgggtttcttcacctcatgttaagagaagggagtgtgtcctgaagaagcccttcttctgatgttaaaatgctgaccagaacgctcttgagcccaggcatcgttgagcattaacactctgtgacagagctgcagacccctgccttgagtctcatctcagcaatgctgccaccctcttgtctttcagagttgttagtttactccattctttgtgacacgagtcaagtggctcacaacctcctcagggcaccagaggactcactcactggttgctgtgatgatatccagtgtccctctgcccccttccatccccaaccacatttgactgtagcattgcatctgtgtcctgttgtcatttatgttaaccttcaggtattaaacttgctgcatatcttgacatatcttgagattctgcatgtcttgtaaagagaggggatgtgcatttgtgtgtgatgttggatagtcatccacgctcagtttggaccattggaggaacttagtgtcacgcacaaatggggctattcctacgcttagaatagggcttgtctgcccactttagaagagtccaggttggtgagcatttagagggaagcagggcagaactctgaacgacaatacgtctctctgagcagagacccctttgttcttgttatccacccatatggacttggaatcaatcttgccaaatatttggagagattgtgtggatttaagagacctggatttttatattttaccagtaaataaaagttttcattgatatctgtccttgaaaaaagatt

SEQ ID NO: 441485 - DNA, 1884 bp, Homo sapiens
  misc_feature (60)..(60): n is a, c, g, or t
cagatgtgtaagcgtcccgatgttattcatcacagggcgggcttcgatgttatggagagnagccgggagcgagcccaggcggcagtcttgattcccttttggccagcagtttttaggtctgtcagtactgcactgcaagaatggcagattttgggatctctgctggccagtttgtggcagtggtctgggataagtcatccccagtggaggctctgaaaggtctggtggataagcttcaagcgttaaccggcaatgagggccgcgtgtctgtggaaaacatcaagcagctgttgcaatctgcccacaaagaatccagctttgacattattttgtcaggtttagtcccaggaagcaccactctgcacagtgctgagattttggctgaaatcgcccggatccttcggcctggtggatgtctttttctgaaggagccagtagagacagctgtagataacaatagcaaagtgaagacagcatctaagctgtgttcagccctgactctttctggtcttgtggaagtgaaagagctgcagcgggagcccctaacccctgaggaagtacagtctgttcgagaacaccttggtcatgaaagtgacaacctgctgtttgttcagatcacaggcaaaaaaccaaactttgaagtgggttcttctaggcagcttaagctttccatcaccaagaagtcttctccttcagtgaaacctgctgtggaccctgctgctgccaagctgtggaccctctcagccaacgatatggaggacgacagcatgtgctacctgggcgatgccttccgctgtgccagctgcccctaccttgggatgccagccttcaaacctggggaaaaggtgcttctgagtgatagcaatcttcatgatgcctaggaggttcctgacatgggacccatctgctcctccagccaactcctgtccctcacatcccaccatggtggctcctcccacctcctctggatttgttcactctgagatctgtttgcagagtgggtgcttagcagacagagtgaagctggctggggggcacagtggtgtgtagtgctgctgtgtatcaaaagaccaaggtattatgggacctggtttcagaatgggatgggtttcttcacctcatgttaagagaagggagtgtgtcctgaagaagcccttcttctgatgttaaaatgctgaccagaacgctcttgagcccaggcatcgttgagcattaacactctgtgacagagctgcagacccctgccttgagtctcatctcagcaatgctgccaccctcttgtctttcagagttgttagtttactccattctttgtgacacgagtcaagtggctcacaacctcctcagggcaccagaggactcactcactggttgctgtgatgatatccagtgtccctctgcccccttccatccccaaccacatttgactgtagcattgcatctgtgtcctgttgtcatttatgttaaccttcaggtattaaacttgctgcatatcttgacatatcttgagattctgcatgtcttgtaaagagaggggatgtgcatttgtgtgtgatgttggatagtcatccacgctcagtttggaccattggaggaacttagtgtcacgcacaaatggggctattcctacgcttagaatagggcttgtctgcccactttagaagagtccaggttggtgagcatttagagggaagcagggcagaactctgaacgacaatacgtctctctgagcagagacccctttgttcttgttatccacccatatggacttggaatcaatcttgccaaatatttggagagattgtgtggatttaagagacctggatttttatattttaccagtaaataaaagttttcattgatatctgtccttgaaaaaagatt

SEQ ID NO: 441486 - DNA, 1355 bp, Homo sapiens
agcagcctctcatattgctgctgtctgcctggcctataggcttctgagttatgacactggtgtgaagagaaaaggcttaaagcacattttggcactgttaggatttgggatttctgggtggtgacaattctcgttcattagttactgattttcccgcagcacctgtggccttgccgaagaactggaaaaagagaagtcaagggaacagatgagctcccaacccaagtcagcttgtggaaactgctacctgggcgatgccttccgctgtgccagctgcccctaccttgggatgccagccttcaaacctggggaaaaggtgcttctgagtgatagcaatcttcatgatgcctaggaggttcctgacatgggacccatctgctcctccagccaactcctgtccctcacatcccaccatggtggctcctcccacctcctctggatttgttcactctgagatctgtttgcagagtgggtgcttagcagacagagtgaagctggctggggggcacagtggtgtgtagtgctgctgtgtatcaaaagaccaaggtattatgggacctggtttcagaatgggatgggtttcttcacctcatgttaagagaagggagtgtgtcctgaagaagcccttcttctgatgttaaaatgctgaccagaacgctcttgagcccaggcatcgttgagcattaacactctgtgacagagctgcagacccctgccttgagtctcatctcagcaatgctgccaccctcttgtctttcagagttgttagtttactccattctttgtgacacgagtcaagtggctcacaacctcctcagggcaccagaggactcactcactggttgctgtgatgatatccagtgtccctctgcccccttccatccccaaccacatttgactgtagcattgcatctgtgtcctgttgtcatttatgttaaccttcaggtattaaacttgctgcatatcttgacatatcttgagattctgcatgtcttgtaaagagaggggatgtgcatttgtgtgtgatgttggatagtcatccacgctcagtttggaccattggaggaacttagtgtcacgcacaaatggggctattcctacgcttagaatagggcttgtctgcccactttagaagagtccaggttggtgagcatttagagggaagcagggcagaactctgaacgacaatacgtctctctgagcagagacccctttgttcttgttatccacccatatggacttggaatcaatcttgccaaatatttggagagattgtgtggatttaagagacctggatttttatattttaccagtaaataaaagttttcattgatatctgtccttgaaaaaagatt

SEQ ID NO: 441487 - DNA, 820 bp, Homo sapiens
gcggccgcctactactactactgctcgaattcaagcttctaacgatgtacggggacatgttaagagaagggagtgtgtcctgaagaagcccttcttctgatgttaaaatgctgaccagaacgctcttgagcccaggcatcgttgagcattaacactctgtgacagagctgcagacccctgccttgagtctcatctcagcaatgctgccaccctcttgtctttcagagttgttagtttactccattctttgtgacacgagtcaagtggctcacaacctcctcagggcaccagaggactcactcactggttgctgtgatgatatccagtgtccctctgcccccttccatccccaaccacatttgactgtagcattgcatctgtgtcctgttgtcatttatgttaaccttcaggtattaaacttgctgcatatcttgacatatcttgagattctgcatgtcttgtaaagagaggggatgtgcatttgtgtgtgatgttggatagtcatccacgctcagtttggaccattggaggaacttagtgtcacgcacaaatggggctattcctacgcttagaatagggcttgtctgcccactttagaagagtccaggttggtgagcatttagagggaagcagggcagaactctgaacgacaatacgtctctctgagcagagacccctttgttcttgttatccacccatatggacttggaatcaatcttgccaaatatttggagagattgtgtggatttaagagacctggatttttatattttaccagtaaataaaagttttcattgatatctgtccttgaaaaaagatt

SEQ ID NO: 441488 - DNA, 770 bp, Homo sapiens
agccgggagcgagcccaggcggcaggtgagagtggtgggggccagctgagcgccagagctccctcaactgtcccctcccggcccaccctcgttcccacatcctctcattttctcttcccaccccgttcctcgatgggaacgcagccacggccgccccgctgaaagccccggctggtttattcctgagaagtcggtgtgaggggccagggccggccctaacctccctggggtcctgactgggaatttctgccgttccccggctgcctcgtcccttgcgtagccggccctactctgaggccccggggacaccacgctgaggagaaacggctccgagcttgggatcggggagacctggttctgagacccggtcctaccagtagccaatcattgtgaccttgggcctcagtccccgtgacgttttggtccctgggggttcctggcagcaaagcacgaaagccttggagtcggggggtacctgagctcacgattgtaatttcgaacctgcaacttgtccgaacccccagcgtgttgagttgatataattaagtatccagatcggaaggatgcttgttactagaacagacagctaggcctttgtccagaaggattgattgagtgggtctgtgtgtggtccaggaatctcattttaaccactccctcgggtgatttgtaggatctgcaagttcgggaaaggctggtgcccttcattctgacattactgagtgccaagctctggatggctcaaggaggtcacggtctagccactaaca

SEQ ID NO: 441489 - DNA, 556 bp, Homo sapiens
tgcccccaacccccaacatgtgtatattctctacacattgctggccagtcatacagctttttctcatgtaaatttgtttctaattcctttgcatcctagtgcatcttctgtggatgtagtttaactcaccgttggcctcttgagcatgtggtcaggttgaacatgatgatcaaccaaaaggaggacagggtggacaccttctttaccctggactccaagtttcctctcgaagcctgcagtcactttagcttttcattagcagagaccacgactgtatcactcattgctttgaacactctccaggatctcattgactcagatgagctgctggatccagaagatttgaagaagccagatccagcttccctgcgggctgcttcttgtggggaagggaaaaagaggaaggcctgtaagaactggtgagtgctggggtgactggagcctgccatgctgcctccagtggcttcatgctgaagacatcgcggtgctgtactatttttagaacatacattttccaggctgggcaacacagggagaccatctctgcaaataatta

SEQ ID NO: 441490 - DNA, 1701 bp, Homo sapiens
tcgtcgctccgtggagcctcctcctctcgcgagagcgcgaggcgtggagtcgacggctggagagaagccgggagcgagcccaggcggcagtcttgattcccttttggccagcagtttttaggtctgtcagtactgcactgcaagaatggcagattttgggatctctgctggccagtttgtggcagtggtctgggataagtcatccccagtggaggctctgaaaggtctggtggataagcttcaagcgttaaccggcaatgagggccgcgtgtctgtggaaaacatcaagcagctgttgcaatctgcccacaaagaatccagctttgacattattttgtcaggtttagtcccaggaagcaccactctgcacagtgctgagattttggctgaaatcgcccggatccttcggcctggtggatgtctttttctgaaggagccagtagagacagctgtagataacaatagcaaagtgaagacagcatctaagctgtgttcagccctgactctttctggtcttgtggaagtgaaagagctgcagcgggagcccctaacccctgaggaagtacagtctgttcgagaacaccttggtcatgaaagtgacaacctgctgtttgttcagatcacaggcaaaaaaccaaactttgaagtgggttcttctaggcagcttaagctttccatcaccaagaagtcttctccttcagtgaaacctgctgtggaccctgctgctgccaagctgtggaccctctcagccaacgatatggaggacgacagcatggatctcattgactcagatgagctgctggatccagaagatttgaagaagccagatccagcttccctgcgggctgcttcttgtggggaagggaaaaagaggaaggcctgtaagaactgcacctgtggccttgccgaagaactggaaaaagagaagtcaagggaacagatgagctcccaacccaagtcagcttgtggaaactgctacctgggcgatgccttccgctgtgccagctgcccctaccttgggatgccagccttcaaacctggggaaaaggtgcttctgagtgatagcaatcttcatgatgcctaggaggttcctgacatgggacccatctgctcctccagccaactcctgtccctcacatcccaccatggtggctcctcccacctcctctggatttgttcactctgagatctgtttgcagagtgggtgcttagcagacagagtgaagctggctggggggcacagtggtgtgtagtgctgctgtgtatcaaaagaccaaggtattatgggacctggtttcagaatgggatgggtttcttcacctcatgttaagagaagggagtgtgtcctgaagaagcccttcttctgatgttaaaatgctgaccagaacgctcttgagcccaggcatcgttgagcattaacactctgtgacagagctgcagacccctgccttgagtctcatctcagcaatgctgccaccctcttgtctttcagagttgttagtttactccattctttgtgacacgagtcaagtggctcacaacctcctcagggcaccagaggactcactcactggttgctgtgatgatatccagtgtccctctgcccccttccatccccaaccacatttgactgtagcattgcatctgtgtcctgttgtcatttatgttaaccttcaggtattaaacttgctgcatatcttg

SEQ ID NO: 441491 - DNA, 2051 bp, Homo sapiens
  misc_feature (12)..(12): n is a, c, g, or t
  misc_feature (42)..(42): n is a, c, g, or t
ccgtacgggatnaaattacggctaggtacgaggcctgggtgntgcaggcggcagtcttgattcccttttggccagcagtttttaggtctgtcagtactgcactgcaagaatggcagattttgggatctctgctggccagtttgtggcagtggtctgggataagtcatccccagtggaggctctgaaaggtctggtggataagcttcaagcgttaaccggcaatgagggccgcgtgtctgtggaaaacatcaagcagctgttgcaatctgcccacaaagaatccagctttgacattattttgtcaggtttagtcccaggaagcaccactctgcacagtgctgagattttggctgaaatcgcccggatccttcggcctggtggatgtctttttctgaaggagccagtagagacagctgtagataacaatagcaaagtgaagacagcatctaagctgtgttcagccctgactctttctggtcttgtggaagtgaaagagctgcagcgggagcccctaacccctgaggaagtacagtctgttcgagaacaccttggtcatgaaagtgacaacctgctgtttgttcagatcacaggcaaaaaaccaaactttgaagtgggttcttctaggcagcttaagctttccatcaccaagaagtcttctccttcagtgaaacctgctgtggaccctgctgctgccaagctgtggaccctctcagccaacgatatggaggacgacagcatggatctcattgactcagatgagctgctggatccagaagatttgaagaagccagatccagcttccctgcgggctgcttcttgtggggaagggaaaaagaggaaggcctgtaagaactgcacctgtggccttgccgaagaactggaaaaagagaagtcaagggaacagatgagctcccaacccaagtcagcttgtggaaactgctacctgggcgatgccttccgctgtgccagctgcccctaccttgggatgccagccttcaaacctggggaaaaggtgcttctgagtgatagcaatcttcatgatgcctaggaggttcctgacatgggacccatctgctcctccagccaactcctgtccctcacatcccaccatggtggctcctcccacctcctctggatttgttcactctgagatctgtttgcagagtgggtgcttagcagacagagtgaagctggctggggggcacagtggtgtgtagtgctgctgtgtatcaaaagaccaaggtattatgggacctggtttcagaatgggatgggtttcttcacctcatgttaagagaagggagtgtgtcctgaagaagcccttcttctgatgttaaaatgctgaccagaacgctcttgagcccaggcatcgttgagcattaacactctgtgacagagctgcagacccctgccttgagtctcatctcagcaatgctgccaccctcttgtctttcagagttgttagtttactccattctttgtgacacgagtcaagtggctcacaacctcctcagggcaccagaggactcactcactggttgctgtgatgatatccagtgtccctctgcccccttccatccccaaccacatttgactgtagcattgcatctgtgtcctgttgtcatttatgttaaccttcaggtattaaacttgctgcatatcttgacatatcttgagattctgcatgtcttgtaaagagaggggatgtgcatttgtgtgtgatgttggatagtcatccacgctcagtttggaccattggaggaacttagtgtcacgcacaaatggggctattcctacgcttagaatagggcttgtctgcccactttagaagagtccaggttggtgagcatttagagggaagcagggcagaactctgaacgacaatacgtctctctgagcagagacccctttgttcttgttatccacccatatggacttggaatcaatcttgccaaatatttggagagattgtgtggatttaagagacctggatttttatattttaccagtaaataaaagttttcattgatatctgtccttgaaaaaagatt

SEQ ID NO: 441492 - DNA, 2082 bp, Homo sapiens
  misc_feature (60)..(60): n is a, c, g, or t
cagatgtgtaagcgtcccgatgttattcatcacagggcgggcttcgatgttatggagagnagccgggagcgagcccaggcggcagtcttgattcccttttggccagcagtttttaggtctgtcagtactgcactgcaagaatggcagattttgggatctctgctggccagtttgtggcagtggtctgggataagtcatccccagtggaggctctgaaaggtctggtggataagcttcaagcgttaaccggcaatgagggccgcgtgtctgtggaaaacatcaagcagctgttgcaatctgcccacaaagaatccagctttgacattattttgtcaggtttagtcccaggaagcaccactctgcacagtgctgagattttggctgaaatcgcccggatccttcggcctggtggatgtctttttctgaaggagccagtagagacagctgtagataacaatagcaaagtgaagacagcatctaagctgtgttcagccctgactctttctggtcttgtggaagtgaaagagctgcagcgggagcccctaacccctgaggaagtacagtctgttcgagaacaccttggtcatgaaagtgacaacctgctgtttgttcagatcacaggcaaaaaaccaaactttgaagtgggttcttctaggcagcttaagctttccatcaccaagaagtcttctccttcagtgaaacctgctgtggaccctgctgctgccaagctgtggaccctctcagccaacgatatggaggacgacagcatggatctcattgactcagatgagctgctggatccagaagatttgaagaagccagatccagcttccctgcgggctgcttcttgtggggaagggaaaaagaggaaggcctgtaagaactgcacctgtggccttgccgaagaactggaaaaagagaagtcaagggaacagatgagctcccaacccaagtcagcttgtggaaactgctacctgggcgatgccttccgctgtgccagctgcccctaccttgggatgccagccttcaaacctggggaaaaggtgcttctgagtgatagcaatcttcatgatgcctaggaggttcctgacatgggacccatctgctcctccagccaactcctgtccctcacatcccaccatggtggctcctcccacctcctctggatttgttcactctgagatctgtttgcagagtgggtgcttagcagacagagtgaagctggctggggggcacagtggtgtgtagtgctgctgtgtatcaaaagaccaaggtattatgggacctggtttcagaatgggatgggtttcttcacctcatgttaagagaagggagtgtgtcctgaagaagcccttcttctgatgttaaaatgctgaccagaacgctcttgagcccaggcatcgttgagcattaacactctgtgacagagctgcagacccctgccttgagtctcatctcagcaatgctgccaccctcttgtctttcagagttgttagtttactccattctttgtgacacgagtcaagtggctcacaacctcctcagggcaccagaggactcactcactggttgctgtgatgatatccagtgtccctctgcccccttccatccccaaccacatttgactgtagcattgcatctgtgtcctgttgtcatttatgttaaccttcaggtattaaacttgctgcatatcttgacatatcttgagattctgcatgtcttgtaaagagaggggatgtgcatttgtgtgtgatgttggatagtcatccacgctcagtttggaccattggaggaacttagtgtcacgcacaaatggggctattcctacgcttagaatagggcttgtctgcccactttagaagagtccaggttggtgagcatttagagggaagcagggcagaactctgaacgacaatacgtctctctgagcagagacccctttgttcttgttatccacccatatggacttggaatcaatcttgccaaatatttggagagattgtgtggatttaagagacctggatttttatattttaccagtaaataaaagttttcattgatatctgtccttgaaaaaagatt

SEQ ID NO: 441493 - DNA, 1971 bp, Homo sapiens
tcgtcgctccgtggagcctcctcctctcgcgagagcgcgaggcgtggagtcgacggctggagagaagccgggagcgagcccaggcggcagtcttgattcccttttggccagcagtttttaggtctgtcagtactgcactgcaagaatggcagattttgggatctctgctggccagtttgtggcagtggtctgggataagtcatccccagtggaggctctgaaaggtctggtggataagcttcaagcgttaaccggcaatgagggccgcgtgtctgtggaaaacatcaagcagctgttgcaatctgcccacaaagaatccagctttgacattattttgtcaggtttagtcccaggaagcaccactctgcacagtgctgagattttggctgaaatcgcccggatccttcggcctggtggatgtctttttctgaaggagccagtagagacagctgtagataacaatagcaaagtgaagacagcatctaagctgtgttcagccctgactctttctggtcttgtggaagtgaaagagctgcagcgggagcccctaacccctgaggaagtacagtctgttcgagaacaccttggtcatgaaagtgacaacctgctgtttgttcagatcacaggcaaaaaaccaaactttgaagtgggttcttctaggcagcttaagctttccatcaccaagaagtcttctccttcagtgaaacctgctgtggaccctgctgctgccaagctgtggaccctctcagccaacgatatggaggacgacagcatgcacctgtggccttgccgaagaactggaaaaagagaagtcaagggaacagatgagctcccaacccaagtcagcttgtggaaactgctacctgggcgatgccttccgctgtgccagctgcccctaccttgggatgccagccttcaaacctggggaaaaggtgcttctgagtgatagcaatcttcatgatgcctaggaggttcctgacatgggacccatctgctcctccagccaactcctgtccctcacatcccaccatggtggctcctcccacctcctctggatttgttcactctgagatctgtttgcagagtgggtgcttagcagacagagtgaagctggctggggggcacagtggtgtgtagtgctgctgtgtatcaaaagaccaaggtattatgggacctggtttcagaatgggatgggtttcttcacctcatgttaagagaagggagtgtgtcctgaagaagcccttcttctgatgttaaaatgctgaccagaacgctcttgagcccaggcatcgttgagcattaacactctgtgacagagctgcagacccctgccttgagtctcatctcagcaatgctgccaccctcttgtctttcagagttgttagtttactccattctttgtgacacgagtcaagtggctcacaacctcctcagggcaccagaggactcactcactggttgctgtgatgatatccagtgtccctctgcccccttccatccccaaccacatttgactgtagcattgcatctgtgtcctgttgtcatttatgttaaccttcaggtattaaacttgctgcatatcttgacatatcttgagattctgcatgtcttgtaaagagaggggatgtgcatttgtgtgtgatgttggatagtcatccacgctcagtttggaccattggaggaacttagtgtcacgcacaaatggggctattcctacgcttagaatagggcttgtctgcccactttagaagagtccaggttggtgagcatttagagggaagcagggcagaactctgaacgacaatacgtctctctgagcagagacccctttgttcttgttatccacccatatggacttggaatcaatcttgccaaatatttggagagattgtgtggatttaagagacctggatttttatattttaccagtaaataaaagttttcattgatatctgtccttgaaaaaagatt

SEQ ID NO: 441494 - DNA, 1836 bp, Homo sapiens
tcgtcgctccgtggagcctcctcctctcgcgagagcgcgaggcgtggagtcgacggctggagagaagccgggagcgagcccaggcggcaggtttagtcccaggaagcaccactctgcacagtgctgagattttggctgaaatcgcccggatccttcggcctggtggatgtctttttctgaaggagccagtagagacagctgtagataacaatagcaaagtgaagacagcatctaagctgtgttcagccctgactctttctggtcttgtggaagtgaaagagctgcagcgggagcccctaacccctgaggaagtacagtctgttcgagaacaccttggtcatgaaagtgacaacctgctgtttgttcagatcacaggcaaaaaaccaaactttgaagtgggttcttctaggcagcttaagctttccatcaccaagaagtcttctccttcagtgaaacctgctgtggaccctgctgctgccaagctgtggaccctctcagccaacgatatggaggacgacagcatggatctcattgactcagatgagctgctggatccagaagatttgaagaagccagatccagcttccctgcgggctgcttcttgtggggaagggaaaaagaggaaggcctgtaagaactgcacctgtggccttgccgaagaactggaaaaagagaagtcaagggaacagatgagctcccaacccaagtcagcttgtggaaactgctacctgggcgatgccttccgctgtgccagctgcccctaccttgggatgccagccttcaaacctggggaaaaggtgcttctgagtgatagcaatcttcatgatgcctaggaggttcctgacatgggacccatctgctcctccagccaactcctgtccctcacatcccaccatggtggctcctcccacctcctctggatttgttcactctgagatctgtttgcagagtgggtgcttagcagacagagtgaagctggctggggggcacagtggtgtgtagtgctgctgtgtatcaaaagaccaaggtattatgggacctggtttcagaatgggatgggtttcttcacctcatgttaagagaagggagtgtgtcctgaagaagcccttcttctgatgttaaaatgctgaccagaacgctcttgagcccaggcatcgttgagcattaacactctgtgacagagctgcagacccctgccttgagtctcatctcagcaatgctgccaccctcttgtctttcagagttgttagtttactccattctttgtgacacgagtcaagtggctcacaacctcctcagggcaccagaggactcactcactggttgctgtgatgatatccagtgtccctctgcccccttccatccccaaccacatttgactgtagcattgcatctgtgtcctgttgtcatttatgttaaccttcaggtattaaacttgctgcatatcttgacatatcttgagattctgcatgtcttgtaaagagaggggatgtgcatttgtgtgtgatgttggatagtcatccacgctcagtttggaccattggaggaacttagtgtcacgcacaaatggggctattcctacgcttagaatagggcttgtctgcccactttagaagagtccaggttggtgagcatttagagggaagcagggcagaactctgaacgacaatacgtctctctgagcagagacccctttgttcttgttatccacccatatggacttggaatcaatcttgccaaatatttggagagattgtgtggatttaagagacctggatttttatattttaccagtaaataaaagttttcattgatatctgtccttgaaaaaagatt

SEQ ID NO: 441495 - DNA, 1935 bp, Homo sapiens
  misc_feature (12)..(12): n is a, c, g, or t
  misc_feature (42)..(42): n is a, c, g, or t
ccgtacgggatnaaattacggctaggtacgaggcctgggtgntgcaggcggcagtcttgattcccttttggccagcagtttttaggtctgtcagtactgcactgcaagaatggcagattttgggatctctgctggccagtttgtggcagtggtctgggataagtcatccccagtggaggctctgaaaggtctggtggataagcttcaagcgttaaccggcaatgagggccgcgtgtctgtggaaaacatcaagcagctgttgcaatctgcccacaaagaatccagctttgacattattttgtcaggtttagtcccaggaagcaccactctgcacagtgctgagattttggctgaaatcgcccggatccttcggcctggtggatgtctttttctgaaggagccagtagagacagctgtagataacaatagcaaagtgaagacagcatctaagctgtgttcagccctgactctttctggtcttgtggaagtgaaagagctgcagcgggagcccctaacccctgaggaagtacagtctgttcgagaacaccttggtcatgaaagtgacaacctgctgtttgttcagatcacaggcaaaaaaccaaactttgaagtgggttcttctaggcagcttaagctttccatcaccaagaagtcttctccttcagtgaaacctgctgtggaccctgctgctgccaagctgtggaccctctcagccaacgatatggaggacgacagcatgcacctgtggccttgccgaagaactggaaaaagagaagtcaagggaacagatgagctcccaacccaagtcagcttgtggaaactgctacctgggcgatgccttccgctgtgccagctgcccctaccttgggatgccagccttcaaacctggggaaaaggtgcttctgagtgatagcaatcttcatgatgcctaggaggttcctgacatgggacccatctgctcctccagccaactcctgtccctcacatcccaccatggtggctcctcccacctcctctggatttgttcactctgagatctgtttgcagagtgggtgcttagcagacagagtgaagctggctggggggcacagtggtgtgtagtgctgctgtgtatcaaaagaccaaggtattatgggacctggtttcagaatgggatgggtttcttcacctcatgttaagagaagggagtgtgtcctgaagaagcccttcttctgatgttaaaatgctgaccagaacgctcttgagcccaggcatcgttgagcattaacactctgtgacagagctgcagacccctgccttgagtctcatctcagcaatgctgccaccctcttgtctttcagagttgttagtttactccattctttgtgacacgagtcaagtggctcacaacctcctcagggcaccagaggactcactcactggttgctgtgatgatatccagtgtccctctgcccccttccatccccaaccacatttgactgtagcattgcatctgtgtcctgttgtcatttatgttaaccttcaggtattaaacttgctgcatatcttgacatatcttgagattctgcatgtcttgtaaagagaggggatgtgcatttgtgtgtgatgttggatagtcatccacgctcagtttggaccattggaggaacttagtgtcacgcacaaatggggctattcctacgcttagaatagggcttgtctgcccactttagaagagtccaggttggtgagcatttagagggaagcagggcagaactctgaacgacaatacgtctctctgagcagagacccctttgttcttgttatccacccatatggacttggaatcaatcttgccaaatatttggagagattgtgtggatttaagagacctggatttttatattttaccagtaaataaaagttttcattgatatctgtccttgaaaaaagatt

SEQ ID NO: 441496 - DNA, 1692 bp, Homo sapiens
tcgtcgctccgtggagcctcctcctctcgcgagagcgcgaggcgtggagtcgacggctggagagaagccgggagcgagcccaggcggcagtcttgattcccttttggccagcagtttttaggtctgtcagtactgcactgcaagaatggcagattttgggatctctgctggccagtttgtggcagtggtctgggataagtcatccccagtggaggctctgaaaggtctggtggataagcttcaagcgttaaccggcaatgagggccgcgtgtctgtggaaaacatcaagcagctgttgcaatctgcccacaaagaatccagctttgacattattttgtcaggtttagtcccaggaagcaccactctgcacagtgctgagattttggctgaaatcgcccggatccttcggcctggtggatgtctttttctgaaggagccagtagagacagctgtagataacaatagcaaagtgaagacagcatctaagctgtgttcagccctgactctttctggtcttgtggaagtgaaagagctgcagcgggagcccctaacccctgaggaagtacagtctgttcgagaacaccttggtcatgaaagtgacaacctgctgtttgttcagatcacaggcaaaaaaccaaactttgaagtgggttcttctaggcagcttaagctttccatcaccaagaagtcttctccttcagtgaaacctgctgtggaccctgctgctgccaagctgtggaccctctcagccaacgatatggaggacgacagcatgtgcatcttctgtggatgtagtttaactcaccgttggcctcttgagcatgtggtcaggttgaacatgatgatcaaccaaaaggaggacagggtggacaccttctttaccctggactccaagtttcctctcgaagcctgcagtcactttagcttttcattagcagagaccacgactgtatcactcattgctttgaacactctccaggatctcattgactcagatgagctgctggatccagaagatttgaagaagccagatccagcttccctgcgggctgcttcttgtggggaagggaaaaagaggaaggcctgtaagaactggtgagtgctggggtgactggagcctgccatgctgcctccagtggcttcatgctgaagacatcgcggtgctgtactatttttagaacatacattttccaggctgggcaacacagggagaccatctctgcaaataattaaaaaaaaaaaaaaattagccaggcatggtggtatgtacctgtggtcccagctacttgggaggcaaaggcaggaggatcacttgagcctgggaggtcgaggctgcagtgagccgtaattgtgccatgtatctaatttcactctccctcaaaaccctaccagtaagccactattgtgccactgcactccagcatgggcatcagagcgagaccttggtgtcttcacatttgtttttataaatggatgggaaggattgtagaaagttaatcagtgatgttcatcatcagcgttaatcatcagtgttttttaaatgtaaaagctgccagcatttacaaatcaggaaatttcaagtgaaaacacagatttttttcccttctgttcttgaatttggaaaatatggcaatctgggtccactttccccagcatgataaccagctgaagcttgagtagtggctgccctct

SEQ ID NO: 441497 - DNA, 1557 bp, Homo sapiens
ttccccagggctacatctgcacgccccgtggtgtcaccctcagccggcgccgggcaccctggacagtgcggtgggcgatggcccaggtgggtggccgcgacggtggcctcctgcagagctgggacccggtcctacattcgtgattttgttttctcccaagtcagaaaaatgttgagggtattagacatccctgaaactcagttaaccgaatttccagtctccaaagcggaagggtaggcatcgccaggcgctggtgagccctggtcaatgagcgcttccatggaaaccgctcggctgattacattttttctgtgtattatttgaatagagagtaaagctcctccgctgtttcgtaaccatatcctttcccccgctaactggaggctgatttctacatatttcttccatgtatctgagaatatctaactagaaggatgagaaggaaataaaatgttataatcagataaggctggttataaaagagtaatgtattacctcaatttttgactgactttgtaaaagccaataactggtttaatgtttatcttgatagactttaaatgtatcaagtcttaattgtattttaaattgaagccttacatttttaaaacagattttgtatttttcttgtggaggtctttgctctaataacacacacacactgtctctctctctctctctctctaattctaggcacacatttagttagatgtgaagcatttaattcattgggagctaggtcagctgccagatgagttgcaaaaacagaaaaaaacctacccattgaataacttctttgaatttggagataagttttcttttacttaaaatgaatatattaattctagaggggcaaaactagcaatgcttatgcaagtgacggtgctgctcttgttccacccccacccagatggtctctgagtgcgccgtcctgggcagggcacacggtctggagctgagagggtggagcaagagtgcactgactccgagccgagggcaggagtggctcaacttggtctcgtcttgcacttagtgcaaataccaataattaagatgcctagacttctgcccttggtcacagtaacaacaacattttgaagacttttccctggtggcatcctagagggaccgactttctgcagcctctgtcttccaagctgagcttctgctgcagtgtggctgtcactgcacctgtgtgtctccctgacgtccctgtcagctgcttcattttgatttcctttcttctcccgccctttctgtaggctctgtcccagcatctcctgttcttaactggccacaatacaacactaagcgcatttttagtaatttgtatttattaaatagagtttgtgggccttgttctctactttaaaagcagatgagtggaacatttatgtttccctggtcaatgagcctcaataaaaaacaaacagaaaaaaggttttacacgtgacacatgatatcttttcattgctgttaaggacattttgagaaagttttctaagtcgctatgctccaatttcttaatgcttaaataaaagagaaattcagtgactt

SEQ ID NO: 441498 - DNA, 1503 bp, Homo sapiens
ttccccagggctacatctgcacgccccgtggtgtcaccctcagccggcgccgggcaccctggacagtgcggtgggcgatggcccaggtgggtggccgcgacggtggcctcctgcagagctgggacccggtcctacattcgtgattttgttttctcccaagtcagaaaaatgttgagggtattagacatccctgaaactcagttaaccgaatttccagtctccaaagcggaagggtaggcatcgccaggcgctggtgagccctggtcaatgagcgcttccatggaaaccgctcggctgattacattttttctgtgtattatttgaatagagagtaaagctcctccgctgtttcgtaaccatatcctttcccccgctaactggaggctgatttctacatatttcttccatgtatctgagaatatctaactagaaggatgagaaggaaataaaatgttataatcagataaggctggttataaaagagtaatgtattacctcaatttttgactgactttgtaaaagccaataactggtttaatgtttatcttgatagactttaaatgtatcaagtcttaattgtattttaaattgaagccttacatttttaaaacagattttgtatttttcttgtggaggtctttgctctaataacacacacacactgtctctctctctctctctctctaattctaggcacacatttagttagatgtgaagcatttaattcattgggagctaggtcagctgccagatgagttgcaaaaacagaaaaaaacctacccattgaataacttctttgaatttggagataagttttcttttacttaaaatgaatatattaattctagagggccagatggtctctgagtgcgccgtcctgggcagggcacacggtctggagctgagagggtggagcaagagtgcactgactccgagccgagggcaggagtggctcaacttggtctcgtcttgcacttagtgcaaataccaataattaagatgcctagacttctgcccttggtcacagtaacaacaacattttgaagacttttccctggtggcatcctagagggaccgactttctgcagcctctgtcttccaagctgagcttctgctgcagtgtggctgtcactgcacctgtgtgtctccctgacgtccctgtcagctgcttcattttgatttcctttcttctcccgccctttctgtaggctctgtcccagcatctcctgttcttaactggccacaatacaacactaagcgcatttttagtaatttgtatttattaaatagagtttgtgggccttgttctctactttaaaagcagatgagtggaacatttatgtttccctggtcaatgagcctcaataaaaaacaaacagaaaaaaggttttacacgtgacacatgatatcttttcattgctgttaaggacattttgagaaagttttctaagtcgctatgctccaatttcttaatgcttaaataaaagagaaattcagtgactt

SEQ ID NO: 441499 - DNA, 517 bp, Homo sapiens
ctcaccttcctagaatatcaggaaatgcctgaggcataacagatagtaagcctaaaaatgacccaagaccggacgtagtctgtggcgtgcagtgtaatggagtttgtggtcagcgttcaggttatggcgagagcggtacccataaccttccaccctttttgttgggaatgaatgacgggagtctgcacccgcccccaccccatggtgcagagtggcttgtcagaccctccatagaatagagacaggcttcaaagactatttagtacttattagcagtttttaccctttttatcatgattcatgtggtagagcaagctcgcctgacacctttataatggagtacttcagtataagattagtgccccagagatactcagagttcaagagcaatgcagcctccctgttttggtaggttgttagcgaggctgttgtgggaggggagggcctgtagatggaatgatttgtaagctgggaaaggaaaaaatctaggtttttctttttttggaccatcactggg

SEQ ID NO: 441500 - DNA, 2152 bp, Homo sapiens
  misc_feature (891)..(891): n is a, c, g, or t
gggccatgaatttaaggtgaaaccagtcagctgagttagttgtgtgatttttttttttctcctagcaacattcagctgttatgagggcagcgaagagcaggcaggtgatcagttcacccaaaattcgtgttttgccctgcaggtttgacagaggagaagcagtgccagaggcttgagagtagttgcaagggggtgattttgatgatgaaccttgaaatgttagctgagtaggaaagcaagagaagaatcagagtgggggccatgaaaatcattactggcttaaagtgagttaatgggcgcagagtttcagtttgggaagatgaaaaatttctaaagctggatagggctcttggtttcacagcaatgtgaatgtatgtaatgccactcaaccaaacacttttaaatatttaaaattcagtaactctatagagaaataaagggttttcccaatcctggaaaaaaatggttaaaattgtaaatcttacatatattttaccatagtaaaaaatgaattaggctgggcccatggctcacgcctacaatcccagcactttgggaggctgaggcaggcaaatcgtttgaggccaggagttcaaaaccagcctggccaacatggcaaaactcatctctactaaaaatacaaagaaaatagccaggcatggtggcacacacctgtaatcccagctactcaggaggctgaggcatgagaattgcttggacctggaaggcagacattggagtgagctgagatcttcccactgcactccagcctgggtgacatagctagactgtctcaaaaaaaaaaaaaaaaagaatgaacacttaaatatttgtggcagatagaggtgttatttgcatatggaagaaaattgctttagaaatgaaatttcngattactgaaactaaagagaaagtatctcttcttatcatggtaccaagcttgagggtgcataagtcacctatagacagaaataagcattgagtttcattttttgtttgtttttgagacaggttctcactgttacccagcctggagtgcagtggtacaattgtagctcactgcagcctggacctcctgggatcaagggattcccccaacctcggcctcccaagtagctgggactatagaaatgcaacaccatgcccagataatttaattttttttttttttttttttttttgtagagacaggggtttctctttgtcacccaggctggcctcaaactcctgggctcaagcagtcttcccacctttccctcccaaagtgctgggattacaggcgtgagccactgcatcctgccgagaaaatcattttttatttaaataatgtcaaatggaagtatgtagcacccccccccaccttcttttcccctttctttcctctttgagtctgctgtcattccctttttcatgagttttctctgctccccaaataggctaaacaataaccgtaaagtgagattagagaaaataagaatggagtagatgatggaattcaaaatagctgtctacattcttcactgagaaagatagctttgagttaaaggtgagaggagcaaatctggggaaaaacgggtgaaacggcatgatttaagtagcataccagatgcgtttctgcatggcatggctcttgcttgatgaataatgttctgtatagtagaagaggaaaatacagtgagtgaaggagctggcagaaggtgggctgggggagttggggaagagtgaaatgagtatggagaggtgagagagctgactgcaaaggcatgtggggtgtggattttaaaaggaaagccctgaggtggaaatcactaacatggtgcctggctacaagcagagggagctcaggacttgactgtgctgggggtggcctgcccttttgtagtgcagttgaggagagctcaggggctgtcagaatgctgtgtgggaaggtggaggatgaaagaggacctgggagcagcaactttgttctggtttgttgttttctcttccctacctcgtatgtactcccactcaggaaaagatcctgagacctctctgtaccagatcctcttatacccaggttctccttaatcccaatcaactttaatctataaagttacgatttgtttacttataaatttatttttaataaagttgtgaaaccgaacatgtt

SEQ ID NO: 441501 - DNA, 2481 bp, Homo sapiens
  misc_feature (891)..(891): n is a, c, g, or t
gggccatgaatttaaggtgaaaccagtcagctgagttagttgtgtgatttttttttttctcctagcaacattcagctgttatgagggcagcgaagagcaggcaggtgatcagttcacccaaaattcgtgttttgccctgcaggtttgacagaggagaagcagtgccagaggcttgagagtagttgcaagggggtgattttgatgatgaaccttgaaatgttagctgagtaggaaagcaagagaagaatcagagtgggggccatgaaaatcattactggcttaaagtgagttaatgggcgcagagtttcagtttgggaagatgaaaaatttctaaagctggatagggctcttggtttcacagcaatgtgaatgtatgtaatgccactcaaccaaacacttttaaatatttaaaattcagtaactctatagagaaataaagggttttcccaatcctggaaaaaaatggttaaaattgtaaatcttacatatattttaccatagtaaaaaatgaattaggctgggcccatggctcacgcctacaatcccagcactttgggaggctgaggcaggcaaatcgtttgaggccaggagttcaaaaccagcctggccaacatggcaaaactcatctctactaaaaatacaaagaaaatagccaggcatggtggcacacacctgtaatcccagctactcaggaggctgaggcatgagaattgcttggacctggaaggcagacattggagtgagctgagatcttcccactgcactccagcctgggtgacatagctagactgtctcaaaaaaaaaaaaaaaaagaatgaacacttaaatatttgtggcagatagaggtgttatttgcatatggaagaaaattgctttagaaatgaaatttcngattactgaaactaaagagaaagtatctcttcttatcatggtaccaagcttgagggtgcataagtcacctatagacgtagagattgtagtataggacctgggaatattacattatttgctcccatgtttactgttttgttctaagcctttagcacagcattcaaaacaagttgagcactcagtaaacatttgctgactcagtacttggagaacctaggtagagtagaatgatgggaatcaaaaggaaaacagtattctgttagagatcagcaatatcttacactagtagagggatctgtgagaaaaagaatcaagaccattgaatgtgtggcggcttatagcatttgacattctgatctgtgcacgtgatgagaaaaaaagtctgattacagaacagggaaggagagaaataagcattgagtttcattttttgtttgtttttgagacaggttctcactgttacccagcctggagtgcagtggtacaattgtagctcactgcagcctggacctcctgggatcaagggattcccccaacctcggcctcccaagtagctgggactatagaaatgcaacaccatgcccagataatttaattttttttttttttttttttttttgtagagacaggggtttctctttgtcacccaggctggcctcaaactcctgggctcaagcagtcttcccacctttccctcccaaagtgctgggattacaggcgtgagccactgcatcctgccgagaaaatcattttttatttaaataatgtcaaatggaagtatgtagcacccccccccaccttcttttcccctttctttcctctttgagtctgctgtcattccctttttcatgagttttctctgctccccaaataggctaaacaataaccgtaaagtgagattagagaaaataagaatggagtagatgatggaattcaaaatagctgtctacattcttcactgagaaagatagctttgagttaaaggtgagaggagcaaatctggggaaaaacgggtgaaacggcatgatttaagtagcataccagatgcgtttctgcatggcatggctcttgcttgatgaataatgttctgtatagtagaagaggaaaatacagtgagtgaaggagctggcagaaggtgggctgggggagttggggaagagtgaaatgagtatggagaggtgagagagctgactgcaaaggcatgtggggtgtggattttaaaaggaaagccctgaggtggaaatcactaacatggtgcctggctacaagcagagggagctcaggacttgactgtgctgggggtggcctgcccttttgtagtgcagttgaggagagctcaggggctgtcagaatgctgtgtgggaaggtggaggatgaaagaggacctgggagcagcaactttgttctggtttgttgttttctcttccctacctcgtatgtactcccactcaggaaaagatcctgagacctctctgtaccagatcctcttatacccaggttctccttaatcccaatcaactttaatctataaagttacgatttgtttacttataaatttatttttaataaagttgtgaaaccgaacatgtt

SEQ ID NO: 441502 - DNA, 2480 bp, Homo sapiens
cgcggtagagaggctgaggagccggcctgcaacctgccggggcggctccgctacgcgcagccgcctcagtggcttcctccacagccacctccggagggatctggctgaggaggaagtggaggtgtcactggccccggcctttgccccaatcttgtgtgggcactgaagggggactacaggttcgagagttatgggtgctacatgtgtgctttcagagcagtagtgtgaggaagcttggagtgggatggcaggacggcctcatccctatgatggtaactccagtgatccagagaattgggatcggaaattgcatagtagacctcgtaaactttataaacattcaagtacttcctcgcgtattgctaaaggaggagttgaccacaccaaaatgagtctacatggtgctagtgggggacatgagagatcaagagatagacgaaggtcaagtgacagatcacgagattcatctcatgaaagaacggagtctcagctcactccttgtattagaaatgtgacttctccaacacgacagcaccatgttgaacgagaaaaagatcacagttcctctcgtccaagcagtccgcgtcctcaaaaagcatccccaaatggttccattagcagtgctgggaacagcagcagaaacagtagtcagtcaagttcagatggtagctgtaagacagctggggagatggtgtttgtatatgaaaatgcaaaagaaggagctcggaatataagaacgtcagaacgagtgacactaatagtggataacactagatttgttgtagacccatccatttttactgcacagccaaatacaatgttgggcaggatgtttggatctggccgagaacataactttacacgacccaatgagaaaggagagtatgaggtggcagagggaattggttccactgtgtttcgagcgattctggattactataaaacaggaataatccgttgtcctgatggcatatctattcctgaactgagagaagcatgtgactatctttgtatctcttttgaatatagcactattaaatgtagagatctcagtgccctaatgcatgagttatcaaatgatggtgctcgtagacaatttgaattttatctggaagaaatgatcctccctctcatggtagctagtgcccagagtggggaacgggaatgtcatatagtggtgcttacagatgatgatgtggttgattgggatgaagaatatccaccacagatgggagaagaatattcacaaattatttatagcacaaaattatatagatttttcaagtatattgaaaacagagatgtggccaagtcagttttgaaggagaggggtcttaagaagattagattgggaatagaaggttatcctacctacaaagaaaaagtaaagaaaaggcctggaggccgcccagaagtgatctacaactatgtccaaagaccctttattcgaatgtcctgggagaaggaagaaggaaagagtcggcatgtagactttcagtgtgtaaagagtaaatctatcaccaatcttgcagcagctgcagcagacattccccaggaccagctggtagtcatgcatccaactccacaagtggatgagctggatattctccctatccatcccccttctggcaacagtgacctcgatcctgatgcacagaatccaatgctgtgatgctgatcttccttgaaaccatagcatgctactcttcacagtgacgttgtactctcctcattctgcactgcaaggccactcttcttcattgtgagatgcacataacaatgtttaggatattgcagtgtaggcttttttaaagaccaaaggtagctgaatggtttttttttaaatgagtacaactctagcattttgaagttccagttgtaaatgtatttgtttaccagtaggtttgtgaaattggttctttgtatgggggatggtcctttttcacacagctaggtcttttcagaagtggtggaaattggcagctggggtactttcagtttggactgatattcatcacacctcagataaaatgcagagtaatatatagttgcactttataaatggtggttaaatggaaatgttcaagccattttatagttgtgatgcacaatataatttaagtgcttctgtcaaagtattcctccagtacaatttgtatagtttgctgcccttgatgagcaaaaagtatttatcttgggcttatctgaatgatcaggatgagatttaatgcccatatcttaccagttcagttatctccagagccatttcaccctttagagtgagtcacatgcagggagtgtgaatgtcagaggtggtttattatccagtctgccttacccttaatctgttcacagatatttatttactaatgctttttttttcttaagagttatgggataggaaaatgaagtgtttgctcttcatttactaaatgattgtaaacttgagtttttcatcaaaataaaattccattgtttta

SEQ ID NO: 441503 - DNA, 2512 bp, Homo sapiens
cgcggtagagaggctgaggagccggcctgcaacctgccggggcggctccgctacgcgcagccgcctcagtggcttcctccacagccacctccggagggatctggctgaggaggaagtggaggtgtcactggccccggcctttgccccaatcttgtgtgggcactgaagggggactacaggttcgagagttatgggtgctacatgtgtgctttcagagcagtagtgtgaggaagcttggagtgggatggcaggacggcctcatccctatgatggtaactccagtgatccagagaattgggatcggaaattgcatagtagacctcgtaaactttataaacattcaagtacttcctcgcgtattgctaaaggaggagttgaccacaccaaaatgagtctacatggtgctagtgggggacatgagagatcaagagatagacgaaggtcaagtgacagatcacgagattcatctcatgaaagaacggagtctcagctcactccttgtattagaaatgtgacttctccaacacgacagcaccatgttgaacgagaaaaagatcacagttcctctcgtccaagcagtccgcgtcctcaaaaagcatccccaaatggttccattagcagtgctgggaacagcagcagaaacagtagtcagtcaagttcagatggtagctgtaagacagctggggagatggtgtttgtatatgaaaatgcaaaagaaggagctcggaatataagaacgtcagaacgagtgacactaatagtggataacactagatttgttgtagacccatccatttttactgcacagccaaatacaatgttgggcaggatgtttggatctggccgagaacataactttacacgacccaatgagaaaggagagtatgaggtggcagagggaattggttccactgtgtttcgagcgattctggattactataaaacaggaataatccgttgtcctgatggcatatctattcctgaactgagagaagcatgtgactatctttgtatctcttttgaatatagcactattaaatgtagagatctcagtgccctaatgcatgagttatcaaatgatggtgctcgtagacaatttgaattttatctggaagaaatgatcctccctctcatggtagctagtgcccagagtggggaacgggaatgtcatatagtggtgcttacagatgatgatgtggttgattgggatgaagaatatccaccacagatgggagaagaatattcacaaattatttatagcacaaaattatatagatttttcaagtatattgaaaacagagatgtggccaagtcagttttgaaggagaggggtcttaagaagattagattgggaatagaaggttatcctacctacaaagaaaaagtaaagaaaaggcctggaggccgcccagaagtgatctacaactatgtccaaagaccctttattcgaatgtcctgggagaaggaagaaggaaagagtcggcatgtagactttcagtgtgtaaagagtaaatctatcaccaatcttgcagcagctgcagcagacattccccaggaccagctggtagtcatgcatccaactccacaagtggatgagctggatattctccctatccatcccccttctggcaacagtgacctcgatcctgatgcacagaatccaatgctgtgatgctgatcttccttgaaaccatagcatgctactcttcacagtgacgttgtactctcctcattctgcactgcaaggccactcttcttcattgtgagatgcacataacaatgtttaggatattgcagtgtaggcttttttaaagaccaaaggtagctgaatggtttttttttaaatgagtacaactctagcattttgaagttccagttgtaaatgtatttgtttaccagtaggtttgtgaaattggttctttgtatgggggatggtcctttttcacacagctaggtcttttcagaagtggtggaaattggcagctggggtactttcagtttggactgatattcatcacacctcagataaaatgcagagtaatatatagttgcactttataaatggtggttaaatggaaatgttcaagccattttatagttgtgatgcacaatataatttaagtgcttctgtcaaagtattcctccagtacaatttgtatagtttgctgcccttgatgagcaaaaagtatttatcttgggcttatctgaatgatcaggatgagatttaatgcccatatcttaccagttcagttatctccagagccatttcaccctttagagtgagtcacatgcagggagtgtgaatgtcagaggtggtttattatccagtctgccttacccttaatctgttcacagatatttatttactaatgctttttttttcttaagagttatgggataggaaaatgaagtgtttgctcttcatttactaaatgattgtaaacttgagtttttcatcaaaataaaattccattgttttaatgtttctgaccaaatttataaccacaaaaac

SEQ ID NO: 441504 - DNA, 2322 bp, Homo sapiens
cgcggtagagaggctgaggagccggcctgcaacctgccggggcggctccgctacgcgcagccgcctcagtggcttcctccacagccacctccggagggatctggctgaggaggaagtggaggtgtcactggccccggcctttgccccaatcttgtgtgggcactgaagggggactacaggttcgagatacttcctcgcgtattgctaaaggaggagttgaccacaccaaaatgagtctacatggtgctagtgggggacatgagagatcaagagatagacgaaggtcaagtgacagatcacgagattcatctcatgaaagaacggagtctcagctcactccttgtattagaaatgtgacttctccaacacgacagcaccatgttgaacgagaaaaagatcacagttcctctcgtccaagcagtccgcgtcctcaaaaagcatccccaaatggttccattagcagtgctgggaacagcagcagaaacagtagtcagtcaagttcagatggtagctgtaagacagctggggagatggtgtttgtatatgaaaatgcaaaagaaggagctcggaatataagaacgtcagaacgagtgacactaatagtggataacactagatttgttgtagacccatccatttttactgcacagccaaatacaatgttgggcaggatgtttggatctggccgagaacataactttacacgacccaatgagaaaggagagtatgaggtggcagagggaattggttccactgtgtttcgagcgattctggattactataaaacaggaataatccgttgtcctgatggcatatctattcctgaactgagagaagcatgtgactatctttgtatctcttttgaatatagcactattaaatgtagagatctcagtgccctaatgcatgagttatcaaatgatggtgctcgtagacaatttgaattttatctggaagaaatgatcctccctctcatggtagctagtgcccagagtggggaacgggaatgtcatatagtggtgcttacagatgatgatgtggttgattgggatgaagaatatccaccacagatgggagaagaatattcacaaattatttatagcacaaaattatatagatttttcaagtatattgaaaacagagatgtggccaagtcagttttgaaggagaggggtcttaagaagattagattgggaatagaaggttatcctacctacaaagaaaaagtaaagaaaaggcctggaggccgcccagaagtgatctacaactatgtccaaagaccctttattcgaatgtcctgggagaaggaagaaggaaagagtcggcatgtagactttcagtgtgtaaagagtaaatctatcaccaatcttgcagcagctgcagcagacattccccaggaccagctggtagtcatgcatccaactccacaagtggatgagctggatattctccctatccatcccccttctggcaacagtgacctcgatcctgatgcacagaatccaatgctgtgatgctgatcttccttgaaaccatagcatgctactcttcacagtgacgttgtactctcctcattctgcactgcaaggccactcttcttcattgtgagatgcacataacaatgtttaggatattgcagtgtaggcttttttaaagaccaaaggtagctgaatggtttttttttaaatgagtacaactctagcattttgaagttccagttgtaaatgtatttgtttaccagtaggtttgtgaaattggttctttgtatgggggatggtcctttttcacacagctaggtcttttcagaagtggtggaaattggcagctggggtactttcagtttggactgatattcatcacacctcagataaaatgcagagtaatatatagttgcactttataaatggtggttaaatggaaatgttcaagccattttatagttgtgatgcacaatataatttaagtgcttctgtcaaagtattcctccagtacaatttgtatagtttgctgcccttgatgagcaaaaagtatttatcttgggcttatctgaatgatcaggatgagatttaatgcccatatcttaccagttcagttatctccagagccatttcaccctttagagtgagtcacatgcagggagtgtgaatgtcagaggtggtttattatccagtctgccttacccttaatctgttcacagatatttatttactaatgctttttttttcttaagagttatgggataggaaaatgaagtgtttgctcttcatttactaaatgattgtaaacttgagtttttcatcaaaataaaattccattgtttta

SEQ ID NO: 441505 - DNA, 2426 bp, Homo sapiens
cgcggtagagaggctgaggagccggcctgcaacctgccggggcggctccgctacgcgcagccgcctcagtggcttcctccacagccacctccggagggatctggctgaggaggaagtggaggtgtcactggccccggcctttgccccaatcttgtgtgggcactgaagggggactacaggttcgagagttatgggtgctacatgtgtgctttcagagcagtagtgtgaggaagcttggagtgggatggcaggacggcctcatccctatgatggtaactccagtgatccagagaattgggatcggaaattgcatagtagacctcgtaaactttataaacattcaagtacttcctcgcgtattgctaaaggaggagttgaccacaccaaaatgagtctacatggtgctagtgggggacatgagagatcaagagatagacgaaggtcaagtgacagatcacgagattcatctcatgaaagaacggagtctcagctcactccttgtattagaaatgtgacttctccaacacgacagcaccatgttgaacgagaaaaagatcacagttcctctcgtccaagcagtccgcgtcctcaaaaagcatccccaaatggttccattagcagtgctgggaacagcagcagaaacagtagtcagtcaagttcagatggtagctgtaagacagctggggagatggtgtttgtatatgaaaatgcaaaagaaggagctcggaatataagaacgtcagaacgagtgacactaatagtggataacactagatttgttgtagacccatccatttttactgcacagccaaatacaatgttgggcaggatgtttggatctggccgagaacataactttacacgacccaatgagaaaggagagtatgaggtggcagagggaattggttccactgtgtttcgagcgattctggattactataaaacaggaataatccgttgtcctgatggcatatctattcctgaactgagagaagcatgtgactatctttgtatctcttttgaatatagcactattaaatgtagagatctcagtgccctaatgcatgagttatcaaatgatggtgctcgtagacaatttgaattttatctggaagaaatgatcctccctctcatggtagctagtgcccagagtggggaacgggaatgtcatatagtggtgcttacagatgatgatgtggttgattgggatgaagaatatccaccacagatgggagaagaatattcacaaattatttatagcacaaaattatatagatttttcaagtatattgaaaacagagatgtggccaagtcagttttgaaggagaggggtcttaagaagattagattgggaatagaaggttatcctacctacaaagaaaaagtaaagattcgaatgtcctgggagaaggaagaaggaaagagtcggcatgtagactttcagtgtgtaaagagtaaatctatcaccaatcttgcagcagctgcagcagacattccccaggaccagctggtagtcatgcatccaactccacaagtggatgagctggatattctccctatccatcccccttctggcaacagtgacctcgatcctgatgcacagaatccaatgctgtgatgctgatcttccttgaaaccatagcatgctactcttcacagtgacgttgtactctcctcattctgcactgcaaggccactcttcttcattgtgagatgcacataacaatgtttaggatattgcagtgtaggcttttttaaagaccaaaggtagctgaatggtttttttttaaatgagtacaactctagcattttgaagttccagttgtaaatgtatttgtttaccagtaggtttgtgaaattggttctttgtatgggggatggtcctttttcacacagctaggtcttttcagaagtggtggaaattggcagctggggtactttcagtttggactgatattcatcacacctcagataaaatgcagagtaatatatagttgcactttataaatggtggttaaatggaaatgttcaagccattttatagttgtgatgcacaatataatttaagtgcttctgtcaaagtattcctccagtacaatttgtatagtttgctgcccttgatgagcaaaaagtatttatcttgggcttatctgaatgatcaggatgagatttaatgcccatatcttaccagttcagttatctccagagccatttcaccctttagagtgagtcacatgcagggagtgtgaatgtcagaggtggtttattatccagtctgccttacccttaatctgttcacagatatttatttactaatgctttttttttcttaagagttatgggataggaaaatgaagtgtttgctcttcatttactaaatgattgtaaacttgagtttttcatcaaaataaaattccattgtttta

SEQ ID NO: 441506 - DNA, 2179 bp, Homo sapiens
cgcggtagagaggctgaggagccggcctgcaacctgccggggcggctccgctacgcgcagccgcctcagtggcttcctccacagccacctccggagggatctggctgaggaggaagtggaggtgtcactggccccggcctttgccccaatcttgtgtgggcactgaagggggactacaggttcgagagttatgggtgctacatgtgtgctttcagagcagtagtgtgaggaagcttggagtgggatggcaggacggcctcatccctatgatggtaactccagtgatccagagaattgggatcggaaattgcatagtagacctcgtaaactttataaacattcaagtacttcctcgcgtattgctaaaggaggagttgaccacaccaaaatgagtctacatggtgctagtgggggacatgagagatcaagagatagacgaaggtcaagtgacagatcacgagattcatctcatgaaagaacggagtctcagctcactccttgtattagaaatgtgacttctccaacacgacagcaccatgttgaacgagaaaaagatcacagttcctctcgtccaagcagtccgcgtcctcaaaaagcatccccaaatggttccattagcagtgctgggaacagcagcagaaacagtagtcagtcaagttcagatggtagctgtaagacagctggggagatggtgtttgtatatgaaaatgcaaaagaaggagctcggaatataagaacgtcagaacgagtgacactaatagtggataacactagatttgttgtagacccatccatttttactgcacagccaaatacaatgttgggcaggatgtttggatctggccgagaacataactttacacgacccaatgagaaaggagagtatgaggtggcagagggaattggttccactgtgtttcgagcgattctggattactataaaacaggaataatccgttgtcctgatggcatatctattcctgaactgagagaagcatgtgactatctttgtatctcttttgaatatagcactattaaatgtagagatctcagtgccctaatgcatgagttatcaaatgatggtgctcgtagacaatttgaattttatctggaagaaatgatcctccctctcatggtagctagtgcccagagtggggaacgggaatgtcatatagtggtgcttacagatgatgatgtggttgattgggatgaagaatatccaccacagatgggagaagaatattcacaaattatttatagcacaaaattatatagatttttcaagtatattgaaaacagagatgtggccaagtcagttttgaaggagaggggtcttaagaagattagattgggaatagaaggttatcctacctacaaagaaaaagtaaagaaaaggcctggaggccgcccagaagtgatctacaactatgtccaaagaccctttattcgaatgtcctgggagaaggaagaaggaaagagtcggcatgtagactttcagtgtgtaaagagtaaatctatcaccaatcttgcagcagctgcagcagacattccccaggaccagctggtagtcatgcatccaactccacaagtggatgagctggatattctccctatccatcccccttctggcaacagtgacctcgatcctgatgcacagaatccaatgctgtgatgctgatcttccttgaaaccatagcatgctactcttcacagtgacgttgtactctcctcattctgcactgcaaggccactcttcttcattgtgagatgcacataacaatgtttaggatattgcagtgtaggcttttttaaagaccaaaggtagctgaatggtttttttttaaatgagtacaactctagcattttgaagttccagttgtaaatgtatttgtttaccagtaggtttgtgaaattggttctttgtatgggggatggtcctttttcacacagctaggtcttttcagaagtggtggaaattggcagctggggtactttcatgtgaatgtcagaggtggtttattatccagtctgccttacccttaatctgttcacagatatttatttactaatgctttttttttcttaagagttatgggataggaaaatgaagtgtttgctcttcatttactaaatgattgtaaacttgagtttttcatcaaaataaaattccattgtttta

SEQ ID NO: 441507 - DNA, 793 bp, Homo sapiens
cgcggtagagaggctgaggagccggcctgcaacctgccggggcggctccgctacgcgcagccgcctcagtggcttcctccacagccacctccggagggatctggctgaggaggaagtggaggtgtcactggccccggcctttgccccaatcttgtgtgggcactgaagggggactacaggttcgagagttatgggtgctacatgtgtgctttcagagcagtagtgtgaggaagcttggagtgggatggcaggacggcctcatccctatgatggtaactccagtgatccagagaattgggatcggaaattgcatagtagacctcgtaaactttataaacattcaagtacttcctcgcgtattgctaaaggaggagttgaccacaccaaaatgagtctacatggtgctagtgggggacatgagagatcaagagatagacgaaggtcaagtgacagatcacgagattcatctcatgaaagaacggagtctcagctcactccttgtattagaaatgtgacttctccaacacgacagcaccatgttgaacgagaaaaagatcacagttcctctcgtccaagcagtccgcgtcctcaaaaagcatccccaaatggttccattagcagtgctgggaacagcagcagaaacagtagtccgccgttccgtggacctgacacgccggggcagggctgtttacagcccaaagggggatacaactcacacgtccagggcacctggggccccacttgggccccccgcgccgggtgccgacccccccagattggggcccgccgcgcc

SEQ ID NO: 441508 - DNA, 2656 bp, Homo sapiens
cgcggtagagaggctgaggagccggcctgcaacctgccggggcggctccgctacgcgcagccgcctcagtggcttcctccacagccacctccggagggatctggctgaggaggaagtggaggtgtcactggccccggcctttgccccaatcttgtgtgggcactgaagggggactacaggttcgagaggcagaggaaccccgtgccccgcccctttcctgtcatctcagacgaacgcagcgacatcctgaggaaggcgcatcacaataggggataaggtggtgggcagcctccctctgggtgaagaggagtgagaccccactaacgtgctgcgtggttttatgttgtaaccattttacgtgtggttatgggtgctacatgtgtgctttcagagcagtagtgtgaggaagcttggagtgggatggcaggacggcctcatccctatgatggtaactccagtgatccagagaattgggatcggaaattgcatagtagacctcgtaaactttataaacattcaagtacttcctcgcgtattgctaaaggaggagttgaccacaccaaaatgagtctacatggtgctagtgggggacatgagagatcaagagatagacgaaggtcaagtgacagatcacgagattcatctcatgaaagaacggagtctcagctcactccttgtattagaaatgtgacttctccaacacgacagcaccatgttgaacgagaaaaagatcacagttcctctcgtccaagcagtccgcgtcctcaaaaagcatccccaaatggttccattagcagtgctgggaacagcagcagaaacagtagtcagtcaagttcagatggtagctgtaagacagctggggagatggtgtttgtatatgaaaatgcaaaagaaggagctcggaatataagaacgtcagaacgagtgacactaatagtggataacactagatttgttgtagacccatccatttttactgcacagccaaatacaatgttgggcaggatgtttggatctggccgagaacataactttacacgacccaatgagaaaggagagtatgaggtggcagagggaattggttccactgtgtttcgagcgattctggattactataaaacaggaataatccgttgtcctgatggcatatctattcctgaactgagagaagcatgtgactatctttgtatctcttttgaatatagcactattaaatgtagagatctcagtgccctaatgcatgagttatcaaatgatggtgctcgtagacaatttgaattttatctggaagaaatgatcctccctctcatggtagctagtgcccagagtggggaacgggaatgtcatatagtggtgcttacagatgatgatgtggttgattgggatgaagaatatccaccacagatgggagaagaatattcacaaattatttatagcacaaaattatatagatttttcaagtatattgaaaacagagatgtggccaagtcagttttgaaggagaggggtcttaagaagattagattgggaatagaaggttatcctacctacaaagaaaaagtaaagaaaaggcctggaggccgcccagaagtgatctacaactatgtccaaagaccctttattcgaatgtcctgggagaaggaagaaggaaagagtcggcatgtagactttcagtgtgtaaagagtaaatctatcaccaatcttgcagcagctgcagcagacattccccaggaccagctggtagtcatgcatccaactccacaagtggatgagctggatattctccctatccatcccccttctggcaacagtgacctcgatcctgatgcacagaatccaatgctgtgatgctgatcttccttgaaaccatagcatgctactcttcacagtgacgttgtactctcctcattctgcactgcaaggccactcttcttcattgtgagatgcacataacaatgtttaggatattgcagtgtaggcttttttaaagaccaaaggtagctgaatggtttttttttaaatgagtacaactctagcattttgaagttccagttgtaaatgtatttgtttaccagtaggtttgtgaaattggttctttgtatgggggatggtcctttttcacacagctaggtcttttcagaagtggtggaaattggcagctggggtactttcagtttggactgatattcatcacacctcagataaaatgcagagtaatatatagttgcactttataaatggtggttaaatggaaatgttcaagccattttatagttgtgatgcacaatataatttaagtgcttctgtcaaagtattcctccagtacaatttgtatagtttgctgcccttgatgagcaaaaagtatttatcttgggcttatctgaatgatcaggatgagatttaatgcccatatcttaccagttcagttatctccagagccatttcaccctttagagtgagtcacatgcagggagtgtgaatgtcagaggtggtttattatccagtctgccttacccttaatctgttcacagatatttatttactaatgctttttttttcttaagagttatgggataggaaaatgaagtgtttgctcttcatttactaaatgattgtaaacttgagtttttcatcaaaataaaattccattgtttta

SEQ ID NO: 441509 - DNA, 2011 bp, Homo sapiens
cgcggtagagaggctgaggagccggcctgcaacctgccggggcggctccgctacgcgcagccgcctcagtggcttcctccacagccacctccggagggatctggctgaggaggaagtggaggtgtcactggccccggcctttgccccaatcttgtgtgggcactgaagggggactacaggttcgagagttatgggtgctacatgtgtgctttcagagcagtagtgtgaggaagcttggagtgggatggcaggacggcctcatccctatgatggtaactccagtgatccagagaattgggatcggaaattgcatagtagacctcgtaaactttataaacattcaagtacttcctcgcgtattgctaaaggaggagttgaccacaccaaaatgagtctacatggtgctagtgggggacatgagagatcaagagatagacgaaggtcaagtgacagatcacgagattcatctcatgaaagaacggagtctcagctcactccttgtattagaaatgtgacttctccaacacgacagcaccatgttgaacgagaaaaagatcacagttcctctcgtccaagcagtccgcgtcctcaaaaagcatccccaaatggttccattagcagtgctgggaacagcagcagaaacagtagtcagtcaagttcagatggtagctgtaagacagctggggagatggtgtttgtatatgaaaatgcaaaagaaggagctcggaatataagaacgtcagaacgagtgacactaatagtggataacactagatttgttgtagacccatccatttttactgcacagccaaatacaatgttgggcaggatgtttggatctggccgagaacataactttacacgacccaatgagaaaggagagtatgaggtggcagagggaattggttccactgtgtttcgagcgattctggattactataaaacaggaataatccgttgtcctgatggcatatctattcctgaactgagagaagcatgtgactatctttgtatctcttttgaatatagcactattaaatgtagagatctcagtgccctaatgcatgagttatcaaatgatggtgctcgtagacaatttgaattttatctggaagaaatgatcctccctctcatggtagctagtgcccagagtggggaacgggaatgtcatatagtggtgcttacagatgatgatgtggttgattgggatgaagaatatccaccacagatgggagaagaatattcacaaattatttatagcacaaaattatatagatttttcaagtatattgaaaacagagatgtggccaagtcagttttgaaggagaggggtcttaagaagattagattgggaatagaaggttatcctacctacaaagaaaaagtaaagaaaaggcctggaggccgcccagaagtgatctacaactatgtccaaagaccctttattcgaatgtcctgggagaaggaagaaggaaagagtcggcatgtagactttcagtgtgtaaagagtaaatctatcaccaatcttgcagcagctgcagcagacattccccaggaccagctggtagtcatgcatccaactccacaagtggatgagctggatattctccctatccatcccccttctggcaacagtgacctcgatcctgatgcacagaatccaatgctgtgatgctgatcttccttgaaaccatagcatgctactcttcacagtgacgttgtactctcctcattctgcactgcaaggccactcttcttcattgtgagatgcacataacaatgtttaggatattgcagtgtaggcttttttaaagaccaaaggtagctgaatggtttttttttaaatgagtacaactctagcattttgaagttccagttgtaaatgtatttgtttaccagtaggtttgtgaaattggttctttgtatgggggatggtcctttttcacacagctaggtcttttctacacttaaattaaatgcagagttatatatagttggactctataaatgg

SEQ ID NO: 441510 - DNA, 1086 bp, Homo sapiens
ttgctgatacaatcgagctcggtacccaggtcttttcccctcaaatatatatttctaagataaagagaaagaagagcactaagtaagtagaatctgtttttcctattttgtagggctgctgactcctagtccttgaagcctagacacatgacccaggaaatttttcctttgtttcacttttgattatgatgtctgagccaaaaattcaattaagtaaacatactcgcctggatctgaatcattcatttaattactagatctacccagctgcgtttcactatccgaggccaaaaacagattcgtgtttatataaaagagtaaacgatggttgcaaattttggctatttagagttgctacttcactatgaagagtcacttcaaaacacttcgcttgtctttagggatgatttttgccatttccagtccacggtatgatactaaagctgtcaagagaggtttcttcttttctgaaactgccagctctttccagccctgttgatcactggacataaagcttcttttccccaataattcttctttacttaaaatagtcaggatctttatctacagatgtactctccaggttacctgtgatgatagccccctaatgtcctgctagaaaagtctccaagcagagatgacattacttctgaatgctcataaaccacaccatgaaataaaagctctttgttgttttaagattgtgaagtgtcgttaatgggtccccacagatggtccctgctggactcacctggaatctctccacagccatacccactcatcactatcattgagacctgcacatcttaatagaaatattataaacatcgaaaatcatgacttacctagaagttcgcttgtaactaatgaaattaaacaaatgtgttgccttttgtcatgtgtttctctcctgtgacatttcaaaatatcacatcttgataaataatgtgtttcatcttgaatagctgaactaattgctttggaaacagagtcctagaaaagtgacttcaacagaattgttactaaaatttgcactcacaacatgaaataaattttcttcctatggaataatcgtgccaagtccta

SEQ ID NO: 441511 - DNA, 4462 bp, Homo sapiens
cgcccgcggacagtccactccgcggggactttctctggataaggacctcctccacagtggtgaggtcacagccccttggagccctccctcttcccacccctcccgctcccgggtctcctttggcctggggtaacccgaggtgcagagctgagaatgaggcgatttcggaggatggagaaatagccccgagtcccgtggaaaatgaggccggcggacttgctgcagctggtgctgctgctcgacctgcccagggacctgggcggaatggggtgttcgtctccaccctgcgagtgccatcaggaggaggacttcagagtcacctgcaaggatattcaacgcatccccagcttaccgcccagtacgcagactctgaagcttattgagactcacctgagaactattccaagtcatgcattttctaatctgcccaatatttccagaatctacgtatctatagatgtgactctgcagcagctggaatcacactccttctacaatttgagtaaagtgactcacatagaaattcggaataccaggaacttaacttacatagaccctgatgccctcaaagagctccccctcctaaagttccttggcattttcaacactggacttaaaatgttccctgacctgaccaaagtttattccactgatatattctttatacttgaaattacagacaacccttacatgacgtcaatccctgtgaatgcttttcagggactatgcaatgaaaccttgacactgaagctgtacaacaatggctttacttcagtccaaggatatgctttcaatgggacaaagctggatgctgtttacctaaacaagaataaatacctgacagttattgacaaagatgcatttggaggagtatacagtggaccaagcttgctggacgtgtctcaaaccagtgtcactgcccttccatccaaaggcctggagcacctgaaggaactgatagcaagaaacacctggactcttaagaaacttccactttccttgagtttccttcacctcacacgggctgacctttcttacccaagccactgctgtgcttttaagaatcagaagaaaatcagaggaatccttgagtccttgatgtgtaatgagagcagtatgcagagcttgcgccagagaaaatctgtgaatgccttgaatagccccctccaccaggaatatgaagagaatctgggtgacagcattgttgggtacaaggaaaagtccaagttccaggatactcataacaacgctcattattacgtcttctttgaagaacaagaggatgagatcattggttttggccaggagctcaaaaacccccaggaagagactctacaagcttttgacagccattatgactacaccatatgtggggacagtgaagacatggtgtgtacccccaagtccgatgagttcaacccgtgtgaagacataatgggctacaagttcctgagaattgtggtgtggttcgttagtctgctggctctcctgggcaatgtctttgtcctgcttattctcctcaccagccactacaaactgaacgtcccccgctttctcatgtgcaacctggcctttgcggatttctgcatggggatgtacctgctcctcatcgcctctgtagacctctacactcactctgagtactacaaccatgccatcgactggcagacaggccctgggtgcaacacggctggtttcttcactgtctttgcaagcgagttatcggtgtatacgctgacggtcatcaccctggagcgctggtatgccatcaccttcgccatgcgcctggaccggaagatccgcctcaggcacgcatgtgccatcatggttgggggctgggtttgctgcttccttctcgccctgcttcctttggtgggaataagtagctatgccaaagtcagtatctgcctgcccatggacaccgagacccctcttgctctggcatatattgtttttgttctgacgctcaacatagttgccttcgtcatcgtctgctgctgttatgtgaagatctacatcacagtccgaaatccgcagtacaacccaggggacaaagataccaaaattgccaagaggatggctgtgttgatcttcaccgacttcatatgcatggccccaatctcattctatgctctgtcagcaattctgaacaagcctctcatcactgttagcaactccaaaatcttgctggtactcttctatccacttaactcctgtgccaatccattcctctatgctattttcaccaaggccttccagagggatgtgttcatcctactcagcaagtttggcatctgtaaacgccaggctcaggcataccgggggcagagggttcctccaaagaacagcactgatattcaggttcaaaaggttacccacgacatgaggcagggtctccacaacatggaagatgtctatgaactgattgaaaactcccatctaaccccaaagaagcaaggccaaatctcagaagagtatatgcaaacggttttgtaagttaacactacactactcacaatggtaggggaacttacaaaataatagtttcttgaatatgcattccaatcccatgacacccccaacacatagctgccctcactcttgtgcaggcgatgtttcaatgtttcatggggcaagagtttatctctggagagtgattagtattaacctaatcattgcccccaagaaggaagttaggctaccagcatatttgaatgccaggtgaaatcaaaataatctatactatctagaagactttcttgatgccaagtccagagatgtcattgtgtaggatgttcagtaaatattaactgagctatgtcaatatagagcttctcagttttgtataacatttcatactaaagattcagcaaatggaaaatgctattaatttggttggtgaccacaagataaaatcagtcccacgttggctcagttcaactagatgttccctgatacaaagagaacttgatttccttaaaactgaaaagccaaacacagctagctgtcatacaagaaacagctattatgagacatgaaggagggtaagaattagctttaagttttgttttgctttgttttgttttttaactcaacctattaatcatctcttcacaagaatccacctgatgtgaccaagctattatgtgttgcctggaaaaactggcaagatttcagcttatgtggcctagcaaactaagaattgctcttcttggccagcctcatagcataaaagatgtgaactctaggaagtctttctgagtagcaataagtgggaattatgggcagagcacactcaatcccctgttgattaataaaacaggctggacactaattaactatgggacttaaatctgtagaaatgaaggagtccaatagcttcttccaattttaaaactctagtacatccctttccctcaaatatatatttctaagataaagagaaagaagagcactaagtaagtagaatctgtttttcctattttgtagggctgctgactcctagtccttgaagcctagacacatgacccaggaaatttttcctttgtttcacttttgattatgatgtctgagccaaaaattcaattaagtaaacatactcgcctggatctgaatcattcatttaattactagatctacccagctgcgtttcactatccgaggccaaaaacagattcgtgtttatataaaagagtaaacgatggttgcaaattttggctatttagagttgctacttcactatgaagagtcacttcaaaacacttcgcttgtctttagggatgatttttgccatttccagtccacggtatgatactaaagctgtcaagagaggtttcttcttttctgaaactgccagctctttccagccctgttgatcactggacataaagcttcttttccccaataattcttctttacttaaaatagtcaggatctttatctacagatgtactctccaggttacctgtgatgatagccccctaatgtcctgctagaaaagtctccaagcagagatgacattacttctgaatgctcataaaccacaccatgaaataaaagctctttgttgttttaagattgtgaagtgtcgttaatgggtccccacagatggtccctgctggactcacctggaatctctccacagccatacccactcatcactatcattgagacctgcacatcttaatagaaatattataaacatcgaaaatcatgacttacctagaagttcgcttgtaactaatgaaattaaacaaatgtgttgccttttgtcatgtgtttctctcctgtgacatttcaaaatatcacatcttgataaataatgtgtttcatcttgaatagctgaactaattgctttggaaacagagtcctagaaaagtgacttcaacagaattgttactaaaatttgcactcacaacatgaaataaattttcttcctatggaataatcgtgccaagtccta

SEQ ID NO: 441512 - DNA, 4363 bp, Homo sapiens
acgcctccagtgcagctcagtcgacttagagatcccctcttcattgtaaagggaggagagcgatttcggaggatggagaaatagccccgagtcccgtggaaaatgaggccggcggacttgctgcagctggtgctgctgctcgacctgcccagggacctgggcggaatggggtgttcgtctccaccctgcgagtgccatcaggaggaggacttcagagtcacctgcaaggatattcaacgcatccccagcttaccgcccagtacgcagactctgaagcttattgagactcacctgagaactattccaagtcatgcattttctaatctgcccaatatttccagaatctacgtatctatagatgtgactctgcagcagctggaatcacactccttctacaatttgagtaaagtgactcacatagaaattcggaataccaggaacttaacttacatagaccctgatgccctcaaagagctccccctcctaaagttccttggcattttcaacactggacttaaaatgttccctgacctgaccaaagtttattccactgatatattctttatacttgaaattacagacaacccttacatgacgtcaatccctgtgaatgcttttcagggactatgcaatgaaaccttgacactgaagctgtacaacaatggctttacttcagtccaaggatatgctttcaatgggacaaagctggatgctgtttacctaaacaagaataaatacctgacagttattgacaaagatgcatttggaggagtatacagtggaccaagcttgctggacgtgtctcaaaccagtgtcactgcccttccatccaaaggcctggagcacctgaaggaactgatagcaagaaacacctggactcttaagaaacttccactttccttgagtttccttcacctcacacgggctgacctttcttacccaagccactgctgtgcttttaagaatcagaagaaaatcagaggaatccttgagtccttgatgtgtaatgagagcagtatgcagagcttgcgccagagaaaatctgtgaatgccttgaatagccccctccaccaggaatatgaagagaatctgggtgacagcattgttgggtacaaggaaaagtccaagttccaggatactcataacaacgctcattattacgtcttctttgaagaacaagaggatgagatcattggttttggccaggagctcaaaaacccccaggaagagactctacaagcttttgacagccattatgactacaccatatgtggggacagtgaagacatggtgtgtacccccaagtccgatgagttcaacccgtgtgaagacataatgggctacaagttcctgagaattgtggtgtggttcgttagtctgctggctctcctgggcaatgtctttgtcctgcttattctcctcaccagccactacaaactgaacgtcccccgctttctcatgtgcaacctggcctttgcggatttctgcatggggatgtacctgctcctcatcgcctctgtagacctctacactcactctgagtactacaaccatgccatcgactggcagacaggccctgggtgcaacacggctggtttcttcactgtctttgcaagcgagttatcggtgtatacgctgacggtcatcaccctggagcgctggtatgccatcaccttcgccatgcgcctggaccggaagatccgcctcaggcacgcatgtgccatcatggttgggggctgggtttgctgcttccttctcgccctgcttcctttggtgggaataagtagctatgccaaagtcagtatctgcctgcccatggacaccgagacccctcttgctctggcatatattgtttttgttctgacgctcaacatagttgccttcgtcatcgtctgctgctgttatgtgaagatctacatcacagtccgaaatccgcagtacaacccaggggacaaagataccaaaattgccaagaggatggctgtgttgatcttcaccgacttcatatgcatggccccaatctcattctatgctctgtcagcaattctgaacaagcctctcatcactgttagcaactccaaaatcttgctggtactcttctatccacttaactcctgtgccaatccattcctctatgctattttcaccaaggccttccagagggatgtgttcatcctactcagcaagtttggcatctgtaaacgccaggctcaggcataccgggggcagagggttcctccaaagaacagcactgatattcaggttcaaaaggttacccacgacatgaggcagggtctccacaacatggaagatgtctatgaactgattgaaaactcccatctaaccccaaagaagcaaggccaaatctcagaagagtatatgcaaacggttttgtaagttaacactacactactcacaatggtaggggaacttacaaaataatagtttcttgaatatgcattccaatcccatgacacccccaacacatagctgccctcactcttgtgcaggcgatgtttcaatgtttcatggggcaagagtttatctctggagagtgattagtattaacctaatcattgcccccaagaaggaagttaggctaccagcatatttgaatgccaggtgaaatcaaaataatctatactatctagaagactttcttgatgccaagtccagagatgtcattgtgtaggatgttcagtaaatattaactgagctatgtcaatatagagcttctcagttttgtataacatttcatactaaagattcagcaaatggaaaatgctattaatttggttggtgaccacaagataaaatcagtcccacgttggctcagttcaactagatgttccctgatacaaagagaacttgatttccttaaaactgaaaagccaaacacagctagctgtcatacaagaaacagctattatgagacatgaaggagggtaagaattagctttaagttttgttttgctttgttttgttttttaactcaacctattaatcatctcttcacaagaatccacctgatgtgaccaagctattatgtgttgcctggaaaaactggcaagatttcagcttatgtggcctagcaaactaagaattgctcttcttggccagcctcatagcataaaagatgtgaactctaggaagtctttctgagtagcaataagtgggaattatgggcagagcacactcaatcccctgttgattaataaaacaggctggacactaattaactatgggacttaaatctgtagaaatgaaggagtccaatagcttcttccaattttaaaactctagtacatccctttccctcaaatatatatttctaagataaagagaaagaagagcactaagtaagtagaatctgtttttcctattttgtagggctgctgactcctagtccttgaagcctagacacatgacccaggaaatttttcctttgtttcacttttgattatgatgtctgagccaaaaattcaattaagtaaacatactcgcctggatctgaatcattcatttaattactagatctacccagctgcgtttcactatccgaggccaaaaacagattcgtgtttatataaaagagtaaacgatggttgcaaattttggctatttagagttgctacttcactatgaagagtcacttcaaaacacttcgcttgtctttagggatgatttttgccatttccagtccacggtatgatactaaagctgtcaagagaggtttcttcttttctgaaactgccagctctttccagccctgttgatcactggacataaagcttcttttccccaataattcttctttacttaaaatagtcaggatctttatctacagatgtactctccaggttacctgtgatgatagccccctaatgtcctgctagaaaagtctccaagcagagatgacattacttctgaatgctcataaaccacaccatgaaataaaagctctttgttgttttaagattgtgaagtgtcgttaatgggtccccacagatggtccctgctggactcacctggaatctctccacagccatacccactcatcactatcattgagacctgcacatcttaatagaaatattataaacatcgaaaatcatgacttacctagaagttcgcttgtaactaatgaaattaaacaaatgtgttgccttttgtcatgtgtttctctcctgtgacatttcaaaatatcacatcttgataaataatgtgtttcatcttgaatagctgaactaattgctttggaaacagagtcctagaaaagtgacttcaacagaattgttactaaaatttgcactcacaacatgaaataaattttcttcctatggaataatcgtgccaagtccta

SEQ ID NO: 441513 - DNA, 1234 bp, Homo sapiens
cgcccgcggacagtccactccgcggggactttctctggataaggacctcctccacagtggtgaggtcacagccccttggagccctccctcttcccacccctcccgctcccgggtctcctttggcctggggtaacccgaggtgcagagctgagaatgaggcgatttcggaggatggagaaatagccccgagtcccgtggaaaatgaggccggcggacttgctgcagctggtgctgctgctcgacctgcccagggacctgggcggaatggggtgttcgtctccaccctgcgagtgccatcaggaggaggacttcagagtcacctgcaaggatattcaacgcatccccagcttaccgcccagtacgcagactctgaagcttattgagactcacctgagaactattccaagtcatgcattttctaatctgcccaatatttccagaatctacgtatctatagatgtgactctgcagcagctggaatcacactccttctacaatttgagtaaagtgactcacatagaaattcggaataccaggaacttaacttacatagaccctgatgccctcaaagagctccccctcctaaagttccttggcattttcaacactggacttaaaatgttccctgacctgaccaaagtttattccactgatatattctttatacttgaaattacagacaacccttacatgacgtcaatccctgtgaatgcttttcagggactatgcaatgaaaccttgacactgaagctgtacaacaatggctttacttcagtccaaggatatgctttcaatgggacaaagctggatgctgtttacctaaacaagaataaatacctgacagttattgacaaagatgcatttggaggagtatacagtggaccaagcttgctgctgcctcttggaagaaagtccttgtcctttgagactcagaaggccccaagctccagtatgccatcatgatgcctgctaaggcagccaccttggtgtacatgctcacagaggctctgttcatggagcagctgctgtttgaaaaattttgaaatgcaagatccacaactagatggaaggcactctagtctttgcagaaaaaaatgtacctgaatgtacattgcacaatgcctggcacaaagaaggaagaatataaatgatagttcgactcgtctgtggaagaacttacaatcatggggaaagatggaataaaaacattttttaaacagcatgaaaacatacc

SEQ ID NO: 441514 - DNA, 743 bp, Homo sapiens
acgcctccagtgcagctcagtcgacttagagatcccctcttcattgtaaagggaggagagcgatttcggaggatggagaaatagccccgagtcccgtggaaaatgaggccggcggacttgctgcagctggtgctgctgctcgacctgcccagggacctgggcggaatggggtgttcgtctccaccctgcgagtgccatcaggaggaggacttcagagtcacctgcaaggatattcaacgcatccccagcttaccgcccagtacgcagactctgaagcttattgagactcacctgagaactattccaagtcatgcattttctaatctgcccaatatttccagaatctacgtatctatagatgtgactctgcagcagctggaatcacactccttctacaatttgagtaaagtgactcacatagaaattcggaataccaggaacttaacttacatagaccctgatgccctcaaagagctccccctcctaaagttccttggcattttcaacactggacttaaaatgttccctgacctgaccaaagtttattccactgatatattctttatacttgaaattacagacaacccttacatgacgtcaatccctgtgaatgcttttcagggactatgcaatgaaaccttgacactgaagctgtacaacaatggctttacttcagtccaaggatatgctttcaatgggacaaagctggatgctgtgtaagtcaagggtagccatgaaaactg

SEQ ID NO: 441515 - DNA, 4511 bp, Homo sapiens
gtccagccaaggaaagtgaagcaagcagacttgtttgggtcaaggttgcctagggaagcggagcacttaagtgcctctttttccccttctccagcctcctccacagtggtgaggtcacagccccttggagccctccctcttcccacccctcccgctcccgggtctcctttggcctggggtaacccgaggtgcagagctgagaatgaggcgatttcggaggatggagaaatagccccgagtcccgtggaaaatgaggccggcggacttgctgcagctggtgctgctgctcgacctgcccagggacctgggcggaatggggtgttcgtctccaccctgcgagtgccatcaggaggaggacttcagagtcacctgcaaggatattcaacgcatccccagcttaccgcccagtacgcagactctgaagcttattgagactcacctgagaactattccaagtcatgcattttctaatctgcccaatatttccagaatctacgtatctatagatgtgactctgcagcagctggaatcacactccttctacaatttgagtaaagtgactcacatagaaattcggaataccaggaacttaacttacatagaccctgatgccctcaaagagctccccctcctaaagttccttggcattttcaacactggacttaaaatgttccctgacctgaccaaagtttattccactgatatattctttatacttgaaattacagacaacccttacatgacgtcaatccctgtgaatgcttttcagggactatgcaatgaaaccttgacactgaagctgtacaacaatggctttacttcagtccaaggatatgctttcaatgggacaaagctggatgctgtttacctaaacaagaataaatacctgacagttattgacaaagatgcatttggaggagtatacagtggaccaagcttgctggacgtgtctcaaaccagtgtcactgcccttccatccaaaggcctggagcacctgaaggaactgatagcaagaaacacctggactcttaagaaacttccactttccttgagtttccttcacctcacacgggctgacctttcttacccaagccactgctgtgcttttaagaatcagaagaaaatcagaggaatccttgagtccttgatgtgtaatgagagcagtatgcagagcttgcgccagagaaaatctgtgaatgccttgaatagccccctccaccaggaatatgaagagaatctgggtgacagcattgttgggtacaaggaaaagtccaagttccaggatactcataacaacgctcattattacgtcttctttgaagaacaagaggatgagatcattggttttggccaggagctcaaaaacccccaggaagagactctacaagcttttgacagccattatgactacaccatatgtggggacagtgaagacatggtgtgtacccccaagtccgatgagttcaacccgtgtgaagacataatgggctacaagttcctgagaattgtggtgtggttcgttagtctgctggctctcctgggcaatgtctttgtcctgcttattctcctcaccagccactacaaactgaacgtcccccgctttctcatgtgcaacctggcctttgcggatttctgcatggggatgtacctgctcctcatcgcctctgtagacctctacactcactctgagtactacaaccatgccatcgactggcagacaggccctgggtgcaacacggctggtttcttcactgtctttgcaagcgagttatcggtgtatacgctgacggtcatcaccctggagcgctggtatgccatcaccttcgccatgcgcctggaccggaagatccgcctcaggcacgcatgtgccatcatggttgggggctgggtttgctgcttccttctcgccctgcttcctttggtgggaataagtagctatgccaaagtcagtatctgcctgcccatggacaccgagacccctcttgctctggcatatattgtttttgttctgacgctcaacatagttgccttcgtcatcgtctgctgctgttatgtgaagatctacatcacagtccgaaatccgcagtacaacccaggggacaaagataccaaaattgccaagaggatggctgtgttgatcttcaccgacttcatatgcatggccccaatctcattctatgctctgtcagcaattctgaacaagcctctcatcactgttagcaactccaaaatcttgctggtactcttctatccacttaactcctgtgccaatccattcctctatgctattttcaccaaggccttccagagggatgtgttcatcctactcagcaagtttggcatctgtaaacgccaggctcaggcataccgggggcagagggttcctccaaagaacagcactgatattcaggttcaaaaggttacccacgacatgaggcagggtctccacaacatggaagatgtctatgaactgattgaaaactcccatctaaccccaaagaagcaaggccaaatctcagaagagtatatgcaaacggttttgtaagttaacactacactactcacaatggtaggggaacttacaaaataatagtttcttgaatatgcattccaatcccatgacacccccaacacatagctgccctcactcttgtgcaggcgatgtttcaatgtttcatggggcaagagtttatctctggagagtgattagtattaacctaatcattgcccccaagaaggaagttaggctaccagcatatttgaatgccaggtgaaatcaaaataatctatactatctagaagactttcttgatgccaagtccagagatgtcattgtgtaggatgttcagtaaatattaactgagctatgtcaatatagagcttctcagttttgtataacatttcatactaaagattcagcaaatggaaaatgctattaatttggttggtgaccacaagataaaatcagtcccacgttggctcagttcaactagatgttccctgatacaaagagaacttgatttccttaaaactgaaaagccaaacacagctagctgtcatacaagaaacagctattatgagacatgaaggagggtaagaattagctttaagttttgttttgctttgttttgttttttaactcaacctattaatcatctcttcacaagaatccacctgatgtgaccaagctattatgtgttgcctggaaaaactggcaagatttcagcttatgtggcctagcaaactaagaattgctcttcttggccagcctcatagcataaaagatgtgaactctaggaagtctttctgagtagcaataagtgggaattatgggcagagcacactcaatcccctgttgattaataaaacaggctggacactaattaactatgggacttaaatctgtagaaatgaaggagtccaatagcttcttccaattttaaaactctagtacatccctttccctcaaatatatatttctaagataaagagaaagaagagcactaagtaagtagaatctgtttttcctattttgtagggctgctgactcctagtccttgaagcctagacacatgacccaggaaatttttcctttgtttcacttttgattatgatgtctgagccaaaaattcaattaagtaaacatactcgcctggatctgaatcattcatttaattactagatctacccagctgcgtttcactatccgaggccaaaaacagattcgtgtttatataaaagagtaaacgatggttgcaaattttggctatttagagttgctacttcactatgaagagtcacttcaaaacacttcgcttgtctttagggatgatttttgccatttccagtccacggtatgatactaaagctgtcaagagaggtttcttcttttctgaaactgccagctctttccagccctgttgatcactggacataaagcttcttttccccaataattcttctttacttaaaatagtcaggatctttatctacagatgtactctccaggttacctgtgatgatagccccctaatgtcctgctagaaaagtctccaagcagagatgacattacttctgaatgctcataaaccacaccatgaaataaaagctctttgttgttttaagattgtgaagtgtcgttaatgggtccccacagatggtccctgctggactcacctggaatctctccacagccatacccactcatcactatcattgagacctgcacatcttaatagaaatattataaacatcgaaaatcatgacttacctagaagttcgcttgtaactaatgaaattaaacaaatgtgttgccttttgtcatgtgtttctctcctgtgacatttcaaaatatcacatcttgataaataatgtgtttcatcttgaatagctgaactaattgctttggaaacagagtcctagaaaagtgacttcaacagaattgttactaaaatttgcactcacaacatgaaataaattttcttcctatggaataatcgtgccaagtccta

SEQ ID NO: 441516 - DNA, 1147 bp, Homo sapiens
cgcccgcggacagtccactccgcggggactttctctggataaggacctcctccacagtggtgaggtcacagccccttggagccctccctcttcccacccctcccgctcccgggtctcctttggcctggggtaacccgaggtgcagagctgagaatgaggcgatttcggaggatggagaaatagccccgagtcccgtggaaaatgaggccggcggacttgctgcagctggtgctgctgctcgacctgcccagggacctgggcggaatggggtgttcgtctccaccctgcgagtgccatcaggaggaggacttcagagtcacctgcaaggatattcaacgcatccccagcttaccgcccagtacgcagactctgaagcttattgagactcacctgagaactattccaagtcatgcattttctaatctgcccaatatttccagaatctacgtatctatagatgtgactctgcagcagctggaatcacactccttctacaatttgagtaaagtgactcacatagaaattcggaataccaggaacttaacttacatagaccctgatgccctcaaagagctccccctcctaaagttccttggcattttcaacactggacttaaaatgttccctgacctgaccaaagtttattccactgatatattctttatacttgaaattacagacaacccttacatgacgtcaatccctgtgaatgcttttcagggactatgcaatgaaaccttgacactgaagctgtacaacaatggctttacttcagtccaaggatatgctttcaatgggacaaagctggatgctgtttacctaaacaagaataaatacctgacagttattgacaaagatgcatttggaggagtatacagtggaccaagcttgctattcctaatgagtccatggagacttactgcacctggatctgtgttcaaagactccaaagacctgaaagtgaagactagctcctgggacactgaagctgagaactccagacccaaatgatacttatgactccacccttggttcactgtatctttttggacacaacatcccttatttctttgtctgaattttagtatctgcccgcttcataaaaatgctttgagaattgaaaccagcttctgaatcacctggagag

SEQ ID NO: 441517 - DNA, 427 bp, Homo sapiens
gctcccgggtctcctttggcctggggtaacccgaggtgcagagctgagaatgaggcgatttcggaggatggagaaatagccccgagtcccgtggaaaatgaggccggcggacttgctgcagctggtgctgctgctcgacctgcccagggacctgggcggaatggggtgttcgtctccaccctgcgagtgccatcaggaggaggacttcagagtcacctgcaaggatattcaacgcatccccagcttaccgcccagtacgcagactctgtgagtacccgggagagatcagggtaggacccagagatcaagggcatctgcagaggtggcccgaagtgcacaaaagcagctcaataacagcccgaagtagtgtgtgagtgtgtgtatgtgtgagtgaatgtctgtgtgtgtagatgtgtgtgtgtgctaa

SEQ ID NO: 441518 - DNA, 6197 bp, Homo sapiens
gagatttttgcattggatatgagatcagattgacttttaaggtctcgtctgactctttgcctttcaagttttgatcagaagtctcagctttttttctccaggtttagatttaacaatctaaacctagttctaacattgttaaaagggccaaattccagggttcaccagataaatttaacacatatgtgaccctgaaagtacagaatgtgaagagcacaactgtagcagttcgtggtgatcagccttcctgggaacaggatttcatgtttgagattagtcgcctggacctgggtctaagtgtggaggtatggaacaaaggactgatctgggacaccatggtggggactgtgtggattgcgctgaagactattcgtcagtcggatgaggaagggcctggggaatggtccacattagaggcagagacgttaatgaaagacgatgagatctgtggaactagaaacccaactcctcataaaattttgcttgatacaagatttgagttgccttttgatatcccagaggaggaagccagatattggacctacaaatgggagcaaatcaatgccttgggagctgacaatgagtattctagtcaagaagaaagccagaggaagccattgcccactgctgccgcccagtgttcttttgaagaccctgatagtgccgtcgatgaccgagatagtgactatcgcagtgagaccagcaacagcttcccacctccttaccatacagcttcccagcccaacgcttctgtgcaccagttccctgtgccggtgcgatcgccacagcagctgctacttcaaggcagttcccgggactcttgtaatgactctatgcaaagttatgaccttgattatccagagcggcgggctatcagccccaccagcagcagtaggtatggctcctcctgtaatgtgagtcaaggaagctctcagctaagtgaactagaccagtatcacgaacaagatgacgaccatcgggagacggactcgattcattcttgccacagctctcacagcctgtccagagatggccaagcaggttttggagaacaagagaaacccttggaggtgacaggtcaagcagagaaggaggcagcatgtgaacccaaggagatgaaagaagatgccacaacccaccctcccccagatctggtgctgcaaaaagaccacttcctaggtccccaggagagttttcctgaggagaatgcatcttcaccatttacccaagccagagcacattggatccgagcagttaccaaggttcgactccagctgcaggagattccagatgatggtgacccctctctgcctcagtggctcccggaagggccagccggagggctctatggcattgacagcatgccagatttacgcagaaagaagccactgccacttgtcagtgatctgtcactggtccagtctcggaaggcaggaatcacttctgcaatggctacacgcacttctcttaaggacgaagagctgaaatcccacgtgtataagaaaaccctgcaggccttaatctaccccatttcgtgcaccactcctcataactttgaggtctggacggccactaccccaacctactgctatgagtgtgaaggcctgctctggggcattgcccggcagggcatgcgctgcagcgaatgtggagtcaagtgccatgagaagtgccaggatctgctcaatgctgactgcctgcagcgggctgcagaaaagagctgtaaacatggagctgaggaccggacccagaacattatcatggccatgaaggaccgcatgaagatccgagagcgaaataagccagagatctttgaagttatccgggacgtcttcacagtgaacaaagctgcccatgtgcagcagatgaaaacagtgaagcagagtgtactggatggcacctccaagtggtcagccaagatcaccattactgtggtgtgtgcccagggcctacaagccaaggacaaaacaggatccagtgacccttacgtgactgtgcaagtcagcaaaactaagaagcgtaccaagaccatttttggaaacttgaatcctgtttgggaggagaagttccattttgagtgccacaactcctctgaccgcattaaggtgcgtgtatgggatgaggatgatgacatcaagtcaagagtaaagcaacgcctaaagcgagagtctgatgatttccttggccaaaccatcattgaggttcggaccctaagtggcgagatggacgtctggtacaacttggagaagaggacagacaaatcagccgtctcaggggctatccgactacaaatcagtgtggagatcaagggggaggagaaagtagccccataccacgtgcagtatacatgtctccatgagaatcttttccattacctcacagacattcagggcagtggaggagtccgcatccctgaagctcgaggagacgatgcctggaaggtgtactttgatgagacagcccaagaaattgtggatgaatttgccatgcgttatggcattgagtccatatatcaggccatgacgcactttgcatgtttatcatccaagtacatgtgtcctggtgtgccagcagtgatgagcaccttactggccaacatcaacgcctactatgcccacacaactgcctctaccaatgtctctgcatctgatcgctttgcagcctccaactttgggaaagagagatttgtaaaactgctggaccagctacacaactcactgaggatcgacctctctacatacaggaataatttccctgctgggagtcctgaacggcttcaggacttaaaatccacagtggatttgctgaccagcattactttcttcagaatgaaggtacaagaactgcaaagccctccaagagccagccaggtggtaaaggattgtgtgaaggcctgtttgaactccacatatgaatatatcttcaacaactgccacgacttatacagccgccagtaccagctgaagcaggagctacctccagaggaacaagggcccagcattcggaacctggatttctggcccaagctcatcacactcatcgtgtcaatcatagaggaagataagaattcctacacacctgttctgaaccagtttcctcaggagttgaatgtgggaaaagtcagcgcagaagtgatgtggcatttgtttgcccaagacatgaaatatgcattggaggagcatgagaaagaccacctgtgtaaaagtgctgactacatgaacctgcacttcaaggtgaagtggctccacaatgaatacgtgcgggatctgcctgtcctccaggggcaggtgcctgagtacccagcgtggtttgagcagttcgtgctacaatggctggatgagaatgaggatgtatccctggaattcctgcgtggggccctggaacgagataagaaggatggattccagcagacatcagagcatgcactcttttcctgctctgtggtggatgtcttcacacaactcaatcagagctttgagatcatccggaagctggaatgcccagaccccagcatccttgcccactacatgaggaggtttgctaagaccatcgggaaggtgctgatgcagtatgcagacatcttgtcaaaggacttcccagcctattgcacaaaggagaaactgccctgcatcctgatgaacaacgtgcagcaactgagggtccagctggagaaaatgtttgaggccatgggaggcaaggagctggaccttgaagctgcagacagtctgaaggagctgcaggtgaaactgaatacggttctggatgagctcagcatggtgtttggaaacagtttccaggtacggattgatgagtgtgttcgacaaatggccgacatcctgggccaggttcggggcacagggaatgcatctccagacgccagggcctcagcggctcaggatgcagatagcgtactccggcctctcatggacttcctggatggcaacctcaccctctttgccactgtgtgtgagaagacggttctgaagcgtgtactgaaggagctctggcgcgtggtgatgaacacaatggagaggatgattgttctgcccccactcactgaccagacgggcacccagctgatcttcactgctgccaaggagctgagccatctttccaaactcaaggatcacatggtacgagaggaaacacggaatctcactccaaagcagtgtgcagtccttgacctcgccctggacaccatcaagcaatacttccatgcaggaggcaatgggctgaagaaaaccttcctggagaagagcccagatctgcagtctctacgctatgccctgtctctgtacacacagactactgacactctcatcaagacctttgtgcgctcgcagaccacccaagggtctggtgtggacgatcctgtgggagaagtctctattcaggtggacttgtttacacaccctggtactggggagcacaaggtcacagtgaaagtggtggctgccaatgacctcaagtggcagacagcgggtatgttccggcctttcgtggaggtgactatggttggcccacaccaaagtgataagaagaggaagttcacaaccaaatccaaaagcaacaactgggcccccaagtacaatgagacattccacttcctcctgggaaatgaggaggggcccgagtcctatgagttgcagatatgcgtgaaggattactgctttgcccgggaagatcgcgtgctagggctggctgtgatgcctctgagggatgtcacagccaagggcagctgtgcctgctggtgccccttgggccggaagatccatatggatgagacaggcctgaccattctccggattttatctcagaggagcaatgacgaggtggcccgagaatttgtgaaactcaaatcagagtctcgttccacggaggaggggagctgaacaccttcgactcctgtgccaatcaggcagcagcaatttcacaaatcagggccagtgggagttagctgtgtaaccggcttagggtctttgcagtcaagaggctgaccccttcagttaaagatatttaaggaaaaatttggggtggtgataatatggcttttcacagaaagggtcatgaagccctggcccaacaggactgtggtactaggggctgggatgtggggttaccacatggagagattttccattaagagagaaggacaaacatttctgagagtgtcagccattcttggtagacacctctccactcctcatcccacctctacccatctccatgccacaccttatccagttagacacatacataccaatcattagaagaacaagtttagaaggtgtggaacttgtgcctggctggctgggtagtcagctgagcctgttgctgagcccggtggtctggattggagtatggccagggcaggagtacacagaatagaatttagactgtcccttgagtagaatccactgattttctgtggctccagtgagaacaaggctttgaaactgaacaagataacttctagaaatgaactgtactaatccctttccccagattgtatcatgagtagaatcaggttcacgtggtgcttcaaagccctgagaagaatatttctttggaccccaggcactaggggccacctgcctgggagtctccctgcctcactcctctaggcaggggagtgatgcttcaggacgtgacaggctgttctaacatgtgtctacctgagggctagttgaaggatccaggagtattttcttcttgggtgggccctgaacaaagccaaaaattgtagaaaccagtctagaaaaagtcctgctcatctgtggccactgccttctagccgtcctccaccttgcagaaagaatctagcctttggtctctctctctctcatcggggtcatttgctattcccctctgatattcaaccctatagaaggagcctggactctgatccctctgtacaggctggatggaaggggccctccacacttcctgggaggtcagagacaaactgtttcagagagtcagatggacttcccaagacttgttgagagatgtgacatggttcttggatttcctctgtagcagcctcctggacttcctgaggactcgacattgtccacagatgtactggccattacatgaaacaagaaaccaagcatctttgctgttgttaattattatatgtgccattgttacaggagattataggctagtctgtaataaattatcttatagcagcc

SEQ ID NO: 441519 - DNA, 3909 bp, Homo sapiens
cacgttgtgtgaggaatgtggagtgtttactgtcccgttactccacctccgtggtatacatgtctccatgagaatcttttccattacctcacagacattcagggcagtggaggagtccgcatccctgaagctcgaggagacgatgcctggaaggtgtactttgatgagacagcccaagaaattgtggatgaatttgccatgcgttatggcattgagtccatatatcaggccatgacgcactttgcatgtttatcatccaagtacatgtgtcctggtgtgccagcagtgatgagcaccttactggccaacatcaacgcctactatgcccacacaactgcctctaccaatgtctctgcatctgatcgctttgcagcctccaactttgggaaagagagatttgtaaaactgctggaccagctacacaactcactgaggatcgacctctctacatacaggaataatttccctgctgggagtcctgaacggcttcaggacttaaaatccacagtggatttgctgaccagcattactttcttcagaatgaaggtacaagaactgcaaagccctccaagagccagccaggtggtaaaggattgtgtgaaggcctgtttgaactccacatatgaatatatcttcaacaactgccacgacttatacagccgccagtaccagctgaagcaggagctacctccagaggaacaagggcccagcattcggaacctggatttctggcccaagctcatcacactcatcgtgtcaatcatagaggaagataagaattcctacacacctgttctgaaccagtttcctcaggagttgaatgtgggaaaagtcagcgcagaagtgatgtggcatttgtttgcccaagacatgaaatatgcattggaggagcatgagaaagaccacctgtgtaaaagtgctgactacatgaacctgcacttcaaggtgaagtggctccacaatgaatacgtgcgggatctgcctgtcctccaggggcaggtgcctgagtacccagcgtggtttgagcagttcgtgctacaatggctggatgagaatgaggatgtatccctggaattcctgcgtggggccctggaacgagataagaaggatggattccagcagacatcagagcatgcactcttttcctgctctgtggtggatgtcttcacacaactcaatcagagctttgagatcatccggaagctggaatgcccagaccccagcatccttgcccactacatgaggaggtttgctaagaccatcgggaaggtgctgatgcagtatgcagacatcttgtcaaaggacttcccagcctattgcacaaaggagaaactgccctgcatcctgatgaacaacgtgcagcaactgagggtccagctggagaaaatgtttgaggccatgggaggcaaggagctggaccttgaagctgcagacagtctgaaggagctgcaggtgaaactgaatacggttctggatgagctcagcatggtgtttggaaacagtttccaggtacggattgatgagtgtgttcgacaaatggccgacatcctgggccaggttcggggcacagggaatgcatctccagacgccagggcctcagcggctcaggatgcagatagcgtactccggcctctcatggacttcctggatggcaacctcaccctctttgccactgtgtgtgagaagacggttctgaagcgtgtactgaaggagctctggcgcgtggtgatgaacacaatggagaggatgattgttctgcccccactcactgaccagacgggcacccagctgatcttcactgctgccaaggagctgagccatctttccaaactcaaggatcacatggtacgagaggaaacacggaatctcactccaaagcagtgtgcagtccttgacctcgccctggacaccatcaagcaatacttccatgcaggaggcaatgggctgaagaaaaccttcctggagaagagcccagatctgcagtctctacgctatgccctgtctctgtacacacagactactgacactctcatcaagacctttgtgcgctcgcagaccacccaagggtctggtgtggacgatcctgtgggagaagtctctattcaggtggacttgtttacacaccctggtactggggagcacaaggtcacagtgaaagtggtggctgccaatgacctcaagtggcagacagcgggtatgttccggcctttcgtggaggtgactatggttggcccacaccaaagtgataagaagaggaagttcacaaccaaatccaaaagcaacaactgggcccccaagtacaatgagacattccacttcctcctgggaaatgaggaggggcccgagtcctatgagttgcagatatgcgtgaaggattactgctttgcccgggaagatcgcgtgctagggctggctgtgatgcctctgagggatgtcacagccaagggcagctgtgcctgctggtgccccttgggccggaagatccatatggatgagacaggcctgaccattctccggattttatctcagaggagcaatgacgaggtggcccgagaatttgtgaaactcaaatcagagtctcgttccacggaggaggggagctgaacaccttcgactcctgtgccaatcaggcagcagcaatttcacaaatcagggccagtgggagttagctgtgtaaccggcttagggtctttgcagtcaagaggctgaccccttcagttaaagatatttaaggaaaaatttggggtggtgataatatggcttttcacagaaagggtcatgaagccctggcccaacaggactgtggtactaggggctgggatgtggggttaccacatggagagattttccattaagagagaaggacaaacatttctgagagtgtcagccattcttggtagacacctctccactcctcatcccacctctacccatctccatgccacaccttatccagttagacacatacataccaatcattagaagaacaagtttagaaggtgtggaacttgtgcctggctggctgggtagtcagctgagcctgttgctgagcccggtggtctggattggagtatggccagggcaggagtacacagaatagaatttagactgtcccttgagtagaatccactgattttctgtggctccagtgagaacaaggctttgaaactgaacaagataacttctagaaatgaactgtactaatccctttccccagattgtatcatgagtagaatcaggttcacgtggtgcttcaaagccctgagaagaatatttctttggaccccaggcactaggggccacctgcctgggagtctccctgcctcactcctctaggcaggggagtgatgcttcaggacgtgacaggctgttctaacatgtgtctacctgagggctagttgaaggatccaggagtattttcttcttgggtgggccctgaacaaagccaaaaattgtagaaaccagtctagaaaaagtcctgctcatctgtggccactgccttctagccgtcctccaccttgcagaaagaatctagcctttggtctctctctctctcatcggggtcatttgctattcccctctgatattcaaccctatagaaggagcctggactctgatccctctgtacaggctggatggaaggggccctccacacttcctgggaggtcagagacaaactgtttcagagagtcagatggacttcccaagacttgttgagagatgtgacatggttcttggatttcctctgtagcagcctcctggacttcctgaggactcgacattgtccacagatgtactggccattacatgaaacaagaaaccaagcatctttgctgttgttaattattatatgtgccattgttacaggagattataggctagtctgtaataaattatcttatagcagcc

SEQ ID NO: 441520 - DNA, 6213 bp, Homo sapiens
gagtcccggcagctcctacctcccagcgatggcgtcgctgtgccgcgcccagtccccagcctgccggccggtactcaccgctacccggagttcgctcagacggtgagatttggggcgggtccgaggcagcggcgggacgctacctgcgaccgggaccatgaggagctgccagacccgtggggccggtaacgagagcagtcgcggcacctgctgagaggaaagagggagcggtccggcgcggctggggcgcggcagaggcttgcccgatcctcggccatgtcactgctctgcgtgcgcgttaaaagggccaaattccagggttcaccagataaatttaacacatatgtgaccctgaaagtacagaatgtgaagagcacaactgtagcagttcgtggtgatcagccttcctgggaacaggatttcatgtttgagattagtcgcctggacctgggtctaagtgtggaggtatggaacaaaggactgatctgggacaccatggtggggactgtgtggattgcgctgaagactattcgtcagtcggatgaggaagggcctggggaatggtccacattagaggcagagacgttaatgaaagacgatgagatctgtggaactagaaacccaactcctcataaaattttgcttgatacaagatttgagttgccttttgatatcccagaggaggaagccagatattggacctacaaatgggagcaaatcaatgccttgggagctgacaatgagtattctagtcaagaagaaagccagaggaagccattgcccactgctgccgcccagtgttcttttgaagaccctgatagtgccgtcgatgaccgagatagtgactatcgcagtgagaccagcaacagcttcccacctccttaccatacagcttcccagcccaacgcttctgtgcaccagttccctgtgccggtgcgatcgccacagcagctgctacttcaaggcagttcccgggactcttgtaatgactctatgcaaagttatgaccttgattatccagagcggcgggctatcagccccaccagcagcagtaggtatggctcctcctgtaatgtgagtcaaggaagctctcagctaagtgaactagaccagtatcacgaacaagatgacgaccatcgggagacggactcgattcattcttgccacagctctcacagcctgtccagagatggccaagcaggttttggagaacaagagaaacccttggaggtgacaggtcaagcagagaaggaggcagcatgtgaacccaaggagatgaaagaagatgccacaacccaccctcccccagatctggtgctgcaaaaagaccacttcctaggtccccaggagagttttcctgaggagaatgcatcttcaccatttacccaagccagagcacattggatccgagcagttaccaaggttcgactccagctgcaggagattccagatgatggtgacccctctctgcctcagtggctcccggaagggccagccggagggctctatggcattgacagcatgccagatttacgcagaaagaagccactgccacttgtcagtgatctgtcactggtccagtctcggaaggcaggaatcacttctgcaatggctacacgcacttctcttaaggacgaagagctgaaatcccacgtgtataagaaaaccctgcaggccttaatctaccccatttcgtgcaccactcctcataactttgaggtctggacggccactaccccaacctactgctatgagtgtgaaggcctgctctggggcattgcccggcagggcatgcgctgcagcgaatgtggagtcaagtgccatgagaagtgccaggatctgctcaatgctgactgcctgcagcgggctgcagaaaagagctgtaaacatggagctgaggaccggacccagaacattatcatggccatgaaggaccgcatgaagatccgagagcgaaataagccagagatctttgaagttatccgggacgtcttcacagtgaacaaagctgcccatgtgcagcagatgaaaacagtgaagcagagtgtactggatggcacctccaagtggtcagccaagatcaccattactgtggtgtgtgcccagggcctacaagccaaggacaaaacaggatccagtgacccttacgtgactgtgcaagtcagcaaaactaagaagcgtaccaagaccatttttggaaacttgaatcctgtttgggaggagaagttccattttgagtgccacaactcctctgaccgcattaaggtgcgtgtatgggatgaggatgatgacatcaagtcaagagtaaagcaacgcctaaagcgagagtctgatgatttccttggccaaaccatcattgaggttcggaccctaagtggcgagatggacgtctggtacaacttggagaagaggacagacaaatcagccgtctcaggggctatccgactacaaatcagtgtggagatcaagggggaggagaaagtagccccataccacgtgcagtatacatgtctccatgagaatcttttccattacctcacagacattcagggcagtggaggagtccgcatccctgaagctcgaggagacgatgcctggaaggtgtactttgatgagacagcccaagaaattgtggatgaatttgccatgcgttatggcattgagtccatatatcaggccatgacgcactttgcatgtttatcatccaagtacatgtgtcctggtgtgccagcagtgatgagcaccttactggccaacatcaacgcctactatgcccacacaactgcctctaccaatgtctctgcatctgatcgctttgcagcctccaactttgggaaagagagatttgtaaaactgctggaccagctacacaactcactgaggatcgacctctctacatacaggaataatttccctgctgggagtcctgaacggcttcaggacttaaaatccacagtggatttgctgaccagcattactttcttcagaatgaaggtacaagaactgcaaagccctccaagagccagccaggtggtaaaggattgtgtgaaggcctgtttgaactccacatatgaatatatcttcaacaactgccacgacttatacagccgccagtaccagctgaagcaggagctacctccagaggaacaagggcccagcattcggaacctggatttctggcccaagctcatcacactcatcgtgtcaatcatagaggaagataagaattcctacacacctgttctgaaccagtttcctcaggagttgaatgtgggaaaagtcagcgcagaagtgatgtggcatttgtttgcccaagacatgaaatatgcattggaggagcatgagaaagaccacctgtgtaaaagtgctgactacatgaacctgcacttcaaggtgaagtggctccacaatgaatacgtgcgggatctgcctgtcctccaggggcaggtgcctgagtacccagcgtggtttgagcagttcgtgctacaatggctggatgagaatgaggatgtatccctggaattcctgcgtggggccctggaacgagataagaaggatggaaccatcgggaaggtgctgatgcagtatgcagacatcttgtcaaaggacttcccagcctattgcacaaaggagaaactgccctgcatcctgatgaacaacgtgcagcaactgagggtccagctggagaaaatgtttgaggccatgggaggcaaggagctggaccttgaagctgcagacagtctgaaggagctgcaggtgaaactgaatacggttctggatgagctcagcatggtgtttggaaacagtttccaggtacggattgatgagtgtgttcgacaaatggccgacatcctgggccaggttcggggcacagggaatgcatctccagacgccagggcctcagcggctcaggatgcagatagcgtactccggcctctcatggacttcctggatggcaacctcaccctctttgccactgtgtgtgagaagacggttctgaagcgtgtactgaaggagctctggcgcgtggtgatgaacacaatggagaggatgattgttctgcccccactcactgaccagacgggcacccagctgatcttcactgctgccaaggagctgagccatctttccaaactcaaggatcacatggtacgagaggaaacacggaatctcactccaaagcagtgtgcagtccttgacctcgccctggacaccatcaagcaatacttccatgcaggaggcaatgggctgaagaaaaccttcctggagaagagcccagatctgcagtctctacgctatgccctgtctctgtacacacagactactgacactctcatcaagacctttgtgcgctcgcagaccacccaagggtctggtgtggacgatcctgtgggagaagtctctattcaggtggacttgtttacacaccctggtactggggagcacaaggtcacagtgaaagtggtggctgccaatgacctcaagtggcagacagcgggtatgttccggcctttcgtggaggtgactatggttggcccacaccaaagtgataagaagaggaagttcacaaccaaatccaaaagcaacaactgggcccccaagtacaatgagacattccacttcctcctgggaaatgaggaggggcccgagtcctatgagttgcagatatgcgtgaaggattactgctttgcccgggaagatcgcgtgctagggctggctgtgatgcctctgagggatgtcacagccaagggcagctgtgcctgctggtgccccttgggccggaagatccatatggatgagacaggcctgaccattctccggattttatctcagaggagcaatgacgaggtggcccgagaatttgtgaaactcaaatcagagtctcgttccacggaggaggggagctgaacaccttcgactcctgtgccaatcaggcagcagcaatttcacaaatcagggccagtgggagttagctgtgtaaccggcttagggtctttgcagtcaagaggctgaccccttcagttaaagatatttaaggaaaaatttggggtggtgataatatggcttttcacagaaagggtcatgaagccctggcccaacaggactgtggtactaggggctgggatgtggggttaccacatggagagattttccattaagagagaaggacaaacatttctgagagtgtcagccattcttggtagacacctctccactcctcatcccacctctacccatctccatgccacaccttatccagttagacacatacataccaatcattagaagaacaagtttagaaggtgtggaacttgtgcctggctggctgggtagtcagctgagcctgttgctgagcccggtggtctggattggagtatggccagggcaggagtacacagaatagaatttagactgtcccttgagtagaatccactgattttctgtggctccagtgagaacaaggctttgaaactgaacaagataacttctagaaatgaactgtactaatccctttccccagattgtatcatgagtagaatcaggttcacgtggtgcttcaaagccctgagaagaatatttctttggaccccaggcactaggggccacctgcctgggagtctccctgcctcactcctctaggcaggggagtgatgcttcaggacgtgacaggctgttctaacatgtgtctacctgagggctagttgaaggatccaggagtattttcttcttgggtgggccctgaacaaagccaaaaattgtagaaaccagtctagaaaaagtcctgctcatctgtggccactgccttctagccgtcctccaccttgcagaaagaatctagcctttggtctctctctctctcatcggggtcatttgctattcccctctgatattcaaccctatagaaggagcctggactctgatccctctgtacaggctggatggaaggggccctccacacttcctgggaggtcagagacaaactgtttcagagagtcagatggacttcccaagacttgttgagagatgtgacatggttcttggatttcctctgtagcagcctcctggacttcctgaggactcgacattgtccacagatgtactggccattacatgaaacaagaaaccaagcatctttgctgttgttaattattatatgtgccattgttacaggagattataggctagtctgtaataaattatcttatagcagcc

SEQ ID NO: 441521 - DNA, 1650 bp, Homo sapiens
atgatctgcaggtgatctaaggatcccggcacgagcgccagtcatgagacattccacttcctcctgggaaatgaggaggggcccgagtcctatgagttgcagatatgcgtgaaggattactgctttgcccgggaagatcgcgtgctagggctggctgtgatgcctctgagggatgtcacagccaagggcagctgtgcctgctggtgccccttgggccggaagatccatatggatgagacaggcctgaccattctccggattttatctcagaggagcaatgacgaggtggcccgagaatttgtgaaactcaaatcagagtctcgttccacggaggaggggagctgaacaccttcgactcctgtgccaatcaggcagcagcaatttcacaaatcagggccagtgggagttagctgtgtaaccggcttagggtctttgcagtcaagaggctgaccccttcagttaaagatatttaaggaaaaatttggggtggtgataatatggcttttcacagaaagggtcatgaagccctggcccaacaggactgtggtactaggggctgggatgtggggttaccacatggagagattttccattaagagagaaggacaaacatttctgagagtgtcagccattcttggtagacacctctccactcctcatcccacctctacccatctccatgccacaccttatccagttagacacatacataccaatcattagaagaacaagtttagaaggtgtggaacttgtgcctggctggctgggtagtcagctgagcctgttgctgagcccggtggtctggattggagtatggccagggcaggagtacacagaatagaatttagactgtcccttgagtagaatccactgattttctgtggctccagtgagaacaaggctttgaaactgaacaagataacttctagaaatgaactgtactaatccctttccccagattgtatcatgagtagaatcaggttcacgtggtgcttcaaagccctgagaagaatatttctttggaccccaggcactaggggccacctgcctgggagtctccctgcctcactcctctaggcaggggagtgatgcttcaggacgtgacaggctgttctaacatgtgtctacctgagggctagttgaaggatccaggagtattttcttcttgggtgggccctgaacaaagccaaaaattgtagaaaccagtctagaaaaagtcctgctcatctgtggccactgccttctagccgtcctccaccttgcagaaagaatctagcctttggtctctctctctctcatcggggtcatttgctattcccctctgatattcaaccctatagaaggagcctggactctgatccctctgtacaggctggatggaaggggccctccacacttcctgggaggtcagagacaaactgtttcagagagtcagatggacttcccaagacttgttgagagatgtgacatggttcttggatttcctctgtagcagcctcctggacttcctgaggactcgacattgtccacagatgtactggccattacatgaaacaagaaaccaagcatctttgctgttgttaattattatatgtgccattgttacaggagattataggctagtctgtaataaattatcttatagcagcc

SEQ ID NO: 441522 - DNA, 1166 bp, Homo sapiens
agttcgacggagtactctccacgtggggttaccacactggagagattttccttctctcttaatggaaaatctctccagtgtggggttaccacatggagagattttccattaagagagaaggacaaacatttctgagagtgtcagccattcttggtagacacctctccactcctcatcccacctctacccatctccatgccacaccttatccagttagacacatacataccaatcattagaagaacaagtttagaaggtgtggaacttgtgcctggctggctgggtagtcagctgagcctgttgctgagcccggtggtctggattggagtatggccagggcaggagtacacagaatagaatttagactgtcccttgagtagaatccactgattttctgtggctccagtgagaacaaggctttgaaactgaacaagataacttctagaaatgaactgtactaatccctttccccagattgtatcatgagtagaatcaggttcacgtggtgcttcaaagccctgagaagaatatttctttggaccccaggcactaggggccacctgcctgggagtctccctgcctcactcctctaggcaggggagtgatgcttcaggacgtgacaggctgttctaacatgtgtctacctgagggctagttgaaggatccaggagtattttcttcttgggtgggccctgaacaaagccaaaaattgtagaaaccagtctagaaaaagtcctgctcatctgtggccactgccttctagccgtcctccaccttgcagaaagaatctagcctttggtctctctctctctcatcggggtcatttgctattcccctctgatattcaaccctatagaaggagcctggactctgatccctctgtacaggctggatggaaggggccctccacacttcctgggaggtcagagacaaactgtttcagagagtcagatggacttcccaagacttgttgagagatgtgacatggttcttggatttcctctgtagcagcctcctggacttcctgaggactcgacattgtccacagatgtactggccattacatgaaacaagaaaccaagcatctttgctgttgttaattattatatgtgccattgttacaggagattataggctagtctgtaataaattatcttatagcagcc

SEQ ID NO: 441523 - DNA, 267 bp, Homo sapiens
aggactcgacattgtccacagatgtactggccattacatgaaacaagaaaccaagcatctttgctgttgttaattattatatgtgccattgttacaggagattataggctagtctgtaataaattatcttatagcagcctttggggtttggtaattctgctaatgtgtggaaagccatggaaatgactgtcctttataatggtagattttggcctaatggtcctttgctgcttcacactcctccacccccatacctgacagccagtg

SEQ ID NO: 441524 - DNA, 6357 bp, Homo sapiens
gagtcccggcagctcctacctcccagcgatggcgtcgctgtgccgcgcccagtccccagcctgccggccggtactcaccgctacccggagttcgctcagacggtgagatttggggcgggtccgaggcagcggcgggacgctacctgcgaccgggaccatgaggagctgccagacccgtggggccggtaacgagagcagtcgcggcacctgctgagaggaaagagggagcggtccggcgcggctggggcgcggcagaggcttgcccgatcctcggccatgtcactgctctgcgtgcgcgttaaaagggccaaattccagggttcaccagataaatttaacacatatgtgaccctgaaagtacagaatgtgaagagcacaactgtagcagttcgtggtgatcagccttcctgggaacaggatttcatgtttgagattagtcgcctggacctgggtctaagtgtggaggtatggaacaaaggactgatctgggacaccatggtggggactgtgtggattgcgctgaagactattcgtcagtcggatgaggaagggcctggggaatggtccacattagaggcagagacgttaatgaaagacgatgagatctgtggaactagaaacccaactcctcataaaattttgcttgatacaagatttgagttgccttttgatatcccagaggaggaagccagatattggacctacaaatgggagcaaatcaatgccttgggagctgacaatgagtattctagtcaagaagaaagccagaggaagccattgcccactgctgccgcccagtgttcttttgaagaccctgatagtgccgtcgatgaccgagatagtgactatcgcagtgagaccagcaacagcttcccacctccttaccatacagcttcccagcccaacgcttctgtgcaccagttccctgtgccggtgcgatcgccacagcagctgctacttcaaggcagttcccgggactcttgtaatgactctatgcaaagttatgaccttgattatccagagcggcgggctatcagccccaccagcagcagtaggtatggctcctcctgtaatgtgagtcaaggaagctctcagctaagtgaactagaccagtatcacgaacaagatgacgaccatcgggagacggactcgattcattcttgccacagctctcacagcctgtccagagatggccaagcaggttttggagaacaagagaaacccttggaggtgacaggtcaagcagagaaggaggcagcatgtgaacccaaggagatgaaagaagatgccacaacccaccctcccccagatctggtgctgcaaaaagaccacttcctaggtccccaggagagttttcctgaggagaatgcatcttcaccatttacccaagccagagcacattggatccgagcagttaccaaggttcgactccagctgcaggagattccagatgatggtgacccctctctgcctcagtggctcccggaagggccagccggagggctctatggcattgacagcatgccagatttacgcagaaagaagccactgccacttgtcagtgatctgtcactggtccagtctcggaaggcaggaatcacttctgcaatggctacacgcacttctcttaaggacgaagagctgaaatcccacgtgtataagaaaaccctgcaggccttaatctaccccatttcgtgcaccactcctcataactttgaggtctggacggccactaccccaacctactgctatgagtgtgaaggcctgctctggggcattgcccggcagggcatgcgctgcagcgaatgtggagtcaagtgccatgagaagtgccaggatctgctcaatgctgactgcctgcagcgggctgcagaaaagagctgtaaacatggagctgaggaccggacccagaacattatcatggccatgaaggaccgcatgaagatccgagagcgaaataagccagagatctttgaagttatccgggacgtcttcacagtgaacaaagctgcccatgtgcagcagatgaaaacagtgaagcagagtgtactggatggcacctccaagtggtcagccaagatcaccattactgtggtgtgtgcccagggcctacaagccaaggacaaaacaggatccagtgacccttacgtgactgtgcaagtcagcaaaactaagaagcgtaccaagaccatttttggaaacttgaatcctgtttgggaggagaagttccattttgagtgccacaactcctctgaccgcattaaggtgcgtgtatgggatgaggatgatgacatcaagtcaagagtaaagcaacgcctaaagcgagagtctgatgatttccttggccaaaccatcattgaggttcggaccctaagtggcgagatggacgtctggtacaacttggagaagaggacagacaaatcagccgtctcaggggctatccgactacaaatcagtgtggagatcaagggggaggagaaagtagccccataccacgtgcagtatacatgtctccatgagaatcttttccattacctcacagacattcagggcagtggaggagtccgcatccctgaagctcgaggagacgatgcctggaaggtgtactttgatgagacagcccaagaaattgtggatgaatttgccatgcgttatggcattgagtccatatatcaggccatgacgcactttgcatgtttatcatccaagtacatgtgtcctggtgtgccagcagtgatgagcaccttactggccaacatcaacgcctactatgcccacacaactgcctctaccaatgtctctgcatctgatcgctttgcagcctccaactttgggaaagagagatttgtaaaactgctggaccagctacacaactcactgaggatcgacctctctacatacaggaataatttccctgctgggagtcctgaacggcttcaggacttaaaatccacagtggatttgctgaccagcattactttcttcagaatgaaggtacaagaactgcaaagccctccaagagccagccaggtggtaaaggattgtgtgaaggcctgtttgaactccacatatgaatatatcttcaacaactgccacgacttatacagccgccagtaccagctgaagcaggagctacctccagaggaacaagggcccagcattcggaacctggatttctggcccaagctcatcacactcatcgtgtcaatcatagaggaagataagaattcctacacacctgttctgaaccagtttcctcaggagttgaatgtgggaaaagtcagcgcagaagtgatgtggcatttgtttgcccaagacatgaaatatgcattggaggagcatgagaaagaccacctgtgtaaaagtgctgactacatgaacctgcacttcaaggtgaagtggctccacaatgaatacgtgcgggatctgcctgtcctccaggggcaggtgcctgagtacccagcgtggtttgagcagttcgtgctacaatggctggatgagaatgaggatgtatccctggaattcctgcgtggggccctggaacgagataagaaggatggattccagcagacatcagagcatgcactcttttcctgctctgtggtggatgtcttcacacaactcaatcagagctttgagatcatccggaagctggaatgcccagaccccagcatccttgcccactacatgaggaggtttgctaagaccatcgggaaggtgctgatgcagtatgcagacatcttgtcaaaggacttcccagcctattgcacaaaggagaaactgccctgcatcctgatgaacaacgtgcagcaactgagggtccagctggagaaaatgtttgaggccatgggaggcaaggagctggaccttgaagctgcagacagtctgaaggagctgcaggtgaaactgaatacggttctggatgagctcagcatggtgtttggaaacagtttccaggtacggattgatgagtgtgttcgacaaatggccgacatcctgggccaggttcggggcacagggaatgcatctccagacgccagggcctcagcggctcaggatgcagatagcgtactccggcctctcatggacttcctggatggcaacctcaccctctttgccactgtgtgtgagaagacggttctgaagcgtgtactgaaggagctctggcgcgtggtgatgaacacaatggagaggatgattgttctgcccccactcactgaccagacgggcacccagctgatcttcactgctgccaaggagctgagccatctttccaaactcaaggatcacatggtacgagaggaaacacggaatctcactccaaagcagtgtgcagtccttgacctcgccctggacaccatcaagcaatacttccatgcaggaggcaatgggctgaagaaaaccttcctggagaagagcccagatctgcagtctctacgctatgccctgtctctgtacacacagactactgacactctcatcaagacctttgtgcgctcgcagaccacccaagggtctggtgtggacgatcctgtgggagaagtctctattcaggtggacttgtttacacaccctggtactggggagcacaaggtcacagtgaaagtggtggctgccaatgacctcaagtggcagacagcgggtatgttccggcctttcgtggaggtgactatggttggcccacaccaaagtgataagaagaggaagttcacaaccaaatccaaaagcaacaactgggcccccaagtacaatgagacattccacttcctcctgggaaatgaggaggggcccgagtcctatgagttgcagatatgcgtgaaggattactgctttgcccgggaagatcgcgtgctagggctggctgtgatgcctctgagggatgtcacagccaagggcagctgtgcctgctggtgccccttgggccggaagatccatatggatgagacaggcctgaccattctccggattttatctcagaggagcaatgacgaggtggcccgagaatttgtgaaactcaaatcagagtctcgttccacggaggaggggagctgaacaccttcgactcctgtgccaatcaggcagcagcaatttcacaaatcagggccagtgggagttagctgtgtaaccggcttagggtctttgcagtcaagaggctgaccccttcagttaaagatatttaaggaaaaatttggggtggtgataatatggcttttcacagaaagggtcatgaagccctggcccaacaggactgtggtactaggggctgggatgtggggttaccacatggagagattttccattaagagagaaggacaaacatttctgagagtgtcagccattcttggtagacacctctccactcctcatcccacctctacccatctccatgccacaccttatccagttagacacatacataccaatcattagaagaacaagtttagaaggtgtggaacttgtgcctggctggctgggtagtcagctgagcctgttgctgagcccggtggtctggattggagtatggccagggcaggagtacacagaatagaatttagactgtcccttgagtagaatccactgattttctgtggctccagtgagaacaaggctttgaaactgaacaagataacttctagaaatgaactgtactaatccctttccccagattgtatcatgagtagaatcaggttcacgtggtgcttcaaagccctgagaagaatatttctttggaccccaggcactaggggccacctgcctgggagtctccctgcctcactcctctaggcaggggagtgatgcttcaggacgtgacaggctgttctaacatgtgtctacctgagggctagttgaaggatccaggagtattttcttcttgggtgggccctgaacaaagccaaaaattgtagaaaccagtctagaaaaagtcctgctcatctgtggccactgccttctagccgtcctccaccttgcagaaagaatctagcctttggtctctctctctctcatcggggtcatttgctattcccctctgatattcaaccctatagaaggagcctggactctgatccctctgtacaggctggatggaaggggccctccacacttcctgggaggtcagagacaaactgtttcagagagtcagatggacttcccaagacttgttgagagatgtgacatggttcttggatttcctctgtagcagcctcctggacttcctgaggactcgacattgtccacagatgtactggccattacatgaaacaagaaaccaagcatctttgctgttgttaattattatatgtgccattgttacaggagattataggctagtctgtaataaattatcttatagcagcc

SEQ ID NO: 441525 - DNA, 6414 bp, Homo sapiens
gagtcccggcagctcctacctcccagcgatggcgtcgctgtgccgcgcccagtccccagcctgccggccggtactcaccgctacccggagttcgctcagacggtgagatttggggcgggtccgaggcagcggcgggacgctacctgcgaccgggaccatgaggagctgccagacccgtggggccggtaacgagagcagtcgcggcacctgctgagaggaaagagggagcggtccggcgcggctggggcgcggcagaggcttgcccgatcctcggccatgtcactgctctgcgtgcgcgttaaaagggccaaattccagggttcaccagataaatttaacacatatgtgaccctgaaagtacagaatgtgaagagcacaactgtagcagttcgtggtgatcagccttcctgggaacaggatttcatgtttgagattagtcgcctggacctgggtctaagtgtggaggtatggaacaaaggactgatctgggacaccatggtggggactgtgtggattgcgctgaagactattcgtcagtcggatgaggaagggcctggggaatggtccacattagaggcagagacgttaatgaaagacgatgagatctgtggaactagaaacccaactcctcataaaattttgcttgatacaagatttgagttgccttttgatatcccagaggaggaagccagatattggacctacaaatgggagcaaatcaatgccttgggagctgacaatgagtattctagtcaagaagaaagccagaggaagccattgcccactgctgccgcccagtgttcttttgaagaccctgatagtgccgtcgatgaccgagatagtgactatcgcagtgagaccagcaacagcttcccacctccttaccatacagcttcccagcccaacgcttctgtgcaccagttccctgtgccggtgcgatcgccacagcagctgctacttcaaggcagttcccgggactcttgtaatgactctatgcaaagttatgaccttgattatccagagcggcgggctatcagccccaccagcagcagtaggtatggctcctcctgtaatgtgagtcaaggaagctctcagctaagtgaactagaccagtatcacgaacaagatgacgaccatcgggagacggactcgattcattcttgccacagctctcacagcctgtccagagatggccaagcaggttttggagaacaagagaaacccttggaggtgacaggtcaagcagagaaggaggcagcatgtgaacccaaggagatgaaagaagatgccacaacccaccctcccccagatctggtgctgcaaaaagaccacttcctaggtccccaggagagttttcctgaggagaatgcatcttcaccatttacccaagccagagcacattggatccgagcagttaccaaggttcgactccagctgcaggagattccagatgatggtgacccctctctgcctcagtggctcccggaagggccagccggagggctctatggcattgacagcatgccagatttacgcagaaagaagccactgccacttgtcagtgatctgtcactggtccagtctcggaaggcaggaatcacttctgcaatggctacacgcacttctcttaaggacgaagagctgaaatcccacgtgtataagaaaaccctgcaggccttaatctaccccatttcgtgcaccactcctcataactttgaggtctggacggccactaccccaacctactgctatgagtgtgaaggcctgctctggggcattgcccggcagggcatgcgctgcagcgaatgtggagtcaagtgccatgagaagtgccaggatctgctcaatgctgactgcctgcagcgggctgcagaaaagagctgtaaacatggagctgaggaccggacccagaacattatcatggccatgaaggaccgcatgaagatccgagagcgaaataagccagagatctttgaagttatccgggacgtcttcacagtgaacaaagctgcccatgtgcagcagatgaaaacagtgaagcagagtgtactggatggcacctccaagtggtcagccaagatcaccattactgtggtgtgtgcccagggcctacaagccaaggacaaaacaggatccagtgacccttacgtgactgtgcaagtcagcaaaactaagaagcgtaccaagaccatttttggaaacttgaatcctgtttgggaggagaagttccattttgagtgccacaactcctctgaccgcattaaggtgcgtgtatgggatgaggatgatgacatcaagtcaagagtaaagcaacgcctaaagcgagagtctgatgatttccttggccaaaccatcattgaggttcggaccctaagtggcgagatggacgtctggtacaacttggagaagaggacagacaaatcagccgtctcaggggctatccgactacaaatcagtgtggagatcaagggggaggagaaagtagccccataccacgtgcagtatacatgtctccatgagaatcttttccattacctcacagacattcagggcagtggaggagtccgcatccctgaagctcgaggagacgatgcctggaaggtgtactttgatgagacagcccaagaaattgtggatgaatttgccatgcgttatggcattgagtccatatatcaggccatgacgcactttgcatgtttatcatccaagtacatgtgtcctggtgtgccagcagtgatgagcaccttactggccaacatcaacgcctactatgcccacacaactgcctctaccaatgtctctgcatctgatcgctttgcagcctccaactttgggaaagagagatttgtaaaactgctggaccagctacacaactcactgaggatcgacctctctacatacaggaataatttccctgctgggagtcctgaacggcttcaggacttaaaatccacagtggatttgctgaccagcattactttcttcagaatgaaggtacaagaactgcaaagccctccaagagccagccaggtggtaaaggattgtgtgaaggcctgtttgaactccacatatgaatatatcttcaacaactgccacgacttatacagccgccagtaccagctgaagcaggagctacctccagaggaacaagggcccagcattcggaacctggatttctggcccaagctcatcacactcatcgtgtcaatcatagaggaagataagaattcctacacacctgttctgaaccagtttcctcaggagttgaatgtgggaaaagtcagcgcagaagtgatgtggcatttgtttgcccaagacatgaaatatgcattggaggagcatgagaaagaccacctgtgtaaaagtgctgactacatgaacctgcacttcaaggtgaagtggctccacaatgaatacgtgcgggatctgcctgtcctccaggggcaggtgcctgagtacccagcgtggtttgagcagttcgtgctacaatggctggatgagaatgaggatgtatccctggaattcctgcgtggggccctggaacgagataagaaggatggattccagcagacatcagagcatgcactcttttcctgctctgtggtggatgtcttcacacaactcaatcagagctttgagatcatccggaagctggaatgcccagaccccagcatccttgcccactacatgaggaggtttgctaagaccatcgggaaggtgctgatgcagtatgcagacatcttgtcaaaggacttcccagcctattgcacaaaggagaaactgccctgcatcctgatgaacaacgtgcagcaactgagggtccagctggagaaaatgtttgaggccatgggaggcaaggagctggaccttgaagctgcagacagtctgaaggagctgcaggtgaaactgaatacggttctggatgagctcagcatggtgtttggaaacagtttccaggtacggattgatgagtgtgttcgacaaatggccgacatcctgggccaggttcggggcacagggaatgcatctccagacgccagggcctcagcggctcaggatgcagatagcgtactccggcctctcatggacttcctggatggcaacctcaccctctttgccactgtgtgtgagaagacggttctgaagcgtgtactgaaggagctctggcgcgtggtgatgaacacaatggagaggatgattgttctgcccccactcactgaccagacgggcacccagctgatcttcactgctgccaaggagctgagccatctttccaaactcaaggatcacatggtacgagaggaaacacggaatctcactccaaagcagtgtgcagtccttgacctcgccctggacaccatcaagcaatacttccatgcaggaggcaatgggctgaagaaaaccttcctggagaagagcccagatctgcagtctctacgctatgccctgtctctgtacacacagactactgacactctcatcaagacctttgtgcgctcgcagaccacccaagtgcatgatgggaaaggtattagatttactgctaatgaggacattcgtccggaaaaggggtctggtgtggacgatcctgtgggagaagtctctattcaggtggacttgtttacacaccctggtactggggagcacaaggtcacagtgaaagtggtggctgccaatgacctcaagtggcagacagcgggtatgttccggcctttcgtggaggtgactatggttggcccacaccaaagtgataagaagaggaagttcacaaccaaatccaaaagcaacaactgggcccccaagtacaatgagacattccacttcctcctgggaaatgaggaggggcccgagtcctatgagttgcagatatgcgtgaaggattactgctttgcccgggaagatcgcgtgctagggctggctgtgatgcctctgagggatgtcacagccaagggcagctgtgcctgctggtgccccttgggccggaagatccatatggatgagacaggcctgaccattctccggattttatctcagaggagcaatgacgaggtggcccgagaatttgtgaaactcaaatcagagtctcgttccacggaggaggggagctgaacaccttcgactcctgtgccaatcaggcagcagcaatttcacaaatcagggccagtgggagttagctgtgtaaccggcttagggtctttgcagtcaagaggctgaccccttcagttaaagatatttaaggaaaaatttggggtggtgataatatggcttttcacagaaagggtcatgaagccctggcccaacaggactgtggtactaggggctgggatgtggggttaccacatggagagattttccattaagagagaaggacaaacatttctgagagtgtcagccattcttggtagacacctctccactcctcatcccacctctacccatctccatgccacaccttatccagttagacacatacataccaatcattagaagaacaagtttagaaggtgtggaacttgtgcctggctggctgggtagtcagctgagcctgttgctgagcccggtggtctggattggagtatggccagggcaggagtacacagaatagaatttagactgtcccttgagtagaatccactgattttctgtggctccagtgagaacaaggctttgaaactgaacaagataacttctagaaatgaactgtactaatccctttccccagattgtatcatgagtagaatcaggttcacgtggtgcttcaaagccctgagaagaatatttctttggaccccaggcactaggggccacctgcctgggagtctccctgcctcactcctctaggcaggggagtgatgcttcaggacgtgacaggctgttctaacatgtgtctacctgagggctagttgaaggatccaggagtattttcttcttgggtgggccctgaacaaagccaaaaattgtagaaaccagtctagaaaaagtcctgctcatctgtggccactgccttctagccgtcctccaccttgcagaaagaatctagcctttggtctctctctctctcatcggggtcatttgctattcccctctgatattcaaccctatagaaggagcctggactctgatccctctgtacaggctggatggaaggggccctccacacttcctgggaggtcagagacaaactgtttcagagagtcagatggacttcccaagacttgttgagagatgtgacatggttcttggatttcctctgtagcagcctcctggacttcctgaggactcgacattgtccacagatgtactggccattacatgaaacaagaaaccaagcatctttgctgttgttaattattatatgtgccattgttacaggagattataggctagtctgtaataaattatcttatagcagcc

SEQ ID NO: 441526 - DNA, 5904 bp, Homo sapiens
gagtcccggcagctcctacctcccagcgatggcgtcgctgtgccgcgcccagtccccagcctgccggccggtactcaccgctacccggagttcgctcagacggtgagatttggggcgggtccgaggcagcggcgggacgctacctgcgaccgggaccatgaggagctgccagacccgtggggccggtaacgagagcagtcgcggcacctgctgagaggaaagagggagcggtccggcgcggctggggcgcggcagaggcttgcccgatcctcggccatgtcactgctctgcgtgcgcgttaaaagggccaaattccagggttcaccagataaatttaacacatatgtgaccctgaaagtacagaatgtgaagagcacaactgtagcagttcgtggtgatcagccttcctgggaacaggatttcatgtttgagattagtcgcctggacctgggtctaagtgtggaggtatggaacaaaggactgatctgggacaccatggtggggactgtgtggattgcgctgaagactattcgtcagtcggatgaggaagggcctggggaatggtccacattagaggcagagacgttaatgaaagacgatgagatctgtggaactagaaacccaactcctcataaaattttgcttgatacaagatttgagttgccttttgatatcccagaggaggaagccagatattggacctacaaatgggagcaaatcaatgccttgggagctgacaatgagtattctagtcaagaagaaagccagaggaagccattgcccactgctgccgcccagtgttcttttgaagaccctgatagtgccgtcgatgaccgagatagtgactatcgcagtgagaccagcaacagcttcccacctccttaccatacagcttcccagcccaacgcttctgtgcaccagttccctgtgccggtgcgatcgccacagcagctgctacttcaaggcagttcccgggactcttgtaatgactctatgcaaagttatgaccttgattatccagagcggcgggctatcagccccaccagcagcagtaggtatggctcctcctgtaatgtgagtcaaggaagctctcagctaagtgaactagaccagtatcacgaacaagatgacgaccatcgggagacggactcgattcattcttgccacagctctcacagcctgtccagagatggccaagcaggttttggagaacaagagaaacccttggaggtgacaggtcaagcagagaaggaggcagcatgtgaacccaaggagatgaaagaagatgccacaacccaccctcccccagatctggtgctgcaaaaagaccacttcctaggtccccaggagagttttcctgaggagaatgcatcttcaccatttacccaagccagagcacattggatccgagcagttaccaaggttcgactccagctgcaggagattccagatgatggtgacccctctctgcctcagtggctcccggaagggccagccggagggctctatggcattgacagcatgccagatttacgcagaaagaagccactgccacttgtcagtgatctgtcactggtccagtctcggaaggcaggaatcacttctgcaatggctacacgcacttctcttaaggacgaagagctgaaatcccacgtgtataagaaaaccctgcaggccttaatctaccccatttcgtgcaccactcctcataactttgaggtctggacggccactaccccaacctactgctatgagtgtgaaggcctgctctggggcattgcccggcagggcatgcgctgcagcgaatgtggagtcaagtgccatgagaagtgccaggatctgctcaatgctgactgcctgcagcgggctgcagaaaagagctgtaaacatggagctgaggaccggacccagaacattatcatggccatgaaggaccgcatgaagatccgagagcgaaataagccagagatctttgaagttatccgggacgtcttcacagtgaacaaagctgcccatgtgcagcagatgaaaacagtgaagcagagtgtactggatggcacctccaagtggtcagccaagatcaccattactgtggtgtgtgcccagggcctacaagccaaggacaaaacaggatccagtgacccttacgtgactgtgcaagtcagcaaaactaagaagcgtaccaagaccatttttggaaacttgaatcctgtttgggaggagaagttccattttgagtgccacaactcctctgaccgcattaaggtgcgtgtatgggatgaggatgatgacatcaagtcaagagtaaagcaacgcctaaagcgagagtctgatgatttccttggccaaaccatcattgaggttcggaccctaagtggcgagatggacgtctggtacaacttggagaagaggacagacaaatcagccgtctcaggggctatccgactacaaatcagtgtggagatcaagggggaggagaaagtagccccataccacgtgcagtatacatgtctccatgagaatcttttccattacctcacagacattcagggcagtggaggagtccgcatccctgaagctcgaggagacgatgcctggaaggtgtactttgatgagacagcccaagaaattgtggatgaatttgccatgcgttatggcattgagtccatatatcaggccatgacgcactttgcatgtttatcatccaagtacatgtgtcctggtgtgccagcagtgatgagcaccttactggccaacatcaacgcctactatgcccacacaactgcctctaccaatgtctctgcatctgatcgctttgcagcctccaactttgggaaagagagatttgtaaaactgctggaccagctacacaactcactgaggatcgacctctctacatacaggaataatttccctgctgggagtcctgaacggcttcaggacttaaaatccacagtggatttgctgaccagcattactttcttcagaatgaaggtacaagaactgcaaagccctccaagagccagccaggtggtaaaggattgtgtgaaggcctgtttgaactccacatatgaatatatcttcaacaactgccacgacttatacagccgccagtaccagctgaagcaggagctacctccagaggaacaagggcccagcattcggaacctggatttctggcccaagctcatcacactcatcgtgtcaatcatagaggaagataagaattcctacacacctgttctgaaccagtttcctcaggagttgaatgtgggaaaagtcagcgcagaagtgatgtggcatttgtttgcccaagacatgaaatatgcattggaggagcatgagaaagaccacctgtgtaaaagtgctgactacatgaacctgcacttcaaggtgaagtggctccacaatgaatacgtgcgggatctgcctgtcctccaggggcaggtgcctgagtacccagcgtggtttgagcagttcgtgctacaatggctggatgagaatgaggatgtatccctggaattcctgcgtggggccctggaacgagataagaaggatggattccagcagacatcagagcatgcactcttttcctgctctgtggtggatgtcttcacacaactcaatcagagctttgagatcatccggaagctggaatgcccagaccccagcatccttgcccactacatgaggaggtttgctaagaccatcgggaaggtgctgatgcagtatgcagacatcttgtcaaaggacttcccagcctattgcacaaaggagaaactgccctgcatcctgatgaacaacgtgcagcaactgagggtccagctggagaaaatgtttgaggccatgggaggcaaggagctggaccttgaagctgcagacagtctgaaggagctgcaggtgaaactgaatacggttctggatgagctcagcatggtgtttggaaacagtttccaggtacggattgatgagtgtgttcgacaaatggccgacatcctgggccaggttcggggcacagggaatgcatctccagacgccagggcctcagcggctcaggatgcagatagcgtactccggcctctcatggacttcctggatggcaacctcaccctctttgccactgtgtgtgagaagacggttctgaagcgtgtactgaaggagctctggcgcgtggtgatgaacacaatggagaggatgattgttctgcccccactcactgaccagacgggcacccagctgatcttcactgctgccaaggagctgagccatctttccaaactcaaggatcacatggtacgagaggaaacacggaatctcactccaaagcagtgtgcagtccttgacctcgccctggacaccatcaagcaatacttccatgcaggaggcaatgggctgaagaaaaccttcctggagaagagcccagatctgcagtctctacgctatgccctgtctctgtacacacagactactgacactctcatcaagacctttgtgcgctcgcagaccacccaagggtctggtgtggacgatcctgtgggagaagtctctattcaggtggacttgtttacacaccctggtactggggagcacaaggtcacagtgaaagtggtggctgccaatgacctcaagtggcagacagcgggtatgttccggcctttcgtggaggtgactatggttggcccacaccaaagtgataagaagaggaagttcacaaccaaatccaaaagcaacaactgggcccccaagtacaatgagacattccacttcctcctgggaaatgaggaggggcccgagtcctatgagttgcagatatgcgtgaaggattactgctttgcccgggaagatcgcgtgctagggctggctgtgatgcctctgagggatgtcacagccaagggcagctgtgcctgctggtgccccttgggccggaagatccatatggatgagacaggcctgaccattctccggattttatctcagaggagcaatgacgaggtggcccgagaatttgtgaaactcaaatcagagtctcgttccacggaggaggggagctgaacaccttcgactcctgtgccaatcaggcagcagcaatttcacaaatcagggccagtgggagttagctgtgtaaccggcttagggtctttgcagtcaagaggctgaccccttcagttaaagatatttaaggaaaaatttggggtggtgataatatggcttttcacagaaagggtcatgaagccctggcccaacaggactgtggtactaggggctgggatgtggggttaccacatggagagattttccattaagagagaaggacaaacatttctgagagtgtcagccattcttggtagacacctctccactcctcatcccacctctacccatctccatgccacaccttatccagttagacacatacataccaatcattagaagaacaaagccaaaaattgtagaaaccagtctagaaaaagtcctgctcatctgtggccactgccttctagccgtcctccaccttgcagaaagaatctagcctttggtctctctctctctcatcggggtcatttgctattcccctctgatattcaaccctatagaaggagcctggactctgatccctctgtacaggctggatggaaggggccctccacacttcctgggaggtcagagacaaactgtttcagagagtcagatggacttcccaagacttgttgagagatgtgacatggttcttggatttcctctgtagcagcctcctggacttcctgaggactcgacattgtccacagatgtactggccattacatgaaacaagaaaccaagcatctttgctgttgttaattattatatgtgccattgttacaggagattataggctagtctgtaataaattatcttatagcagcc

SEQ ID NO: 441527 - DNA, 808 bp, Homo sapiens
ggcggttgctggggcttgcgtgggaggaaggtgactgtgaggaaggtgtgtgtccaccgagcacttggattcagcttcttcatttccaacatggaagaaacttacaccgactccctggaccctgagaagctattgcaatgcccctatgacaaaaaccatcaaatcagggcttgcaggtttccttatcatcttatcaagtgcagaaagaatcatcctgatgttgcaagcaaattggctacttgtcccttcaatgctcgccaccaggttcctcgagctgaaattagtcatcatatctcaagctgtgatgacagaagttgtattgagcaagatgttgtcaaccaaaccaggagccttagacaagagactctggctgagagcacttggcagtgccctccttgcgatgaagactgggataaagatttgtgggagcagaccagcaccccatttgtctggggcacaactcactactctgacaacaacagccctgcgagcaacatagttacagaacataagaataacctggcttcaggcatgcgagttcccaaatctctgccgtatgttctgccatggaaaaacaatggaaatgcacagtaactgaatacctatctcatcaaatgccagaccctagaagactgttgcttcttcttctaccagtgggttctcattttcctcctaatctaattatagaatggtaaactccctgtgactttccaaactgacaagcacacttttttcctccccccttgaatcctcatttaatgcaagaaccctcatactcagaagcttccaaataaacctttgatacaga

SEQ ID NO: 441528 - DNA, 727 bp, Homo sapiens
ggtgaggaaggtgtgtgtccaccgagcacttggattcagcttcttcatttccaacatggaagaaacttacaaatcatcctgatgttgcaagcaaattggctacttgtcccttcaatgctcgccaccaggttcctcgagctgaaattagtcatcatatctcaagctgtgatgacagaagttgtattgagcaagatgttgtcaaccaaaccaggagccttagacaagagactctggctgagagcacttggcagtgccctccttgcgatgaagactgggataaagatttgtgggagcagaccagcaccccatttgtctggggcacaactcactactctgacaacaacagccctgcgagcaacatagttacagaacataagaataacctggcttcaggcatgcgagttcccaaatctctgccgtatgttctgccatggaaaaacaatggaaatgcacagtaactgaatacctatctcatcaaatgccagaccctagaagactgttgcttcttcttctaccagtgggttctcattttcctcctaatctaattatagaatggtaaactccctgtgactttccaaactgacaagcacacttttttcctccccccttgaatcctcatttaatgcaagaaccctcatactcagaagcttccaaataaacctttgatacagaaaacaaaaccaaacaaaataaaaaaacatgggagaagacaaaggaacaccaaaga

SEQ ID NO: 441529 - DNA, 859 bp, Homo sapiens
  misc_feature (814)..(817): n is a, c, g, or t
  misc_feature (825)..(825): n is a, c, g, or t
gtgtgttaatgatggctatgcaccatcatttgcacgccctcgtaactaagcggcagattttaatgactaatatttgacagtggaattatgtgattccatctttacgggacgactttactttatacacgagtttgtattatattttgttcgtataattgcgacgagagttcaaggttctatttcttagtactcgatatggatcatatacggtgatatataaaaataagctattactttaccccttaatctcaactaaccaaccgccgggaggctaagcccttacttcgaggttagacatgttatacggggcggggcgataaatagatattctttcctctttccattcccgcgtccactgtagttgggttctctgtccgaaagtgatgttgtatattgataggcgtcgattatacaggggtgtatacaaaagagaggcaagcgtttcatctcctacgaaacagcgcagcccatttcagcggtgcaatttagcgccataagcagactctggcttcaggcatatgagttcccgatctccactcgtatgttcttccatgggctaccaaggtcaatgcacagtagattaatccctgtttcatcaaatgccagaccctagaagactgttgcttcttcttctaccagtgggttctcattttcctcctaatctaattatagaatggtaaactccctgtgactttccaaactgacaagcacacttttttcctccccccttgaatcctcatttaatgcaagaaccctcatactcagaagcttccaaataaacctttgatacagacccgcctgtaaaaaaaaaaannnntggcctcnttgtgaagtcaagcttaataaagacacgacgtcc

SEQ ID NO: 441530 - DNA, 306 bp, Homo sapiens
actttaaaacgtttctccctggatacttgcatttcccaaaaaatgaagtcaccaaattatatgtcaaaaggcttgatggaaatgcacagtaactgaatacctatctcatcaaatgccagaccctagaagactgttgcttcttcttctaccagtgggttctcattttcctcctaatctaattatagaatggtaaactccctgtgactttccaaactgacaagcacacttttttcctccccccttgaatcctcatttaatgcaagaaccctcatactcagaagcttccaaataaacctttgatacaga

SEQ ID NO: 441531 - DNA, 716 bp, Homo sapiens
ggcggttgctggggcttgcgtgggaggaaggtgactgtgaggaaggtgtgtgtccaccgagcacttggattcagcttcttcatttccaacatggaagaaacttacaccacattttttttttcttaaatatcacctgggagtgtgttggaaatggacaatctcagcgctcatcccagacctactgaatcagaatcagcactttaacacagtccctaagtgatgtaacacctggagaccgactccctggaccctgagaagctattgcaatgcccctatgacaaaaaccatcaaatcagggcttgcaggtttccttatcatcttatcaagtgcagaaaggtagggtcataatttgccctctaacaccctcctgagttcttttaaaaggccatattttataaatatcaaataattttatcatgttttaattgattgccagaattgttttgggaatctacctctcttaaataccaacatttatagaaaggcatttgttcattccttaggataaattttttcttgttttggttttcttcccattaactagtgacaaagaaccctttataaacagcatctctagagtcttctcaccctttgtaaaacagactaattttggctaacaatgagaaatcctgcctatcttctaaatttgatgtattcatgagcctaacaatgattgagtgctataactcactttttctgattattttgtttagaaa

SEQ ID NO: 441532 - DNA, 1202 bp, Homo sapiens
ggcggttgctggggcttgcgtgggaggaaggtgactgtgaggaaggtgtgtgtccaccgagcacttggattcagcttcttcatttccaacatggaagaaacttacaccgactccctggaccctgagaagctattgcaatgcccctatgacaaaaaccatcaaatcagggcttgcaggtttccttatcatcttatcaagtgcagaaagaatcatcctgatgttgcaagcaaattggctacttgtcccttcaatgctcgccaccaggttcctcgagctgaaattagtcatcatatctcaagctgtgatgacagaagttgtattgagcaagatgttgtcaaccaaaccaggagccttagacaagagactctggctgagagcacttggcagtgccctccttgcgatgaagactgggataaagatttgtgggagcagaccagcaccccatttgtctggggcacaactcactactctgacaacaacagccctgcgagcaacatagttacagaacataagaataacctggcttcaggcatgcgagttcccaaatctctgccgtatgttctgccatggaaaaacaatggaaatgcacagtaactgaatacctatctcatcaaatgccagaccctagaagactgttgcttcttcttctaccagtgggttctcattttcctcctaatctaattatagaatggtaaactccctgtgactttccaaactgacaagcacacttttttcctccccccttgaatcctcatttaatgcaagaaccctcatactcagaagcttccaaataaacctttgatacagaaaaacaacaaaaaacacaacaaaaaaaaaacaaacaacaacaaaaacctgtcggcgcaagcacacccaacaaaaaacacaacaaggacagaatcatcaaaacataacaactagagtacgggcaggcggcgaggcgcaccacacgcagacgagacgacaacaacaggatcacaacgacctgcctcccggagacgacatagccgggcagcagaaaccaccgcggccgggaagagatcccgcacacgcaaataaagaactcaccccacgggcgggagaaaaacccagacacgttgattaccatgcgaaacaaagacagaagaacggcggaacaccacaagcggggccatagaagaaagggcacccactaaaccagcaaggagagagacacgcgccgc

SEQ ID NO: 441533 - DNA, 836 bp, Homo sapiens
ggcggttgctggggcttgcgtgggaggaaggtgactgtgaggaaggtgtgtgtccaccgagcacttggattcagcttcttcatttccaacatggaagaaacttacaccacattttttttttcttaaatatcacctgggagtgtgttggaaatggacaatctcagcgctcatcccagacctactgaatcagaatcagcactttaacacagtccctaagtgatgtaacacctggagaaatcatcctgatgttgcaagcaaattggctacttgtcccttcaatgctcgccaccaggttcctcgagctgaaattagtcatcatatctcaagctgtgatgacagaagttgtattgagcaagatgttgtcaaccaaaccaggagccttagacaagagactctggctgagagcacttggcagtgccctccttgcgatgaagactgggataaagatttgtgggagcagaccagcaccccatttgtctggggcacaactcactactctgacaacaacagccctgcgagcaacatagttacagaacataagaataacctggcttcaggcatgcgagttcccaaatctctgccgtatgttctgccatggaaaaacaatggaaatgcacagtaactgaatacctatctcatcaaatgccagaccctagaagactgttgcttcttcttctaccagtgggttctcattttcctcctaatctaattatagaatggtaaactccctgtgactttccaaactgacaagcacacttttttcctccccccttgaatcctcatttaatgcaagaaccctcatactcagaagcttccaaataaacctttgatacaga

SEQ ID NO: 441534 - DNA, 637 bp, Homo sapiens
agagaactgacagatcccttaattttggttccacagaatcatcctgatgttgcaagcaaattggctacttgtcccttcaatgctcgccaccaggttcctcgagctgaaattagtcatcatatctcaagctgtgatgacagaagttgtattgagcaagatgttgtcaaccaaaccaggagccttagacaagagactctggctgagagcacttggcagtgccctccttgcgatgaagactgggataaagatttgtgggagcagaccagcaccccatttgtctggggcacaactcactactctgacaacaacagccctgcgagcaacatagttacagaacataagaataacctggcttcaggcatgcgagttcccaaatctctgccgtatgttctgccatggaaaaacaatggaaatgcacagtaactgaatacctatctcatcaaatgccagaccctagaagactgttgcttcttcttctaccagtgggttctcattttcctcctaatctaattatagaatggtaaactccctgtgactttccaaactgacaagcacacttttttcctccccccttgaatcctcatttaatgcaagaaccctcatactcagaagcttccaaataaacctttgatacaga

SEQ ID NO: 441535 - DNA, 650 bp, Homo sapiens
ggcggttgctggggcttgcgtgggaggaaggtgactgtgaggaaggtgtgtgtccaccgagcacttggattcagcttcttcatttccaacatggaagaaacttacagttcctcgagctgaaattagtcatcatatctcaagctgtgatgacagaagttgtattgagcaagatgttgtcaaccaaaccaggagccttagacaagagactctggctgagagcacttggcagtgccctccttgcgatgaagactgggataaagatttgtgggagcagaccagcaccccatttgtctggggcacaactcactactctgacaacaacagccctgcgagcaacatagttacagaacataagaataacctggcttcaggcatgcgagttcccaaatctctgccgtatgttctgccatggaaaaacaatggaaatgcacagtaactgaatacctatctcatcaaatgccagaccctagaagactgttgcttcttcttctaccagtgggttctcattttcctcctaatctaattatagaatggtaaactccctgtgactttccaaactgacaagcacacttttttcctccccccttgaatcctcatttaatgcaagaaccctcatactcagaagcttccaaataaacctttgatacaga

SEQ ID NO: 441536 - DNA, 960 bp, Homo sapiens
ggcggttgctggggcttgcgtgggaggaaggtgactgtgaggaaggtgtgtgtccaccgagcacttggattcagcttcttcatttccaacatggaagaaacttacaccgactccctggaccctgagaagctattgcaatgcccctatgacaaaaaccatcaaatcagggcttgcaggtttccttatcatcttatcaagtgcagaaagaatcatcctgatgttgcaagcaaattggctacttgtcccttcaatgctcgccaccaggttcctcgagctgaaattagtcatcatatctcaagctgtgatgacagaagttgtattgagcaagatgttgtcaaccaaaccaggagccttagacaagagactctggctgagagcacttggcagtgccctccttgcgatgaagactgggataaagatttgtgggagcagaccagcaccccatttgtctggggcacaactcactactctgacaacaacagccctgcgagcaacatagttacagaacataagaataacctggcttcaggcatgcgagttcccaaatctctgccgtatgttctgccatggaaaaacaatggaaatgcacagtaactgaatacctatctcatcaaatgccagaccctagaagactgttgcttcttcttctaccagtgggttctcattttcctcctaatctaattatagaatggtaaactccctgtgactttccaaactgacaagcacacttttttcctccccccttgaatcctcatttaatgcaagaaccctcatactcagaagcttccaaataaacctttgatacagagattgcttaatagtttggtcaagtacctgcagccccaagatcagagatcatgtccaattccacattaatgaaccataatgatttaaagttttcttaaaggttctaactgaaatagacaggaaacttgggttagaaaaggtaactgtgtattt

SEQ ID NO: 441537 - DNA, 923 bp, Homo sapiens
ggcggttgctggggcttgcgtgggaggaaggtgactgtgaggaaggtgtgtgtccaccgagcacttggattcagcttcttcatttccaacatggaagaaacttacaccgactccctggaccctgagaagctattgcaatgcccctatgacaaaaaccatcaaatcagggcttgcaggtttccttatcatcttatcaagtgcagaaagaatcatcctgatgttgcaagcaaattggctacttgtcccttcaatgctcgccaccaggttcctcgagctgaaattagtcatcatatctcaagctgtgatgacagaagttgtattgagcaagatgttgtcaaccaaaccaggagccttagacaagagactctggctgagagcacttggcagtgccctccttgcgatgaagactgggataaagatttgtgggagcagaccagcaccccatttgtctggggcacaactcactactctgacaacaacagccctgcgagcaacatagttacagaacataagaataacctggcttcaggcatgcgagttcccaaatctctgccgtatgttctgccatggaaaaacaatgccagaccctagaagactgttgcttcttcttctaccagtgggttctcattttcctcctaatctaattatagaatggtaaactccctgtgactttccaaactgacaagcacacttttttcctccccccttgaatcctcatttaatgcaagaaccctcatactcagaagcttccaaataaacctttgatacagagattgcttaatagtttggtcaagtacctgcagccccaagatcagagatcatgtccaattccacattaatgaaccataatgatttaaagttttcttaaaggttctaactgaaatagacaggaaacttgggttagaaaaggtaactgtgtattt

SEQ ID NO: 441538 - DNA, 987 bp, Homo sapiens
tgagccgagatcccaccactgcactccagcttaggcgacagagccagactgtgtctcaaaaacaggaaagaaaacaaaagaaaatttggactattgccaattacaaatatttttagagaagaattcaaaacagtaactgtggatgatggaaacaatagttatgataaaagtctgatgaaacttcccagttcacaaggaaatttaattacttatgtgcagcattttaagacagtaatcagaatcatgactgacagcatcatatcagggccagcagacttttataaatttcatacaatcttcagaaataataacttttttttttttttttggatagattctacctttgtcacccaggcgggagtgcagtggcatgatctcggctcactacaacctccgcatcctgggttcaagcagttctcctgtctcagcctcccgagtagctgagattacaggcatgtgccaccaggcatggctaatttttgtatttttagtggagacagggtttcactctattaggctggtctggaactcccgacctcaggtgatccacgtgcctttgtctcccaaagtgctgggattacaggcatgagtgacggtgcccagccattcgtgacatgtttatacaaatataactttagcaaatatttagcataactatcaaaattacaaatcatattaaatttgtataaatgtatgcaatttttggaacacgcatatcaacaacatacccataaatataactgagatgagatctaatgtcacctcacttgacagtgccctcccatgcagtatcgccacatttgacaatgcctgcccatttaatctaccaaataaatcgaatcacttaatacctctacaagatgagagatacattctttagactccccaagggatgcagctgaaaaaaatcccaaagttagttttaagccaaaaagacttgatttaggattttgacactggagaaacccatcaaagatgtcaagtttg

SEQ ID NO: 441539 - DNA, 374 bp, Homo sapiens
gaggcaggagaatggcgtgaacccgggaggcagagtttgcagtgagccgagatcccaccactgcactccagcttaggcgacagagccagactgtgtctcaaaaacaggaaagaaaacaaaagaaaatttggactattgccaattacaaatatttttagagaagaattcaaaacagtaactgtggatgatggaaacaatagttatgataaaagtctgatgaaacttcccagttcacaaggaaatttaattacttatgtgcagcattttaagacagtaatcagaatcatgactgacagcatcatatcagggccagcagacttttataaatttcatacaatcttcagaaataataacttttttttttttttttggat

SEQ ID NO: 441540 - DNA, 3074 bp, Homo sapiens
  misc_feature (9)..(11): n is a, c, g, or t
aaacatttnnnggatgggacaacttgtatttgtccctttcgcttccacgtccaaacccctttaagaaggatgaatgggcaggatgagttagactccttcgctgtatcgtctactgattcttaaaatgtgacaaatctgattggacgacttacatggcttctggagttacagtgaatgatgaagtcatcaaagtttttaatgatatgaaagtaaggaaatcttctacacaagaggagatcaaaaagagaaagaaagcagttctcttctgtttaagcgatgacaaaagacaaataattgtagaggaagcaaagcagatcttggtgggtgacattggtgatactgtagaggacccctacacatcttttgtgaagttgctacctctgaatgattgccgatatgctttgtacgatgccacatacgaaacaaaagagtctaagaaagaagacctagtatttatattctgggctcctgaaagtgcacctttaaaaagcaagatgatttatgctagctctaaagatgccattaaaaagaaatttacaggtattaaacatgagtggcaagtaaatggcttggatgatattaaggaccgttcgacacttggagagaaattgggaggcaatgtagtagtttcacttgaaggaaaaccattataaaatgacagtcaagtgccatctggatcttaaggagcttccatttctccagctcagtccattggaatagtattaggttttggttttttgttgtatttccccctttccactgggcccttccaacacaatgaatgaaggaaatatcatttatttaagcagcctatcagtgattgccattagactgttgaatactgttacttttatatagaacccaaggaatgccttcctgtcatattttagccaaaacaactggttatatgcctcccttgcagcaagcactacaatgtatgtgatcgtcaatgtgaatagcttagaatactgcaaaggataagctaattgaatgccttgaaagtattatccactggtcagatggtcaacttttttcagtattatttatagttggcacttgattgcagttctgtgaggcttgagcattcatacacctcacctgccttggcaagcctattttagtgatatggcagcacggatataacactatgcattaaaagcactttttgtaataagtttaatatcctaaaaggaatgccaattaagttttgttaactgtgtcatcaacttatcctagtacctcagtgttcattcctgttacctgcatatcttcttaaaagaaatagctgttattaatgcctttttgttttccattgagtgtacactactgaataagtgtaggagttttatgtttaccatgtgagtcctgcaacactaaagatattttgaatatcagtcatgatggcaatttctgtataaaagagccttaaatggaacattgttttgagatcaaactccccaccctcacaaaaatggccacgttgcaataaaaattgtggcatattacagaacgttgccttgttttccttggaaattttgcaaaatgttatgtgaaacaacttctagggtaaaaacagctattactaatctctgcactggtcatttgagaattttttttgtacagcattcatgtgtgatattttccagatttgttggatctatttggtttaaaaagtattctatcttaaggccaactaatataaaataccattgttaaagaatggtacttttataaacattagtgtatttatttcctatgtgttaatatgaagatcagaaattattttttgcactttggcataaatacttttcaatatctgatttgttctctggataaattagcatagttatttttttattcacatttacatttctaagtagttgtatagtagaagcaggaagctcttattgcttatttggtcgtaatgaaaataatttgtaaaatgtcctttaaaagtttaatgatacttctgatgtttcggaacagtcatttcacctactatttctgaatatattttgcaaattgaattggaataggaattgatatagcagtcttaaacattagtagtgggatttggctatggtccagactgtgctccttatagagaatttgatctgctcagtgtgagcggtttgctgttagccagggctatttatggcaaacacatgcttttgtatcttgtcatagttatccacaaatggcaaaactggacttgattctactggtatgcaaaacaggcatgctagtaagcagtcagtcgtggctcagaacttaaccccatagctcagaggaatgcttttagcagaaaacaggaaagaaaatatcccttaaaaattttttttgaatgtgtggaagtaattttagtataattagattttttccatatttttgaaagatttttcagatgtgaacattaaaaatagggattaaatgtctaggcttccatttaaaattatatgaatggtttgggatctttttgcactgagcaattttatttcaggcttccagctgtccctgtgagttatcctggacatttcgatggtttttggtaaggccaaactctgataagcaaaacagagaatactgacgtatacttaaccatatgtgtaactgatacttggcaccatggaatttttcattgagttatttcctcattcttttaaaaaataagggactataaatcagttatgtagtatcttttgtttttgtagctgattccttaactttcttgtatgcctctagtaatttcagagattaaatattgctttaaactgtgatactttgatttgctagattgacaaaactgatactaatataattaagttcatctttgaaatacatctttgtgcgtagagccaaaaaaagagataaaattaataatagttcacttgttatttgagattaatttggcatttgaaatgatcattttattttacaatcatttataatgaatcaatgttccagttagctttaaaaggtatacggtgctaattagtaaaatattgaaggcaatattttactgctagcttgcaaagttatgagagtttaaaaaataaaatatatgaaaatatgta

SEQ ID NO: 441541 - DNA, 1186 bp, Homo sapiens
  misc_feature (9)..(11): n is a, c, g, or t
aaacatttnnnggatgggacaacttgtatttgtccctttcgcttccacgtccaaacccctttaagaaggatgaatgggcaggatgagttagactccttcgctgtatcgtctactgattcttaaaatgtgacaaatctgattggacgacttacatggcttctggagttacagtgaatgatgaagtcatcaaagtttttaatgatatgaaagtaaggaaatcttctacacaagaggagatcaaaaagagaaagaaagcagttctcttctgtttaagcgatgacaaaagacaaataattgtagaggaagcaaagcagatcttggtgggtgacattggtgatactgtagaggacccctacacatcttttgtgaagttgctacctctgaatgattgccgatatgctttgtacgatgccacatacgaaacaaaagagtctaagaaagaagacctagtatttatattctgggctcctgaaagtgcacctttaaaaagcaagatgatttatgctagctctaaagatgccattaaaaagaaatttacaggtattaaacatgagtggcaagtaaatggcttggatgatattaaggaccgttcgacacttggagagaaattgggaggcaatgtagtagtttcacttgaaggaaaaccattataaaatgacagtcaagtgccatctggatcttaaggagcttccatttctccagctcagtccattggaatagtattaggttttggttttttgttgtatttccccctttccactgggcccttccaacacaatgaatgaaggaaatatcatttatttaagcagcctatcagtgattgccattagactgttgaatactgttacttttatatagaacccaaggaatgccttcctgtcatattttagccaaaacaactggttatatgcctcccttgcagcaagcactacaatgtatgtgatcgtcaatgtgaatagcttagaatactgcaaaggataagctaattgaatgccttgaaagtattatccactggtcagatggtcaacttttttcagtattatttatagttggcacttgattgcagttctgtgaggcttgagcattcatacacctcacctgccttggcaagcctattttagtgatatggcagcacggatataacactatgcattaaaagcactttttgtaataagtttaatatcct

SEQ ID NO: 441542 - DNA, 3027 bp, Homo sapiens
cgctgcctgggcccgccgagccccgccacctccctcgggctgcagctcccggcgtgccccgcactctccgctgcccacccgctcgcccgcccctccttctcctcccagtgccacagagccgaagcccgagctgccgccgcagccacagccgagggcactatggcttctggagttacagtgaatgatgaagtcatcaaagtttttaatgatatgaaagtaaggaaatcttctacacaagaggagatcaaaaagagaaagaaagcagttctcttctgtttaagcgatgacaaaagacaaataattgtagaggaagcaaagcagatcttggtgggtgacattggtgatactgtagaggacccctacacatcttttgtgaagttgctacctctgaatgattgccgatatgctttgtacgatgccacatacgaaacaaaagagtctaagaaagaagacctagtatttatattctgggctcctgaaagtgcacctttaaaaagcaagatgatttatgctagctctaaagatgccattaaaaagaaatttacaggtattaaacatgagtggcaagtaaatggcttggatgatattaaggaccgttcgacacttggagagaaattgggaggcaatgtagtagtttcacttgaaggaaaaccattataaaatgacagtcaagtgccatctggatcttaaggagcttccatttctccagctcagtccattggaatagtattaggttttggttttttgttgtatttccccctttccactgggcccttccaacacaatgaatgaaggaaatatcatttatttaagcagcctatcagtgattgccattagactgttgaatactgttacttttatatagaacccaaggaatgccttcctgtcatattttagccaaaacaactggttatatgcctcccttgcagcaagcactacaatgtatgtgatcgtcaatgtgaatagcttagaatactgcaaaggataagctaattgaatgccttgaaagtattatccactggtcagatggtcaacttttttcagtattatttatagttggcacttgattgcagttctgtgaggcttgagcattcatacacctcacctgccttggcaagcctattttagtgatatggcagcacggatataacactatgcattaaaagcactttttgtaataagtttaatatcctaaaaggaatgccaattaagttttgttaactgtgtcatcaacttatcctagtacctcagtgttcattcctgttacctgcatatcttcttaaaagaaatagctgttattaatgcctttttgttttccattgagtgtacactactgaataagtgtaggagttttatgtttaccatgtgagtcctgcaacactaaagatattttgaatatcagtcatgatggcaatttctgtataaaagagccttaaatggaacattgttttgagatcaaactccccaccctcacaaaaatggccacgttgcaataaaaattgtggcatattacagaacgttgccttgttttccttggaaattttgcaaaatgttatgtgaaacaacttctagggtaaaaacagctattactaatctctgcactggtcatttgagaattttttttgtacagcattcatgtgtgatattttccagatttgttggatctatttggtttaaaaagtattctatcttaaggccaactaatattatgtgttaatatgaagatcagaaattattttttgcactttggcataaatacttttcaatatctgatttgttctctggataaattagcatagttatttttttattcacatttacatttctaagtagttgtatagtagaagcaggaagctcttattgcttatttggtcgtaatgaaaataatttgtaaaatgtcctttaaaagtttaatgatacttctgatgtttcggaacagtcatttcacctactatttctgaatatattttgcaaattgaattggaataggaattgatatagcagtcttaaacattagtagtgggatttggctatggtccagactgtgctccttatagagaatttgatctgctcagtgtgagcggtttgctgttagccagggctatttatggcaaacacatgcttttgtatcttgtcatagttatccacaaatggcaaaactggacttgattctactggtatgcaaaacaggcatgctagtaagcagtcagtcgtggctcagaacttaaccccatagctcagaggaatgcttttagcagaaaacaggaaagaaaatatcccttaaaaattttttttgaatgtgtggaagtaattttagtataattagattttttccatatttttgaaagatttttcagatgtgaacattaaaaatagggattaaatgtctaggcttccatttaaaattatatgaatggtttgggatctttttgcactgagcaattttatttcaggcttccagctgtccctgtgagttatcctggacatttcgatggtttttggtaaggccaaactctgataagcaaaacagagaatactgacgtatacttaaccatatgtgtaactgatacttggcaccatggaatttttcattgagttatttcctcattcttttaaaaaataagggactataaatcagttatgtagtatcttttgtttttgtagctgattccttaactttcttgtatgcctctagtaatttcagagattaaatattgctttaaactgtgatactttgatttgctagattgacaaaactgatactaatataattaagttcatctttgaaatacatctttgtgcgtagagccaaaaaaagagataaaattaataatagttcacttgttatttgagattaatttggcatttgaaatgatcattttattttacaatcatttataatgaatcaatgttccagttagctttaaaaggtatacggtgctaattagtaaaatattgaaggcaatattttactgctagcttgcaaagttatgagagtttaaaaaataaaatatatgaaaatatgta

SEQ ID NO: 441543 - DNA, 3027 bp, Homo sapiens
cgctgcctgggcccgccgagccccgccacctccctcgggctgcagctcccggcgtgccccgcactctccgctgcccacccgctcgcccgcccctccttctcctcccagtgccacagagccgaagcccgagctgccgccgcagccacagccgagggcactatggcttctggagttacagtgaatgatgaagtcatcaaagtttttaatgatatgaaagtaaggaaatcttctacacaagaggagatcaaaaagagaaagaaagcagttctcttctgtttaagcgatgacaaaagacaaataattgtagaggaagcaaagcagatcttggtgggtgacattggtgatactgtagaggacccctacacatcttttgtgaagttgctacctctgaatgattgccgatatgctttgtacgatgccacatacgaaacaaaagagtctaagaaagaagacctagtatttatattctgggctcctgaaagtgcacctttaaaaagcaagatgatttatgctagctctaaagatgccattaaaaagaaatttacaggtattaaacatgagtggcaagtaaatggcttggatgatattaaggaccgttcgacacttggagagaaattgggaggcaatgtagtagtttcacttgaaggaaaaccattataaaatgacagtcaagtgccatctggatcttaaggagcttccatttctccagctcagtccattggaatagtattaggttttggttttttgttgtatttccccctttccactgggcccttccaacacaatgaatgaaggaaatatcatttatttaagcagcctatcagtgattgccattagactgttgaatactgttacttttatatagaacccaaggaatgccttcctgtcatattttagccaaaacaactggttatatgcctcccttgcagcaagcactacaatgtatgtgatcgtcaatgtgaatagcttagaatactgcaaaggataagctaattgaatgccttgaaagtattatccactggtcagatggtcaacttttttcagtattatttatagttggcacttgattgcagttctgtgaggcttgagcattcatacacctcacctgccttggcaagcctattttagtgatatggcagcacggatataacactatgcattaaaagcactttttgtaataagtttaatatcctaaaaggaatgccaattaagttttgttaactgtgtcatcaacttatcctagtacctcagtgttcattcctgttacctgcatatcttcttaaaagaaatagctgttattaatgcctttttgttttccattgagtgtacactactgaataagtgtaggagttttatgtttaccatgtgagtcctgcaacactaaagatattttgaatatcagtcatgatggcaatttctgtataaaagagccttaaatggaacattgttttgagatcaaactccccaccctcacaaaaatggccacgttgcaataaaaattgtggcatattacagaacgttgccttgttttccttggaaattttgcaaaatgttatgtgaaacaacttctagggtaaaaacagctattactaatctctgcactggtcatttgagaattttttttgtacagcattcatgtgtgatattttccagatttgttggatctatttggtttaaaaagtattctatcttaaggccaactaatataaaataccattgttaaagaatggtacttttataaacattagtgtatttatttcctatgtgttaatatgaagatcagaaattattttttgcactttggcataaatacttttcaatatctgatttgttctctggataaattagcatagttatttttttattcacatttacatttctaagtagttgtatagtagaagcaggaagctcttattgcttatttggtcgtaatgaaaataatttgtaaaatgtcctttaaaagtttaatgatacttctgatgtttcggaacagtcatttcacctactatttctgaatatattttgcaaattgaattggaataggaattgatatagcagtcttaaacattagtagtgggatttggctatggtccagactgtgctccttatagagaatttgatctgctcagtgtgagcggtttgctgttagccagggctatttatggcaaacacatgcttttgtatcttgtcatagttatccacaaatggcaaaactggacttgattctactggtatgcaaaacaggcatgctagtaagcagtcagtcgtggctcagaacttaaccccatagctcagaggaatgcttttagcagaaaacaggaaagaaaatatcccttaaaaattttttttgaatgtgtggaagtaattttagtataattagattttttccatatttttgaaagatttttcagatgtgaacattaaaaatagggattaaatgtctaggcttccatttttccagctgtccctgtgagttatcctggacatttcgatggtttttggtaaggccaaactctgataagcaaaacagagaatactgacgtatacttaaccatatgtgtaactgatacttggcaccatggaatttttcattgagttatttcctcattcttttaaaaaataagggactataaatcagttatgtagtatcttttgtttttgtagctgattccttaactttcttgtatgcctctagtaatttcagagattaaatattgctttaaactgtgatactttgatttgctagattgacaaaactgatactaatataattaagttcatctttgaaatacatctttgtgcgtagagccaaaaaaagagataaaattaataatagttcacttgttatttgagattaatttggcatttgaaatgatcattttattttacaatcatttataatgaatcaatgttccagttagctttaaaaggtatacggtgctaattagtaaaatattgaaggcaatattttactgctagcttgcaaagttatgagagtttaaaaaataaaatatatgaaaatatgta

SEQ ID NO: 441544 - DNA, 3027 bp, Homo sapiens
cgctgcctgggcccgccgagccccgccacctccctcgggctgcagctcccggcgtgccccgcactctccgctgcccacccgctcgcccgcccctccttctcctcccagtgccacagagccgaagcccgagctgccgccgcagccacagccgagggcactatggcttctggagttacagtgaatgatgaagtcatcaaagtttttaatgatatgaaagtaaggaaatcttctacacaagaggagatcaaaaagagaaagaaagcagttctcttctgtttaagcgatgacaaaagacaaataattgtagaggaagcaaagcagatcttggtgggtgacattggtgatactgtagaggacccctacacatcttttgtgaagttgctacctctgaatgattgccgatatgctttgtacgatgccacatacgaaacaaaagagtctaagaaagaagacctagtatttatattctgggctcctgaaagtgcacctttaaaaagcaagatgatttatgctagctctaaagatgccattaaaaagaaatttacaggtattaaacatgagtggcaagtaaatggcttggatgatattaaggaccgttcgacacttggagagaaattgggaggcaatgtagtagtttcacttgaaggaaaaccattataaaatgacagtcaagtgccatctggatcttaaggagcttccatttctccagctcagtccattggaatagtattaggttttggttttttgttgtatttccccctttccactgggcccttccaacacaatgaatgaaggaaatatcatttatttaagcagcctatcagtgattgccattagactgttgaatactgttacttttatatagaacccaaggaatgccttcctgtcatattttagcctcaatgtgaatagcttagaatactgcaaaggataagctaattgaatgccttgaaagtattatccactggtcagatggtcaacttttttcagtattatttatagttggcacttgattgcagttctgtgaggcttgagcattcatacacctcacctgccttggcaagcctattttagtgatatggcagcacggatataacactatgcattaaaagcactttttgtaataagtttaatatcctaaaaggaatgccaattaagttttgttaactgtgtcatcaacttatcctagtacctcagtgttcattcctgttacctgcatatcttcttaaaagaaatagctgttattaatgcctttttgttttccattgagtgtacactactgaataagtgtaggagttttatgtttaccatgtgagtcctgcaacactaaagatattttgaatatcagtcatgatggcaatttctgtataaaagagccttaaatggaacattgttttgagatcaaactccccaccctcacaaaaatggccacgttgcaataaaaattgtggcatattacagaacgttgccttgttttccttggaaattttgcaaaatgttatgtgaaacaacttctagggtaaaaacagctattactaatctctgcactggtcatttgagaattttttttgtacagcattcatgtgtgatattttccagatttgttggatctatttggtttaaaaagtattctatcttaaggccaactaatataaaataccattgttaaagaatggtacttttataaacattagtgtatttatttcctatgtgttaatatgaagatcagaaattattttttgcactttggcataaatacttttcaatatctgatttgttctctggataaattagcatagttatttttttattcacatttacatttctaagtagttgtatagtagaagcaggaagctcttattgcttatttggtcgtaatgaaaataatttgtaaaatgtcctttaaaagtttaatgatacttctgatgtttcggaacagtcatttcacctactatttctgaatatattttgcaaattgaattggaataggaattgatatagcagtcttaaacattagtagtgggatttggctatggtccagactgtgctccttatagagaatttgatctgctcagtgtgagcggtttgctgttagccagggctatttatggcaaacacatgcttttgtatcttgtcatagttatccacaaatggcaaaactggacttgattctactggtatgcaaaacaggcatgctagtaagcagtcagtcgtggctcagaacttaaccccatagctcagaggaatgcttttagcagaaaacaggaaagaaaatatcccttaaaaattttttttgaatgtgtggaagtaattttagtataattagattttttccatatttttgaaagatttttcagatgtgaacattaaaaatagggattaaatgtctaggcttccatttaaaattatatgaatggtttgggatctttttgcactgagcaattttatttcaggcttccagctgtccctgtgagttatcctggacatttcgatggtttttggtaaggccaaactctgataagcaaaacagagaatactgacgtatacttaaccatatgtgtaactgatacttggcaccatggaatttttcattgagttatttcctcattcttttaaaaaataagggactataaatcagttatgtagtatcttttgtttttgtagctgattccttaactttcttgtatgcctctagtaatttcagagattaaatattgctttaaactgtgatactttgatttgctagattgacaaaactgatactaatataattaagttcatctttgaaatacatctttgtgcgtagagccaaaaaaagagataaaattaataatagttcacttgttatttgagattaatttggcatttgaaatgatcattttattttacaatcatttataatgaatcaatgttccagttagctttaaaaggtatacggtgctaattagtaaaatattgaaggcaatattttactgctagcttgcaaagttatgagagtttaaaaaataaaatatatgaaaatatgta

SEQ ID NO: 441545 - DNA, 2060 bp, Homo sapiens
cgctgcctgggcccgccgagccccgccacctccctcgggctgcagctcccggcgtgccccgcactctccgctgcccacccgctcgcccgcccctccttctcctcccagtgccacagagccgaagcccgagctgccgccgcagccacagccgagggcactatggcttctggagttacagtgaatgatgaagtcatcaaagtttttaatgatatgaaagtaaggaaatcttctacacaagaggagatcaaaaagagaaagaaagcagttctcttctgtttaagcgatgacaaaagacaaataattgtagaggaagcaaagcagatcttggtgggtgacattggtgatactgtagaggacccctacacatcttttgtgaagttgctacctctgaatgattgccgatatgctttgtacgatgccacatacgaaacaaaagagtctaagaaagaagacctagtatttatattctgggctcctgaaagtgcacctttaaaaagcaagatgatttatgctagctctaaagatgccattaaaaagaaatttacaggtattaaacatgagtggcaagtaaatggcttggatgatattaaggaccgttcgacacttggagagaaattgggaggcaatgtagtagtttcacttgaaggaaaaccattataaaatgacagtcaagtgccatctggatcttaaggagcttccatttctccagctcagtccattggaatagtattaggttttggttttttgttgtatttccccctttccactgggcccttccaacacaatgaatgaaggaaatatcatttatttaagcagcctatcagtgattgccattagactgttgaatactgttacttttatatagaacccaaggaatgccttcctgtcatattttagccaaaacaactggttatatgcctcccttgcagcaagcactacaatgtatgtgatcgtcaatgtgaatagcttagaatactgcaaaggataagctaattgaatgccttgaaagtattatccactggtcagatggtcaacttttttcagtattatttatagttggcacttgattgcagttctgtgaggcttgagcattcatacacctcacctgccttggcaagcctattttagtgatatggcagcacggatataacactatgcattaaaagcactttttgtaataagtttaatatcctaaaaggaatgccaattaagttttgttaactgtgtcatcaacttatcctagtacctcagtgttcattcctgttacctgcatatcttcttaaaagaaatagctgttattaatgcctttttgttttccattgagtgtacactactgaataagtgtaggagttttatgtttaccatgtgagtcctgcaacactaaagatattttgaatatcagtcatgatggcaatttctgtataaaagagccttaaatggaacattgttttgagatcaaactccccaccctcacaaaaatggccacgttgcaataaaaattgtggcatattacagaacgttgccttgttttccttggaaattttgcaaaatgttatgtgaaacaacttctagggtaaaaacagctattactaatctctgcactggtcatttgagaattttttttgtacagcattcatgtgtgatattttccagatttgttggatctatttggtttaaaaagtattctatcttaaggccaactaatataaaataccattgttaaagaatggtacttttataaacattagtgtatttatttcctatgtgttaatatgaagatcagaaattattttttgcactttggcataaatacttttcaatatctgatttgttctctggataaattagcatagttatttttttattcacatttacatttctaagtagttgtatagtagaagcaggaagctcttattgcttatttggtcgtaatgcattaaactttaaagacattttacaatgaatggatatgaattgatatagcgtcttaacaatagtaggggatttgctattgtcaaactggctcttataaagaattgacttgtaagggagcggttgtg

SEQ ID NO: 441546 - DNA, 2976 bp, Homo sapiens
aaccgtaggccgaggtgccttatggtgctactggtagattatagttgtacgtgatgccaggcccgtcaaccagcgatgcaatggatcatggcaaggtgcaggaatattttcgtattgacagagagtaggatccagcgtgattagcgagctgcgagtttcatcttctagtaggagcgcgatgacaaaagacaaataattgtagaggaagcaaagcagatcttggtgggtgacattggtgatactgtagaggacccctacacatcttttgtgaagttgctacctctgaatgattgccgatatgctttgtacgatgccacatacgaaacaaaagagtctaagaaagaagacctagtatttatattctgggctcctgaaagtgcacctttaaaaagcaagatgatttatgctagctctaaagatgccattaaaaagaaatttacaggtattaaacatgagtggcaagtaaatggcttggatgatattaaggaccgttcgacacttggagagaaattgggaggcaatgtagtagtttcacttgaaggaaaaccattataaaatgacagtcaagtgccatctggatcttaaggagcttccatttctccagctcagtccattggaatagtattaggttttggttttttgttgtatttccccctttccactgggcccttccaacacaatgaatgaaggaaatatcatttatttaagcagcctatcagtgattgccattagactgttgaatactgttacttttatatagaacccaaggaatgccttcctgtcatattttagccaaaacaactggttatatgcctcccttgcagcaagcactacaatgtatgtgatcgtcaatgtgaatagcttagaatactgcaaaggataagctaattgaatgccttgaaagtattatccactggtcagatggtcaacttttttcagtattatttatagttggcacttgattgcagttctgtgaggcttgagcattcatacacctcacctgccttggcaagcctattttagtgatatggcagcacggatataacactatgcattaaaagcactttttgtaataagtttaatatcctaaaaggaatgccaattaagttttgttaactgtgtcatcaacttatcctagtacctcagtgttcattcctgttacctgcatatcttcttaaaagaaatagctgttattaatgcctttttgttttccattgagtgtacactactgaataagtgtaggagttttatgtttaccatgtgagtcctgcaacactaaagatattttgaatatcagtcatgatggcaatttctgtataaaagagccttaaatggaacattgttttgagatcaaactccccaccctcacaaaaatggccacgttgcaataaaaattgtggcatattacagaacgttgccttgttttccttggaaattttgcaaaatgttatgtgaaacaacttctagggtaaaaacagctattactaatctctgcactggtcatttgagaattttttttgtacagcattcatgtgtgatattttccagatttgttggatctatttggtttaaaaagtattctatcttaaggccaactaatataaaataccattgttaaagaatggtacttttataaacattagtgtatttatttcctatgtgttaatatgaagatcagaaattattttttgcactttggcataaatacttttcaatatctgatttgttctctggataaattagcatagttatttttttattcacatttacatttctaagtagttgtatagtagaagcaggaagctcttattgcttatttggtcgtaatgaaaataatttgtaaaatgtcctttaaaagtttaatgatacttctgatgtttcggaacagtcatttcacctactatttctgaatatattttgcaaattgaattggaataggaattgatatagcagtcttaaacattagtagtgggatttggctatggtccagactgtgctccttatagagaatttgatctgctcagtgtgagcggtttgctgttagccagggctatttatggcaaacacatgcttttgtatcttgtcatagttatccacaaatggcaaaactggacttgattctactggtatgcaaaacaggcatgctagtaagcagtcagtcgtggctcagaacttaaccccatagctcagaggaatgcttttagcagaaaacaggaaagaaaatatcccttaaaaattttttttgaatgtgtggaagtaattttagtataattagattttttccatatttttgaaagatttttcagatgtgaacattaaaaatagggattaaatgtctaggcttccatttaaaattatatgaatggtttgggatctttttgcactgagcaattttatttcaggcttccagctgtccctgtgagttatcctggacatttcgatggtttttggtaaggccaaactctgataagcaaaacagagaatactgacgtatacttaaccatatgtgtaactgatacttggcaccatggaatttttcattgagttatttcctcattcttttaaaaaataagggactataaatcagttatgtagtatcttttgtttttgtagctgattccttaactttcttgtatgcctctagtaatttcagagattaaatattgctttaaactgtgatactttgatttgctagattgacaaaactgatactaatataattaagttcatctttgaaatacatctttgtgcgtagagccaaaaaaagagataaaattaataatagttcacttgttatttgagattaatttggcatttgaaatgatcattttattttacaatcatttataatgaatcaatgttccagttagctttaaaaggtatacggtgctaattagtaaaatattgaaggcaatattttactgctagcttgcaaagttatgagagtttaaaaaataaaatatatgaaaatatgta

SEQ ID NO: 441547 - DNA, 1512 bp, Homo sapiens
cgctgcctgggcccgccgagccccgccacctccctcgggctgcagctcccggcgtgccccgcactctccgctgcccacccgctcgcccgcccctccttctcctcccagtgccacagagccgaagcccgagctgccgccgcagccacagccgagggcactatggcttctggagttacagtgaatgatgaagtcatcaaagtttttaatgatatgaaagtaaggaaatcttctacacaagaggagatcaaaaagagaaagaaagcagttctcttctgtttaagcgatgacaaaagacaaataattgtagaggaagcaaagcagatcttggtgggtgacattggtgatactgtagaggacccctacacatcttttgtgaagttgctacctctgaatgattgccgatatgctttgtacgatgccacatacgaaacaaaagagtctaagaaagaagacctagtatttatattctgggctcctgaaagtgcacctttaaaaagcaagatgatttatgctagctctaaagatgccattaaaaagaaatttacaggtattaaacatgagtggcaagtaaatggcttggatgatattaaggaccgttcgacacttggagagaaattgggaggcaatgtagtagtttcacttgaaggaaaaccattataaaatgacagtcaagtgccatctggatcttaaggagcttccatttctccagctcagtccattggaatagtattaggttttggttttttgttgtatttccccctttccactgggcccttccaacacaatgaatgaaggaaatatcatttatttaagcagcctatcagtgattgccattagactgttgaatactgttacttttatatagaacccaaggaatgccttcctgtcatattttagccaaaacaactggttatatgcctcccttgcagcaagcactacaatgtatgtgatcgtcaatgtgaatagcttagaatactgcaaaggataagctaattgaatgccttgaaagtattatccactggtcagatggtcaacttttttcagtattatttatagttggcacttgattgcagttctgtgaggcttgagcattcatacacctcacctgccttggcaagcctattttagtgatatggcagcacggatataacactatgcattaaaagcactttttgtaataagtttaatatcctaaaaggaatgccaattaagttttgttaactgtgtcatcaacttatcctagtacctcagtgttcattcctgttacctgcatatcttcttaaaagaaatagctgttattaatgcctttttgttttccattgagtgtacactactgaataagtgtaggagttttatgtttaccatgtgagtcctgcaacactaaagatattttgaatatcagtcatgatggcaatttctgtataaaagagccttaaatggaacattgttttgagatcaaactccccaccctcacaaaaatggccacgttgcaataaaaattgtggcatatta

SEQ ID NO: 441548 - DNA, 2937 bp, Homo sapiens
cgctgcctgggcccgccgagccccgccacctccctcgggctgcagctcccggcgtgccccgcactctccgctgcccacccgctcgcccgcccctccttctcctcccagtgccacagagccgaagcccgagctgccgccgcagccacagccgagggcactatggcttctggagttacagtgaatgatgaagtcatcaaagtttttaatgatatgaaagtaaggaaatcttctacacaagaggagatcaaaaagagaaagaaagcagttctcttctgtttaagcgatgacaaaagacaaataattgtagaggaagcaaagcagatcttggctcctgaaagtgcacctttaaaaagcaagatgatttatgctagctctaaagatgccattaaaaagaaatttacaggtattaaacatgagtggcaagtaaatggcttggatgatattaaggaccgttcgacacttggagagaaattgggaggcaatgtagtagtttcacttgaaggaaaaccattataaaatgacagtcaagtgccatctggatcttaaggagcttccatttctccagctcagtccattggaatagtattaggttttggttttttgttgtatttccccctttccactgggcccttccaacacaatgaatgaaggaaatatcatttatttaagcagcctatcagtgattgccattagactgttgaatactgttacttttatatagaacccaaggaatgccttcctgtcatattttagccaaaacaactggttatatgcctcccttgcagcaagcactacaatgtatgtgatcgtcaatgtgaatagcttagaatactgcaaaggataagctaattgaatgccttgaaagtattatccactggtcagatggtcaacttttttcagtattatttatagttggcacttgattgcagttctgtgaggcttgagcattcatacacctcacctgccttggcaagcctattttagtgatatggcagcacggatataacactatgcattaaaagcactttttgtaataagtttaatatcctaaaaggaatgccaattaagttttgttaactgtgtcatcaacttatcctagtacctcagtgttcattcctgttacctgcatatcttcttaaaagaaatagctgttattaatgcctttttgttttccattgagtgtacactactgaataagtgtaggagttttatgtttaccatgtgagtcctgcaacactaaagatattttgaatatcagtcatgatggcaatttctgtataaaagagccttaaatggaacattgttttgagatcaaactccccaccctcacaaaaatggccacgttgcaataaaaattgtggcatattacagaacgttgccttgttttccttggaaattttgcaaaatgttatgtgaaacaacttctagggtaaaaacagctattactaatctctgcactggtcatttgagaattttttttgtacagcattcatgtgtgatattttccagatttgttggatctatttggtttaaaaagtattctatcttaaggccaactaatataaaataccattgttaaagaatggtacttttataaacattagtgtatttatttcctatgtgttaatatgaagatcagaaattattttttgcactttggcataaatacttttcaatatctgatttgttctctggataaattagcatagttatttttttattcacatttacatttctaagtagttgtatagtagaagcaggaagctcttattgcttatttggtcgtaatgaaaataatttgtaaaatgtcctttaaaagtttaatgatacttctgatgtttcggaacagtcatttcacctactatttctgaatatattttgcaaattgaattggaataggaattgatatagcagtcttaaacattagtagtgggatttggctatggtccagactgtgctccttatagagaatttgatctgctcagtgtgagcggtttgctgttagccagggctatttatggcaaacacatgcttttgtatcttgtcatagttatccacaaatggcaaaactggacttgattctactggtatgcaaaacaggcatgctagtaagcagtcagtcgtggctcagaacttaaccccatagctcagaggaatgcttttagcagaaaacaggaaagaaaatatcccttaaaaattttttttgaatgtgtggaagtaattttagtataattagattttttccatatttttgaaagatttttcagatgtgaacattaaaaatagggattaaatgtctaggcttccatttaaaattatatgaatggtttgggatctttttgcactgagcaattttatttcaggcttccagctgtccctgtgagttatcctggacatttcgatggtttttggtaaggccaaactctgataagcaaaacagagaatactgacgtatacttaaccatatgtgtaactgatacttggcaccatggaatttttcattgagttatttcctcattcttttaaaaaataagggactataaatcagttatgtagtatcttttgtttttgtagctgattccttaactttcttgtatgcctctagtaatttcagagattaaatattgctttaaactgtgatactttgatttgctagattgacaaaactgatactaatataattaagttcatctttgaaatacatctttgtgcgtagagccaaaaaaagagataaaattaataatagttcacttgttatttgagattaatttggcatttgaaatgatcattttattttacaatcatttataatgaatcaatgttccagttagctttaaaaggtatacggtgctaattagtaaaatattgaaggcaatattttactgctagcttgcaaagttatgagagtttaaaaaataaaatatatgaaaatatgta

SEQ ID NO: 441549 - DNA, 3081 bp, Homo sapiens
cgctgcctgggcccgccgagccccgccacctccctcgggctgcagctcccggcgtgccccgcactctccgctgcccacccgctcgcccgcccctccttctcctcccagtgccacagagccgaagcccgagctgccgccgcagccacagccgagggcactatggcttctggagttacagtgaatgatgaagtcatcaaagtttttaatgatatgaaagtaaggaaatcttctacacaagaggagatcaaaaagagaaagaaagcagttctcttctgtttaagcgatgacaaaagacaaataattgtagaggaagcaaagcagatcttggtgggtgacattggtgatactgtagaggacccctacacatcttttgtgaagttgctacctctgaatgattgccgatatgctttgtacgatgccacatacgaaacaaaagagtctaagaaagaagacctagtatttatattctgggctcctgaaagtgcacctttaaaaagcaagatgatttatgctagctctaaagatgccattaaaaagaaatttacaggtattaaacatgagtggcaagtaaatggcttggatgatattaaggaccgttcgacacttggagagaaattgggaggcaatgtagtagtttcacttgaaggaaaaccattataaaatgacagtcaagtgccatctggatcttaaggagcttccatttctccagctcagtccattggaatagtattaggttttggttttttgttgtatttccccctttccactgggcccttccaacacaatgaatgaaggaaatatcatttatttaagcagcctatcagtgattgccattagactgttgaatactgttacttttatatagaacccaaggaatgccttcctgtcatattttagccaaaacaactggttatatgcctcccttgcagcaagcactacaatgtatgtgatcgtcaatgtgaatagcttagaatactgcaaaggataagctaattgaatgccttgaaagtattatccactggtcagatggtcaacttttttcagtattatttatagttggcacttgattgcagttctgtgaggcttgagcattcatacacctcacctgccttggcaagcctattttagtgatatggcagcacggatataacactatgcattaaaagcactttttgtaataagtttaatatcctaaaaggaatgccaattaagttttgttaactgtgtcatcaacttatcctagtacctcagtgttcattcctgttacctgcatatcttcttaaaagaaatagctgttattaatgcctttttgttttccattgagtgtacactactgaataagtgtaggagttttatgtttaccatgtgagtcctgcaacactaaagatattttgaatatcagtcatgatggcaatttctgtataaaagagccttaaatggaacattgttttgagatcaaactccccaccctcacaaaaatggccacgttgcaataaaaattgtggcatattacagaacgttgccttgttttccttggaaattttgcaaaatgttatgtgaaacaacttctagggtaaaaacagctattactaatctctgcactggtcatttgagaattttttttgtacagcattcatgtgtgatattttccagatttgttggatctatttggtttaaaaagtattctatcttaaggccaactaatataaaataccattgttaaagaatggtacttttataaacattagtgtatttatttcctatgtgttaatatgaagatcagaaattattttttgcactttggcataaatacttttcaatatctgatttgttctctggataaattagcatagttatttttttattcacatttacatttctaagtagttgtatagtagaagcaggaagctcttattgcttatttggtcgtaatgaaaataatttgtaaaatgtcctttaaaagtttaatgatacttctgatgtttcggaacagtcatttcacctactatttctgaatatattttgcaaattgaattggaataggaattgatatagcagtcttaaacattagtagtgggatttggctatggtccagactgtgctccttatagagaatttgatctgctcagtgtgagcggtttgctgttagccagggctatttatggcaaacacatgcttttgtatcttgtcatagttatccacaaatggcaaaactggacttgattctactggtatgcaaaacaggcatgctagtaagcagtcagtcgtggctcagaacttaaccccatagctcagaggaatgcttttagcagaaaacaggaaagaaaatatcccttaaaaattttttttgaatgtgtggaagtaattttagtataattagattttttccatatttttgaaagatttttcagatgtgaacattaaaaatagggattaaatgtctaggcttccatttaaaattatatgaatggtttgggatctttttgcactgagcaattttatttcaggcttccagctgtccctgtgagttatcctggacatttcgatggtttttggtaaggccaaactctgataagcaaaacagagaatactgacgtatacttaaccatatgtgtaactgatacttggcaccatggaatttttcattgagttatttcctcattcttttaaaaaataagggactataaatcagttatgtagtatcttttgtttttgtagctgattccttaactttcttgtatgcctctagtaatttcagagattaaatattgctttaaactgtgatactttgatttgctagattgacaaaactgatactaatataattaagttcatctttgaaatacatctttgtgcgtagagccaaaaaaagagataaaattaataatagttcacttgttatttgagattaatttggcatttgaaatgatcattttattttacaatcatttataatgaatcaatgttccagttagctttaaaaggtatacggtgctaattagtaaaatattgaaggcaatattttactgctagcttgcaaagttatgagagtttaaaaaataaaatatatgaaaatatgta

SEQ ID NO: 441550 - DNA, 947 bp, Homo sapiens
cgctgcctgggcccgccgagccccgccacctccctcgggctgcagctcccggcgtgccccgcactctccgctgcccacccgctcgcccgcccctccttctcctcccagtgccacagagccgaagcccgagctgccgccgcagccacagccgagggcactatggcttctggagttacagtgaatgatgaagtcatcaaagtttttaatgatatgaaagtaaggaaggctcctgaaagtgcacctttaaaaagcaagatgatttatgctagctctaaagatgccattaaaaagaaatttacaggtattaaacatgagtggcaagtaaatggcttggatgatattaaggaccgttcgacacttggagagaaattgggaggcaatgtagtagtttcacttgaaggaaaaccattataaaatgacagtcaagtgccatctggatcttaaggagcttccatttctccagctcagtccattggaatagtattaggttttggttttttgttgtatttccccctttccactgggcccttccaacacaatgaatgaaggaaatatcatttatttaagcagcctatcagtgattgccattagactgttgaatactgttacttttatatagaacccaaggaatgccttcctgtcatattttagccaaaacaactggttatatgcctcccttgcagcaagcactacaatgtatgtgatcgtcaatgtgaatagcttagaatactgcaaaggataagctaattgaatgccttgaaagtattatccactggtcagatggtcaacttttttcagtattatttatagttggcacttgattgcagttctgtgaggcttgagcattcatacacctcacctgccttggcaagcctattttagtgatatggcagcacggatataacactatgcattaaaagcactttttgtaataagtttaatatcct

SEQ ID NO: 441551 - DNA, 3140 bp, Homo sapiens
cgctgcctgggcccgccgagccccgccacctccctcgggctgcagctcccggcgtgccccgcactctccgctgcccacccgctcgcccgcccctccttctcctcccagtgccacagagccgaagcccgagctgccgccgcagccacagccgagggcactatggcttctggagttacagtgaatgatgaagtcatcaaagtttttaatgatatgaaagtaaggaaatcttctacacaagaggagatcaaaaagagaaagaaagcagttctcttctgtttaagcgatgacaaaagacaaataattgtagaggaagcaaagcagatcttggtgggtgacattggtgatactgtagaggacccctacacatcttttgtgaagttgctacctctgaatgattgccgatatgctttgtacgatgccacatacgaaacaaaagagtctaagaaagaagacctagtatttatattctgggctcctgaaagtgcacctttaaaaagcaagatgatttatgctagctctaaagatgccattaaaaagaaatttacaggtattaaacatgagtggcaagtaaatggcttggatgatattaaggaccgttcgacacttggagagaaattgggaggcaatgtagtagtttcacttgaaggaaaaccattataaaatgacagtcaagtgccatctggatcttaaggagcttccatttctccagctcagtccattggaatagtattaggttttggttttttgttgtatttccccctttccactgggcccttccaacacaatgaatgaaggaaatatcatttatttaagcagcctatcagtgattgccattagactgttgaatactgttacttttatatagaacccaaggaatgccttcctgtcatattttagccaaaacaactggttatatgcctcccttgcagcaagcactacaatgtatgtgatcgtcaatgtgaatagcttagaatactgcaaaggataagctaattgaatgccttgaaagtattatccactggtcagatggtcaacttttttcagtattatttatagttggcacttgattgcagttctgtgaggcttgagcattcatacacctcacctgccttggcaagcctattttagtgatatggcagcacggatataacactatgcattaaaagcactttttgtaataagtttaatatcctaaaaggaatgccaattaagttttgttaactgtgtcatcaacttatcctagtacctcagtgttcattcctgttacctgcatatcttcttaaaagaaatagctgttattaatgcctttttgttttccattgagtgtacactactgaataagtgtaggagttttatgtttaccatgtgagtcctgcaacactaaagatattttgaatatcagtcatgatggcaatttctgtataaaagagccttaaatggaacattgttttgagatcaaactccccaccctcacaaaaatggccacgttgcaataaaaattgtggcatattacagaacgttgccttgttttccttggaaattttgcaaaatgttatgtgaaacaacttctagggtaaaaacagctattactaatctctgcactggtcatttgagaattttttttgtacagcattcatgtgtgatattttccagatttgttggatctatttggtttaaaaagtattctatcttaaggccaactaatataaaataccattgttaaagaatggtacttttataaacattagtgtatttatttcctatgtgttaatatgaagatcagaaattattttttgcactttggcataaatacttttcaatatctgatttgttctctggataaattagcatagttatttttttattcacatttacatttctaagtagttgtatagtagaagcaggaagctcttattgcttatttggtcgtaatgaaaataatttgtaaaatgtcctttaaaagtttaatgatacttctgatgtttcggaacagtcatttcacctactatttctgaatatattttgcaaattgaattggaataggaattgatatagcagtcttaaacattagtagtgggatttggctatggtccagactgtgctccttatagagaatttgatctgctcagtgtgagcggtttgctgttagccagggctatttatggcaaacacatgcttttgtatcttgtcatagttatccacaaatggcaaaactggacttgattctactggtatgcaaaacaggcatgctagtaagcagtcagtcgtggctcagaacttaaccccatagctcagaggaatgcttttagcagaaaacaggaaagaaaatatcccttaaaaattttttttgaatgtgtggaagtaattttagtataattagattttttccatatttttgaaagatttttcagatgtgaacattaaaaatagggattaaatgtctaggcttccatttaaaattatatgaatggtttgggatctttttgcactgagcaattttatttcaggcttccagctgtccctgtgagttatcctggacatttcgatggtttttggtaaggccaaactctgataagcaaaacagagaatactgacgtatacttaaccatatgtgtaactgatacttggcaccatggaatttttcattgagttatttcctcattcttttaaaaaataagggactataaatcagttatgtagtatcttttgtttttgtagctgattccttaactttcttgtatgcctctagtaatttcagagattaaatattgctttaaactgtgatactttgatttgctagattgacaaaactgatactaatataattaagttcatctttgaaatacatctttgtgcgtagagccaaaaaaagagataaaattaataatagttcacttgttatttgagattaatttggcatttgaaatgatcattttattttacaatcatttataatgaatcaatgttccagttagctttaaaaggtatacggtgctaattagtaaaatattgaaggcaatattttactgctagcttgcaaagttatgagagtttaaaaaataaaatatatgaaaatatgtaaagctgttgagatgtgtttacttatacttcagaacattaaaagtttaaaaactggtatt

SEQ ID NO: 441552 - DNA, 3184 bp, Homo sapiens
cgctgcctgggcccgccgagccccgccacctccctcgggctgcagctcccggcgtgccccgcactctccgctgcccacccgctcgcccgcccctccttctcctcccagtgccacagagccgaagcccgagctgccgccgcagccacagccgagggcactatggtaagacgagcgcgctggccgggaggccgcggcgaggcgagaaaagccccccgcacggccccgggagtgaggccgccattttaacctgattttggcctccaaggcttctggagttacagtgaatgatgaagtcatcaaagtttttaatgatatgaaagtaaggaaatcttctacacaagaggagatcaaaaagagaaagaaagcagttctcttctgtttaagcgatgacaaaagacaaataattgtagaggaagcaaagcagatcttggtgggtgacattggtgatactgtagaggacccctacacatcttttgtgaagttgctacctctgaatgattgccgatatgctttgtacgatgccacatacgaaacaaaagagtctaagaaagaagacctagtatttatattctgggctcctgaaagtgcacctttaaaaagcaagatgatttatgctagctctaaagatgccattaaaaagaaatttacaggtattaaacatgagtggcaagtaaatggcttggatgatattaaggaccgttcgacacttggagagaaattgggaggcaatgtagtagtttcacttgaaggaaaaccattataaaatgacagtcaagtgccatctggatcttaaggagcttccatttctccagctcagtccattggaatagtattaggttttggttttttgttgtatttccccctttccactgggcccttccaacacaatgaatgaaggaaatatcatttatttaagcagcctatcagtgattgccattagactgttgaatactgttacttttatatagaacccaaggaatgccttcctgtcatattttagccaaaacaactggttatatgcctcccttgcagcaagcactacaatgtatgtgatcgtcaatgtgaatagcttagaatactgcaaaggataagctaattgaatgccttgaaagtattatccactggtcagatggtcaacttttttcagtattatttatagttggcacttgattgcagttctgtgaggcttgagcattcatacacctcacctgccttggcaagcctattttagtgatatggcagcacggatataacactatgcattaaaagcactttttgtaataagtttaatatcctaaaaggaatgccaattaagttttgttaactgtgtcatcaacttatcctagtacctcagtgttcattcctgttacctgcatatcttcttaaaagaaatagctgttattaatgcctttttgttttccattgagtgtacactactgaataagtgtaggagttttatgtttaccatgtgagtcctgcaacactaaagatattttgaatatcagtcatgatggcaatttctgtataaaagagccttaaatggaacattgttttgagatcaaactccccaccctcacaaaaatggccacgttgcaataaaaattgtggcatattacagaacgttgccttgttttccttggaaattttgcaaaatgttatgtgaaacaacttctagggtaaaaacagctattactaatctctgcactggtcatttgagaattttttttgtacagcattcatgtgtgatattttccagatttgttggatctatttggtttaaaaagtattctatcttaaggccaactaatataaaataccattgttaaagaatggtacttttataaacattagtgtatttatttcctatgtgttaatatgaagatcagaaattattttttgcactttggcataaatacttttcaatatctgatttgttctctggataaattagcatagttatttttttattcacatttacatttctaagtagttgtatagtagaagcaggaagctcttattgcttatttggtcgtaatgaaaataatttgtaaaatgtcctttaaaagtttaatgatacttctgatgtttcggaacagtcatttcacctactatttctgaatatattttgcaaattgaattggaataggaattgatatagcagtcttaaacattagtagtgggatttggctatggtccagactgtgctccttatagagaatttgatctgctcagtgtgagcggtttgctgttagccagggctatttatggcaaacacatgcttttgtatcttgtcatagttatccacaaatggcaaaactggacttgattctactggtatgcaaaacaggcatgctagtaagcagtcagtcgtggctcagaacttaaccccatagctcagaggaatgcttttagcagaaaacaggaaagaaaatatcccttaaaaattttttttgaatgtgtggaagtaattttagtataattagattttttccatatttttgaaagatttttcagatgtgaacattaaaaatagggattaaatgtctaggcttccatttaaaattatatgaatggtttgggatctttttgcactgagcaattttatttcaggcttccagctgtccctgtgagttatcctggacatttcgatggtttttggtaaggccaaactctgataagcaaaacagagaatactgacgtatacttaaccatatgtgtaactgatacttggcaccatggaatttttcattgagttatttcctcattcttttaaaaaataagggactataaatcagttatgtagtatcttttgtttttgtagctgattccttaactttcttgtatgcctctagtaatttcagagattaaatattgctttaaactgtgatactttgatttgctagattgacaaaactgatactaatataattaagttcatctttgaaatacatctttgtgcgtagagccaaaaaaagagataaaattaataatagttcacttgttatttgagattaatttggcatttgaaatgatcattttattttacaatcatttataatgaatcaatgttccagttagctttaaaaggtatacggtgctaattagtaaaatattgaaggcaatattttactgctagcttgcaaagttatgagagtttaaaaaataaaatatatgaaaatatgta

SEQ ID NO: 441553 - DNA, 2889 bp, Homo sapiens
gtaggctgttctagaggatcccaatcagttacatcttctacacaagaggagatcaaaaagagaaagaaagcagttctcttctgtttaagcgatgacaaaagacaaataattgtagaggaagcaaagcagatcttggtgggtgacattggtgatactgtagaggacccctacacatcttttgtgaagttgctacctctgaatgattgccgatatgctttgtacgatgccacatacgaaacaaaagagtctaagaaagaagacctagtatttatattctgggctcctgaaagtgcacctttaaaaagcaagatgatttatgctagctctaaagatgccattaaaaagaaatttacaggtattaaacatgagtggcaagtaaatggcttggatgatattaaggaccgttcgacacttggagagaaattgggaggcaatgtagtagtttcacttgaaggaaaaccattataaaatgacagtcaagtgccatctggatcttaaggagcttccatttctccagctcagtccattggaatagtattaggttttggttttttgttgtatttccccctttccactgggcccttccaacacaatgaatgaaggaaatatcatttatttaagcagcctatcagtgattgccattagactgttgaatactgttacttttatatagaacccaaggaatgccttcctgtcatattttagccaaaacaactggttatatgcctcccttgcagcaagcactacaatgtatgtgatcgtcaatgtgaatagcttagaatactgcaaaggataagctaattgaatgccttgaaagtattatccactggtcagatggtcaacttttttcagtattatttatagttggcacttgattgcagttctgtgaggcttgagcattcatacacctcacctgccttggcaagcctattttagtgatatggcagcacggatataacactatgcattaaaagcactttttgtaataagtttaatatcctaaaaggaatgccaattaagttttgttaactgtgtcatcaacttatcctagtacctcagtgttcattcctgttacctgcatatcttcttaaaagaaatagctgttattaatgcctttttgttttccattgagtgtacactactgaataagtgtaggagttttatgtttaccatgtgagtcctgcaacactaaagatattttgaatatcagtcatgatggcaatttctgtataaaagagccttaaatggaacattgttttgagatcaaactccccaccctcacaaaaatggccacgttgcaataaaaattgtggcatattacagaacgttgccttgttttccttggaaattttgcaaaatgttatgtgaaacaacttctagggtaaaaacagctattactaatctctgcactggtcatttgagaattttttttgtacagcattcatgtgtgatattttccagatttgttggatctatttggtttaaaaagtattctatcttaaggccaactaatataaaataccattgttaaagaatggtacttttataaacattagtgtatttatttcctatgtgttaatatgaagatcagaaattattttttgcactttggcataaatacttttcaatatctgatttgttctctggataaattagcatagttatttttttattcacatttacatttctaagtagttgtatagtagaagcaggaagctcttattgcttatttggtcgtaatgaaaataatttgtaaaatgtcctttaaaagtttaatgatacttctgatgtttcggaacagtcatttcacctactatttctgaatatattttgcaaattgaattggaataggaattgatatagcagtcttaaacattagtagtgggatttggctatggtccagactgtgctccttatagagaatttgatctgctcagtgtgagcggtttgctgttagccagggctatttatggcaaacacatgcttttgtatcttgtcatagttatccacaaatggcaaaactggacttgattctactggtatgcaaaacaggcatgctagtaagcagtcagtcgtggctcagaacttaaccccatagctcagaggaatgcttttagcagaaaacaggaaagaaaatatcccttaaaaattttttttgaatgtgtggaagtaattttagtataattagattttttccatatttttgaaagatttttcagatgtgaacattaaaaatagggattaaatgtctaggcttccatttaaaattatatgaatggtttgggatctttttgcactgagcaattttatttcaggcttccagctgtccctgtgagttatcctggacatttcgatggtttttggtaaggccaaactctgataagcaaaacagagaatactgacgtatacttaaccatatgtgtaactgatacttggcaccatggaatttttcattgagttatttcctcattcttttaaaaaataagggactataaatcagttatgtagtatcttttgtttttgtagctgattccttaactttcttgtatgcctctagtaatttcagagattaaatattgctttaaactgtgatactttgatttgctagattgacaaaactgatactaatataattaagttcatctttgaaatacatctttgtgcgtagagccaaaaaaagagataaaattaataatagttcacttgttatttgagattaatttggcatttgaaatgatcattttattttacaatcatttataatgaatcaatgttccagttagctttaaaaggtatacggtgctaattagtaaaatattgaaggcaatattttactgctagcttgcaaagttatgagagtttaaaaaataaaatatatgaaaatatgta

SEQ ID NO: 441554 - DNA, 2835 bp, Homo sapiens
cgctgcctgggcccgccgagccccgccacctccctcgggctgcagctcccggcgtgccccgcactctccgctgcccacccgctcgcccgcccctccttctcctcccagtgccacagagccgaagcccgagctgccgccgcagccacagccgagggcactatggcttctggagttacagtgaatgatgaagtcatcaaagtttttaatgatatgaaagtaaggaaggctcctgaaagtgcacctttaaaaagcaagatgatttatgctagctctaaagatgccattaaaaagaaatttacaggtattaaacatgagtggcaagtaaatggcttggatgatattaaggaccgttcgacacttggagagaaattgggaggcaatgtagtagtttcacttgaaggaaaaccattataaaatgacagtcaagtgccatctggatcttaaggagcttccatttctccagctcagtccattggaatagtattaggttttggttttttgttgtatttccccctttccactgggcccttccaacacaatgaatgaaggaaatatcatttatttaagcagcctatcagtgattgccattagactgttgaatactgttacttttatatagaacccaaggaatgccttcctgtcatattttagccaaaacaactggttatatgcctcccttgcagcaagcactacaatgtatgtgatcgtcaatgtgaatagcttagaatactgcaaaggataagctaattgaatgccttgaaagtattatccactggtcagatggtcaacttttttcagtattatttatagttggcacttgattgcagttctgtgaggcttgagcattcatacacctcacctgccttggcaagcctattttagtgatatggcagcacggatataacactatgcattaaaagcactttttgtaataagtttaatatcctaaaaggaatgccaattaagttttgttaactgtgtcatcaacttatcctagtacctcagtgttcattcctgttacctgcatatcttcttaaaagaaatagctgttattaatgcctttttgttttccattgagtgtacactactgaataagtgtaggagttttatgtttaccatgtgagtcctgcaacactaaagatattttgaatatcagtcatgatggcaatttctgtataaaagagccttaaatggaacattgttttgagatcaaactccccaccctcacaaaaatggccacgttgcaataaaaattgtggcatattacagaacgttgccttgttttccttggaaattttgcaaaatgttatgtgaaacaacttctagggtaaaaacagctattactaatctctgcactggtcatttgagaattttttttgtacagcattcatgtgtgatattttccagatttgttggatctatttggtttaaaaagtattctatcttaaggccaactaatataaaataccattgttaaagaatggtacttttataaacattagtgtatttatttcctatgtgttaatatgaagatcagaaattattttttgcactttggcataaatacttttcaatatctgatttgttctctggataaattagcatagttatttttttattcacatttacatttctaagtagttgtatagtagaagcaggaagctcttattgcttatttggtcgtaatgaaaataatttgtaaaatgtcctttaaaagtttaatgatacttctgatgtttcggaacagtcatttcacctactatttctgaatatattttgcaaattgaattggaataggaattgatatagcagtcttaaacattagtagtgggatttggctatggtccagactgtgctccttatagagaatttgatctgctcagtgtgagcggtttgctgttagccagggctatttatggcaaacacatgcttttgtatcttgtcatagttatccacaaatggcaaaactggacttgattctactggtatgcaaaacaggcatgctagtaagcagtcagtcgtggctcagaacttaaccccatagctcagaggaatgcttttagcagaaaacaggaaagaaaatatcccttaaaaattttttttgaatgtgtggaagtaattttagtataattagattttttccatatttttgaaagatttttcagatgtgaacattaaaaatagggattaaatgtctaggcttccatttaaaattatatgaatggtttgggatctttttgcactgagcaattttatttcaggcttccagctgtccctgtgagttatcctggacatttcgatggtttttggtaaggccaaactctgataagcaaaacagagaatactgacgtatacttaaccatatgtgtaactgatacttggcaccatggaatttttcattgagttatttcctcattcttttaaaaaataagggactataaatcagttatgtagtatcttttgtttttgtagctgattccttaactttcttgtatgcctctagtaatttcagagattaaatattgctttaaactgtgatactttgatttgctagattgacaaaactgatactaatataattaagttcatctttgaaatacatctttgtgcgtagagccaaaaaaagagataaaattaataatagttcacttgttatttgagattaatttggcatttgaaatgatcattttattttacaatcatttataatgaatcaatgttccagttagctttaaaaggtatacggtgctaattagtaaaatattgaaggcaatattttactgctagcttgcaaagttatgagagtttaaaaaataaaatatatgaaaatatgta

SEQ ID NO: 441555 - DNA, 1193 bp, Homo sapiens
cgctgcctgggcccgccgagccccgccacctccctcgggctgcagctcccggcgtgccccgcactctccgctgcccacccgctcgcccgcccctccttctcctcccagtgccacagagccgaagcccgagctgccgccgcagccacagccgagggcactatggcttctggagttacagtgaatgatgaagtcatcaaagtttttaatgatatgaaagtaaggaaatcttctacacaagaggagatcaaaaagagaaagaaagcagttctcttctgtttaagcgatgacaaaagacaaataattgtagaggaagcaaagcagatcttggtgggtgacattggtgatactgtagaggacccctacacatcttttgtgaagttgctacctctgaatgattgccgatatgctttgtacgatgccacatacgaaacaaaagagtctaagaaagaagacctagtatttatattctgggctcctgaaagtgcacctttaaaaagcaagatgatttatgctagctctaaagatgccattaaaaagaaatttacaggtattaaacatgagtggcaagtaaatggcttggatgatattaaggaccgttcgacacttggagagaaattgggaggcaatgtagtagtttcacttgaaggaaaaccattataaaatgacagtcaagtgccatctggatcttaaggagcttccatttctccagctcagtccattggaatagtattaggttttggttttttgttgtatttccccctttccactgggcccttccaacacaatgaatgaaggaaatatcatttatttaagcagcctatcagtgattgccattagactgttgaatactgttacttttatatagaacccaaggaatgccttcctgtcatattttagccaaaacaactggttatatgcctcccttgcagcaagcactacaatgtatgtgatcgtcaatgtgaatagcttagaatactgcaaaggataagctaattgaatgccttgaaagtattatccactggtcagatggtcaacttttttcagtattatttatagttggcacttgattgcagttctgtgaggcttgagcattcatacacctcacctgccttggcaagcctattttagtgatatggcagcacggatataacactatgcattaaaagcactttttgtaataagtttaatatcct

SEQ ID NO: 441556 - DNA, 915 bp, Homo sapiens
ggcgcgcgcgcttccggcccgagccggaagctccgactgcggcggcatccgggacggcgggcgggctggccaccacgggacaggaaggcacagagcatggagaatgatgaacttccgtcagcggatgggatggattggagtgggattgtatctgttagccagtgcagcagcattttactatgtttttgaaatcagtgagacttacaacaggctggccttggaacacattcaacagcaccctgaggagccccttgaaggaaccacatggacacactccttgaaagctcaattactctccttgcctttttgggtgtggacagttatttttctggtaccttacttacagatgtttttgttcctatactcttgtacaagagctgatcccaaaacagtgggctactgtatcatccctatatgcttggcagttatttgcaatcgccaccaggcatttgtcaaggcttctaatcagatcagcagactacaactgattgacacgtaaaatcagtcaccgttttttccctacgattacaaaactgccagtcctatatggagtctgatcacaagactgcagtttcttcacagatctcaggaagttgtcgtggggcagaggctttttaaaaacatgtgattagggagctatctttatctgaataataacgaatttttaggtaaaacctgagatagagtactacaaaatcatgttgatgacttcagattttggaagttaaatcatgtctgttatttgcattctttagaaacttgactaagtacctgaattcatatttctattctactgtgcaacatagtgatgattcagaaatttttcctttggggaaaaaaatgaatatgaacatttccattgtgttaagtgtaaaaaggtccagacatgatcataaaatttaaattttatacaat

SEQ ID NO: 441557 - DNA, 1368 bp, Homo sapiens
ggcgcgcgcgcttccggcccgagccggaagctccgactgcggcggcatccgggacggcgggcgggctggccaccacgggacaggaaggtgagatccgggacctcagctttgcaagcaggctccgccggcgaccgctgacgggcgctgggctcgcggcgctgcaaggcggcgaggcccgggcctggcgccgcctgcgcagccttggtcgcggcgtgccggcgctgcagcgcggcagggggcggggccggccgcccggaggcccaagtggcggggacgcctccctgccgggtcaggttctcagagcgggtctccggcggcggcgacgggggccgggccgcgcgtgacccgccgcagtcacgccgttcttaatcactagtagctggtgctccaggctggcggcgctcacctttctcctagccgggtgacccaggggatttattttatgttggctttctctgaaatgccaaagccacccgattattcagagctgagtgactctttaacgcttgccgtgggaacaggaagattttcgggaccattgcacagagcatggagaatgatgaacttccgtcagcggatgggatggattggagtgggattgtatctgttagccagtgcagcagcattttactatgtttttgaaatcagtgagacttacaacaggctggccttggaacacattcaacagcaccctgaggagccccttgaaggaaccacatggacacactccttgaaagctcaattactctccttgcctttttgggtgtggacagttatttttctggtaccttacttacagatgtttttgttcctatactcttgtacaagagctgatcccaaaacagtgggctactgtatcatccctatatgcttggcagttatttgcaatcgccaccaggcatttgtcaaggcttctaatcagatcagcagactacaactgattgacacgtaaaatcagtcaccgttttttccctacgattacaaaactgccagtcctatatggagtctgatcacaagactgcagtttcttcacagatctcaggaagttgtcgtggggcagaggctttttaaaaacatgtgattagggagctatctttatctgaataataacgaatttttaggtaaaacctgagatagagtactacaaaatcatgttgatgacttcagattttggaagttaaatcatgtctgttatttgcattctttagaaacttgactaagtacctgaattcatatttctattctactgtgcaacatagtgatgattcagaaatttttcctttggggaaaaaaatgaatatgaacatttccattgtgttaagtgtaaaaaggtccagacatgatcataaaatttaaattttatacaat

SEQ ID NO: 441558 - DNA, 2437 bp, Homo sapiens
gaagatttgaacagtgtaaattccagagttgagaaagcatttagcatggtggaaatgtggagagcttattggtgagagaggatggagctaagagaaataagatcaaatattaaaattaggaatttaggcattacctcagggaaaagccttgacagtgaaaagaaactacttaatcgctaatagctagtctggaccagacacttaactgcgctttgggaatcatcctgggctaatcaggaaataaacttgacttttctatttttctctgaagctttacaggacatactcccactcccatttttttctaagcctacagcatcttgattcatagtataattcctgaagtatgctgaatggactttttaaggttcctttagcatttttgtatagagttatatgtgatctttctataaccatgccattcacttaaataattcatgaagggaatggtttaatttaaaggaagacctaataggaagaagattaaaggaagcttttagtcagcctgtggctagatttattgatttggtgatcaaacctgtgctatttcctgaatttcagctaatggccaactgtggtcaaagaatggctttcagttaaagttttgacttcttattataaataatataaagaatgtctcagtaattagaaatcccttaataagtagaacaaatgtggcaagtaggactcctatcggtatacaaattccatttctttttataagaaaaacacataaaccattatcatttattcatgagccaaagccattaagaagataaatccagttatcagcttcctgtctctgaagtttggatcattttatagatccacgcaatagagagcttccttcctatgaaacaaaaaccttgagatctctttttttttgagacagagtctcgctgttgtcagcccaggctggagtgcaatggcgcaatctcggttcactgcaacctctgccttccaggttccagcaattctcctacctcagctcccaagtagctgagatgacaggcgtgtgccaccacgcccagctaatttttgtatttttagtagcgatggtgtttcactacattggccaggctggtctcgaactcctgacctcaggtgaccacccgcctcagcctcccaaagtgctgggattacaggcatgagccactgtgcccggccaagatctaactcacgcttacttttcattaaaatatttcttgtcgcttttagctattgtcagaatccaataaacagcttacgcattcattttggtaaagcaaatttcacaggaaaatagacaaaattataagagattcctggagacaacacaaggaaaacaatgtttaaaagcaaaatagcctgtgtaatgttaggtaatgtaatgcccaagtgaataaaagatttttcgtcaagcaaactactgtttctactttgggggaaaaaagtcagttttacatttgtaatttaaggaaagaacagaaagcacaaaggtttttcttttctttattaatggcctactagaaatgagcagtgcaagagtctacctgtactattctaatacagtaagatattggacacaaaatggaggtaactttttaaaatagattggcttggaagttgaaatgtagattaatggatataacccaatagaaagggattttcaaataaaaccaaagtctatttttttatttactttctaattttgaacagatgactcagtcctaaatctttgcctttatttcctataaaatgtaggtgatacttgtaactcgacttcctggagttaattcttcagcaagaggtgaccctgggagcgtactttaaaataattgctgtacagccattgagtactaacatgatgataggttttcaaaatatctttgtagtggatgctgcataattacattcacttctcttagactgtaaaagactttcttgacttgttttaacagtagagatagcagtacaatttgaatttatggtttaggctctgcaattagaggaacaattgcagtttcctcctacccttcatatggtctgtgtaaaactgatgtttgcttaacttattttaaaagttgattacgttttcagaaaataaagataatcacttttgccatggttataatcaaatctaagctttcagacttgagagccatggtgtaaaactcaaggaggtttatttaaattatgctgactttgctagaattggataaattctgtataagccaagtatgagttcacatgtactcgaatatacagttttcacaaagctattactctcatcagtcaggcttgtatgatctattccttaccacaaaagaagtagacaattgccacttttatttctaatccttaagttgaatgtttcttcttggatgtaagttcaaataaattgatctggataaattttcatttctacttaattaaaacttcctatgtaaaatccaaa

SEQ ID NO: 441559 - DNA, 2375 bp, Homo sapiens
gaagatttgaacagtgtaaattccagagttgagaaagcatttagcatggtggaaatgtggagagcttattggtgagagaggatggagctaagagaaataagatcaaatattaaaattaggaatttaggcattacctcagggaaaagccttgacagtgaaaagaaactacttaatcgctaatagctagtctggaccagacacttaactgcgctttgggaatcatcctgggctaatcaggaaataaacttgacttttctatttttctctgaagctttacaggacatactcccactcccatttttttctaagcctacagcatcttgattcatagtataattcctgaagtatgctgaatggactttttaaggttcctttagcatttttgtatagagttatatgtgatctttctataaccatgccattcacttaaataattcatgaagggaatggtttaatttaaaggaagacctaataggaagaagattaaaggaagcttttagtcagcctgtggctagatttattgatttggtgatcaaacctgtgctatttcctgaatttcagctaatggccaactgtggtcaaagaatggctttcagttaaagttttgacttcttattataaataatataaagaatgtctcagtaattagaaatcccttaataagtagaacaaatgtggcaagtaggactcctatcggtatacaaattccatttctttttataagaaaaacacataaaccattatcatttattcatgagccaaagccattaagaagataaatccagttatcagcttcctgtctctgaagtttggatcattttatagatccacgcaatagagagcttccttcctatgaaacaaaaaccttgagatctctttttttttgagacagagtctcgctgttgtcagcccaggctggagtgcaatggcgcaatctcggttcactgcaacctctgccttccaggttccagcaattctcctacctcagctcccaagtagctgagatgacaggcgtgtgccaccacgcccagctaatttttgtatttttagtagcgatggtgtttcactacattggccaggctggtctcgaactcctgacctcaggtgaccacccgcctcagcctcccaaagtgctgggattacaggcatgagccactgtgcccggccaagatctaactcacgcttacttttcattaaaatatttcttgtcgcttttagctattgtcagaatccaataaacagcttacgcattcattttggtaaagcaaatttcacaggaaaatagacaaaattataagagattcctggagacaacacaaggaaaacaatgtttaaaagcaaaatagcctgtgtaatgttaggtaatgtaatgcccaagtgaataaaagatttttcgtcaagcaaactactgtttctactttgggggaaaaaagtcagttttacatttgtaatttaaggaaagaacagaaagcacaaaggtttttcttttctttattaatggcctactagaaatgagcagtgcaagagtctacctgtactattctaatacagtaagatattggacacaaaatggaggtaactttttaaaatagattggcttggaagttgaaatgtagattaatggatataacccaatagaaagggatcctaaatctttgcctttatttcctataaaatgtaggtgatacttgtaactcgacttcctggagttaattcttcagcaagaggtgaccctgggagcgtactttaaaataattgctgtacagccattgagtactaacatgatgataggttttcaaaatatctttgtagtggatgctgcataattacattcacttctcttagactgtaaaagactttcttgacttgttttaacagtagagatagcagtacaatttgaatttatggtttaggctctgcaattagaggaacaattgcagtttcctcctacccttcatatggtctgtgtaaaactgatgtttgcttaacttattttaaaagttgattacgttttcagaaaataaagataatcacttttgccatggttataatcaaatctaagctttcagacttgagagccatggtgtaaaactcaaggaggtttatttaaattatgctgactttgctagaattggataaattctgtataagccaagtatgagttcacatgtactcgaatatacagttttcacaaagctattactctcatcagtcaggcttgtatgatctattccttaccacaaaagaagtagacaattgccacttttatttctaatccttaagttgaatgtttcttcttggatgtaagttcaaataaattgatctggataaattttcatttctacttaattaaaacttcctatgtaaaatccaaa

SEQ ID NO: 441560 - DNA, 2377 bp, Homo sapiens
gaagatttgaacagtgtaaattccagagttgagaaagcatttagcatggtggaaatgtggagagcttattggtgagagaggatggagctaagagaaataagatcaaatattaaaattaggaatttaggcattacctcagggaaaagccttgacagtgaaaagaaactacttaatcgctaatagctagtctggaccagacacttaactgcgctttgggaatcatcctgggctaatcaggaaataaacttgacttttctatttttctctgaagctttacaggacatactcccactcccatttttttctaagcctacagcatcttgattcatagtataattcctgaagtatgctgaatggactttttaaggttcctttagcatttttgtatagagttatatgtgatctttctataaccatgccattcacttaaataattcatgaagggaatggtttaatttaaaggaagacctaataggaagaagattaaaggaagcttttagtcagcctgtggctagatttattgatttggtgatcaaacctgtgctatttcctgaatttcagctaatggccaactgtggtcaaagaatggctttcagttaaagttttgacttcttattataaataatataaagaatgtctcagtaattagaaatcccttaataagtagaacaaatgtggcaagtaggactcctatcggtatacaaattccatttctttttataagaaaaacacataaaccattatcatttattcatgagccaaagccattaagaagataaatccagttatcagcttcctgtctctgaagtttggatcattttatagatccacgcaatagagagcttccttcctatgaaacaaaaaccttgagatctctttttttttgagacagagtctcgctgttgtcagcccaggctggagtgcaatggcgcaatctcggttcactgcaacctctgccttccaggttccagcaattctcctacctcagctcccaagtagctgagatgacaggcgtgtgccaccacgcccagctaatttttgtatttttagtagcgatggtgtttcactacattggccaggctggtctcgaactcctgacctcaggtgaccacccgcctcagcctcccaaagtgctgggattacaggcatgagccactgtgcccggccaagatctaactcacgcttacttttcattaaaatatttcttgtcgcttttagctattgtcagaatccaataaacagcttacgcattcattttggtaaagcaaatttcacaggaaaatagacaaaattataagagattcctggagacaacacaaggaaaacaatgtttaaaagcaaaatagcctgtgtaatgttaggtaatgtaatgcccaagtgaataaaagatttttcgtcaagcaaactactgtttctactttgggggaaaaaagtcagttttacatttgtaatttaaggaaagaacagaaagcacaaaggtttttcttttctttattaatggcctactagaaatgagcagtgcaagagtctacctgtactattctaatacagtaagatattggacacaaaatggaggtaactttttttttcaaataaaaccaaagtctatttttttatttactttctaattttgaacagatgactcagtcctaaatctttgcctttatttcctataaaatgtaggtgatacttgtaactcgacttcctggagttaattcttcagcaagaggtgaccctgggagcgtactttaaaataattgctgtacagccattgagtactaacatgatgataggttttcaaaatatctttgtagtggatgctgcataattacattcacttctcttagactgtaaaagactttcttgacttgttttaacagtagagatagcagtacaatttgaatttatggtttaggctctgcaattagaggaacaattgcagtttcctcctacccttcatatggtctgtgtaaaactgatgtttgcttaacttattttaaaagttgattacgttttcagaaaataaagataatcacttttgccatggttataatcaaatctaagctttcagacttgagagccatggtgtaaaactcaaggaggtttatttaaattatgctgactttgctagaattggataaattctgtataagccaagtatgagttcacatgtactcgaatatacagttttcacaaagctattactctcatcagtcaggcttgtatgatctattccttaccacaaaagaagtagacaattgccacttttatttctaatccttaagttgaatgtttcttcttggatgtaagttcaaataaattgatctggataaattttcatttctacttaattaaaacttcctatgtaaaatccaaa

SEQ ID NO: 441561 - DNA, 599 bp, Homo sapiens
gccctacaccacatacaagctgagagtggtggcacacaacgaggtgggcagtacggcttccgagtggatcagtttcaccacccaaaaagaattgcctcagtaccgagccccattttcggtggacagcaatttgtctgtggtgtgtgtgaactggagtgacaccttcctcctgaacggccaactgaaggagtacgtgttaaccgacggagggcgacgcgtgtacagcggcttggacaccaccctctacataccgagaacggcggacaaaaccttctttttccaggtcatctgcacgactgacgaaggaagtgttaagacgccgttgatccaatatgatacctctactggacttggcttggtcctaacaactcctgggaaaaagaagggatcgcggagcaaaagcacagagttctacagcgagctgtggttcatagtgttaatggcgatgctgggcttgatcttgttggccatttttctgtccctgatactacaaagaaaaatccacaaagagccatatatcagagaaagacctcccttggtacctcttcagaagaggatgtctccattgaatgtttacccaccgggggaaaaccatatgg

SEQ ID NO: 441562 - DNA, 932 bp, Homo sapiens
gagcgttctagagtatcccagctatctaagagtcccgggcttcccccaccacctcactcaagtgcccctgaaatccctgccagacggctcagcctggtctgcggtaaggcagggaggctggaaccatttctgggcattgtggtcattcccactgtgttcctccacctcctccctccagcgttgctcagacctctgtcttgggagaaaggttgagataagaatgtcccatggagtgccgtgggcaacagtggcccttcatgggaacaatctgttggagcagggggtcagttctctgctgggaatctacccctttctggaggagaaacccattccaccttaataactttattgtaatgtgagaaacacaaaacaaagtttacttttttgactctaagctgacatgatattagaaaatctctcgctctctttttttttttttttttttttggctacttgagttgtggtcctaaaacataaaatctgatggacaaacagagggttgctggggggacaagcgtgggcacaatttccccaccaagacaccctgatcttcaggcgggtctcaggagcttctaaaaatccgcatggctctcctgagagtggacagaggagaggagagggtcagaaatgaacgctcttctatttcttgtcattaccaagccaattacttttgccaaatttttctgtgatctgccctgattaagatgaattgtgaaatttacatcaagcaattatcaaagcgggctgggtcccatcagaacgacccacatctttctgtgggtgtgaatgtcattaggtcttgcgctgacccctgagcccccatcactgccgcctgatggggcaaagaaacaaaaaacatttcttactcttctgtgttttaacaaaagtttataaaacaaaataaatggcgcatatgttttctaaaaaaaaaa

SEQ ID NO: 441563 - DNA, 1355 bp, Homo sapiens
gtcctgtacattgttcagctgcatctctgtcctgtacccataaggtgccagtagcacttctccagtggtgacaaccaaaaatgtctttggatattgtcaaatgtctcctgatgggccaaaatcatccccagttgggaatcgctgttatgtgatagctcatttcattctcactttgaccctgtgaacatggggttattatgaatcaggtgtcattgagatcaggatcaggagcggaaactgttggaccgactcctgccccctgctcaacactgacccctctgagtggttggaggcagtgccccagtgcccagaaatcccaccattagtgattgttttttatgagaaagaggcgtggagaagtattggggcaatgtgtcagggaggaatcaccacatccctacggcagtcccagccaagcccccaatcccagcggagactgtgccctgctcagagctcccaagccttcccccaccacctcactcaagtgcccctgaaatccctgccagacggctcagcctggtctgcggtaaggcagggaggctggaaccatttctgggcattgtggtcattcccactgtgttcctccacctcctccctccagcgttgctcagacctctgtcttgggagaaaggttgagataagaatgtcccatggagtgccgtgggcaacagtggcccttcatgggaacaatctgttggagcagggggtcagttctctgctgggaatctacccctttctggaggagaaacccattccaccttaataactttattgtaatgtgagaaacacaaaacaaagtttacttttttgactctaagctgacatgatattagaaaatctctcgctctctttttttttttttttttttttggctacttgagttgtggtcctaaaacataaaatctgatggacaaacagagggttgctggggggacaagcgtgggcacaatttccccaccaagacaccctgatcttcaggcgggtctcaggagcttctaaaaatccgcatggctctcctgagagtggacagaggagaggagagggtcagaaatgaacgctcttctatttcttgtcattaccaagccaattacttttgccaaatttttctgtgatctgccctgattaagatgaattgtgaaatttacatcaagcaattatcaaagcgggctgggtcccatcagaacgacccacatctttctgtgggtgtgaatgtcattaggtcttgcgctgacccctgagcccccatcactgccgcctgatggggcaaagaaacaaaaaacatttcttactcttctgtgttttaacaaaagtttataaaacaaaataaatggcgcatatgttttctaaaaaaaaaa

SEQ ID NO: 441564 - DNA, 988 bp, Homo sapiens
gaccccaggatggagcgaccagcatgtcatccatgtggaatcttggtggctttgaggacattctggaaaatgccactgaccagtgtgaacaaaagggatgtgttatggggctggaggtgtgattaggtaggagggaaactgttggaccgactcctgccccctgctcaacactgacccctctgagtggttggaggcagtgccccagtgcccagaaatcccacctcctccctccagcgttgctcagacctctgtcttgggagaaaggttgagataagaatgtcccatggagtgccgtgggcaacagtggcccttcatgggaacaatctgttggagcagggggtcagttctctgctgggaatctacccctttctggaggagaaacccattccaccttaataactttattgtaatgtgagaaacacaaaacaaagtttacttttttgactctaagctgacatgatattagaaaatctctcgctctctttttttttttttttttttttggctacttgagttgtggtcctaaaacataaaatctgatggacaaacagagggttgctggggggacaagcgtgggcacaatttccccaccaagacaccctgatcttcaggcgggtctcaggagcttctaaaaatccgcatggctctcctgagagtggacagaggagaggagagggtcagaaatgaacgctcttctatttcttgtcattaccaagccaattacttttgccaaatttttctgtgatctgccctgattaagatgaattgtgaaatttacatcaagcaattatcaaagcgggctgggtcccatcagaacgacccacatctttctgtgggtgtgaatgtcattaggtcttgcgctgacccctgagcccccatcactgccgcctgatggggcaaagaaacaaaaaacatttcttactcttctgtgttttaacaaaagtttataaaacaaaataaatggcgcatatgttttctaaaaaaaaaa

SEQ ID NO: 441565 - DNA, 901 bp, Homo sapiens
gagcgttctagagtatcccagctatctaagagtcccgggcttcccccaccacctcactcaagtgcccctgaaatccctgccagacggctcagcctggtctgcggtaaggcagggaggctggaaccatttctgggcattgtggtcattcccactgtgttcctccacctcctccctccagcgttgctcagacctctgtcttgggagaaaggttgagataagaatgtcccatggagtgccgtgggcaacagtggcccttcatgggaacaatctgttggagcagggggtcagttctctgctgggaatctacccctttctggaggagaaacccattccaccttaataactttattgtaatgtgagaaacacaaaacaaagtttacttttttgactctaagctgacatgatattagaaaatctctcgctctctttttttttttttttttttttggctacttgagttgtggtcctaaaacataaaatctgatggacaaacagagggttgctggggggacaagcgtgggcacaatttccccaccaagacaccctgatcttcaggcgggtctcaggagcttctaaaaatccgcatggctctcctgagagtggacagaggagaggagagggtcagaaatgaacgctcttctatttcttgtcattaccaagccaattacttttgccaaatttttctgtgatctgccctgattaagatgaattgtgaaatttacatcaaaacgacccacatctttctgtgggtgtgaatgtcattaggtcttgcgctgacccctgagcccccatcactgccgcctgatggggcaaagaaacaaaaaacatttcttactcttctgtgttttaacaaaagtttataaaacaaaataaatggcgcatatgttttctaaaaaaaaaa

SEQ ID NO: 441566 - DNA, 5411 bp, Homo sapiens
cttacttacaaaaacaggtggctggctcagactgtagtttgctaaccctgagaacttgacagcaaaaagaagagataaatagtagttaaaacataaagcagaatcaaataaattttttttccatataggtgagatctgataatgtttttaggtagaaaggaagaaacttgtgaagcaggagagactaaacctgtttgatgtttttggttgggggccaggttagagataggatcgggtgtatgtgttgttgaattattcctaaaagggaagagagacaccagtaattgcaaaatcatcaagtatttatagaggtagaggagaaagaataaattcagatgtgttgagatagatgagagtacctatgaggatttgtttgatttgggaaaatgaaagcagaagtaggagaagcagaagtaggagaaattcagatgtgttgagatagatgagagtacctatgaggatttgtttgatttgggaaaatgaaagcagaagtaggagagggcagaggataattggaagcttagaatggggaaaggatgtctgtgctgtggggaatactttcaggcagttgttaccagtattttgaagatgacaacttgtttaacctcgaaacaatttgtggaccaccccatgattgtagttacatttttagtattcatcaatggagaatatgcatattagaaaaaagctactactcagttctctcttagatgactttgtattttattaaccacaacatggactgcacatttgaaaaatgttaatacatgtatgtgagaaattgtctttatgtaatgcaatgccctgggtacccactgagataactaatttaacagcttcccaggaggctgaaagctcataagttagaaatcattgcgttctaatgaatcaacaataagagaataaaggattgcttagaagtagtattctgtcaaaattaaaatgaacttataatgaactcactttgaaggattccataactttttattcagtagtacttggcagttttgagcaagatgacagaaacaaaatgatctagggttaggcataacattgtatagaaggccagaataaacatttagcttattctttctctaaattaccttttcctgagatcacacccagtttcattaatcacttctgtatttatggtgatcaaattggcatctcattttcttaaccgttttgttgatttcatgttccccatttacaccttactgaatatttccatttgggtatcttactgtttcacatttaacctactgaaaagaaagcttcttatctttcctttgaaacgagctctctgctgatttctacttggagtagagaatatacagagatgctgaagttgatgggaaaatgtggataggttgggaaaaacatgaattaggtgtgggattcattgaagaaattgaacagcatcatgactggtaaatgatggtgatgagaaagtagagaaaacctactgtttgctcttaccatttgttttttaaattttagccaaatcaagttcttgactcatacactcttacaaatattcaaatatatgttctctattttgtttccttaatccaataatgttgtaatccttttccaattaataagcaatatgttcaataccgatgcccatttaagtgtgctgttactctctaatcattattattcctttcataaatagatctgggcataggaaccaatcagaaacaatcgcttcagcaatcaagaccattgttcatcatggaggaacccatggatacctctgagcctctatctgcattaccattcactgggcagcagtcttttgagccaagtggcaaatttggacagtatccatcgatgcagatgaaccacatccaggcactggggaagtggaggacatagaacagctcaatcagtgtttgatccaacacttccatctcattaagacaagtttgatttttctttgctttttatttcatggaatacatgagaatctcttaactgttggagtttccaaggaggcatacctcatgacttcagttaatggaaagaacaaaactaaaatgctgtatggccaaagccacaaagggaaggatccacaatttacattcttggagctatcatctgtactgtactgttgtgatctactgattggcattggcatagtagtaggggtcaagtgacagaatccgtgccagcagtctccaggttcagaagcaattcaagaccctgatgatagctctccagcaaccaacacatggtgattgtgccaacttgttgctcagttataatgcagggccagtgattggtttaagtgaagaccatggttgagatcatttgtctttggtctaatagaatttgagtctagtagaatttgagtctccagggaaagagctacttgaccaaattaaactagtagcaggtagagcatgaatgacagcatattataccatcaagatgttcttagagcagtgtatggatggatcgattgtactgccatcagttgtgactgacgttgtattcaaggagaaagagaaacttgtttagaaagcactttgaaagttttttgagtacgggggtgccctgtatcaccccgttatggttgaactttctccttcaaaattaccagacttggcagcagtggcaaattattgggctaaaagacttaatcagacatattctgggttcaaggctcctaatataatacctggtgcaaacattatacttccactcattcagatggttgcatcctgccaggcatccagtgggactgggaatatggacacttgaacattaaacatcctgaagaattttggaatgacaggttacaagtgaacataatcagttctctatattaaaaaaaaaaaaaagatttgggcatagattgggctcacataatctttagagagattttttcatttttgtgaaagtacagaaattcttaactgcttatgaaatgctgattgttaaacagcatccacagctattttgtgttgtttccctgaccccaccctgaagaaaagaaaaattatggcatattgaaaacagcagtatgatgtaagagaaaagatcacaaattccttgagggtgggtcttttccatactcataagcctatttataatattcagagtaatttattgacacatattaatattccctcctatcccattaattgccaaatcatcaaacatttattgagcatctactctgtgtagggtgtaagcagtactggggacttacagtgataaaagacatagttttagccttaagtgatgtactgtttcactgaagagatggaatataagaagccaagtaatttatggaattctcttctttgtttttcttttttttttttggcagtggagtcttgctctttaaatagagcaaggctagtctggaactcctgggctcatgtggtcctcccgccttagctttcagtgtagctgggactacaggtgtgaacacagcttggaaatctcttaaccatgggagttaagtctcaaaattctggtgatacaagtggttgaaacttaaaactgtatttaaaaaataggattcgtgaatttgagatagttcataagtctgcaaaaggctgtataaatacatattttacatttactattattaattttgtagtaaatttgagtacagcactctctttatctgtggaaacttcagactctcccctattactttaatttcagtgagacattattaaatataagtgggcttacacatttgttttgctttactgacaaataatacacaacttggaggcttttttttcctttctattcttcctctaaatgttcaacacttttctgattttgtgatttgaggttgtttaatagcttcctgaggctccattgagaccgtatatacgtgacacttaacagtctagccttcctcggtacatatagatatatgatggtggctttgcctgtagtaaattcatgccaaaacataggctttcagtgcctattacatatggctttcagctctctctactgagggatgtaggagtttatttctgaggtctgagcctcttttcctttacttcctttactctttcctaagccttctttataaaaactatgcatgttctattgttttcctttttgattccctttcttttattatccccagtaggagtgacttgtaattctcatatgttagaaaggcagatctcctggttgaagaaaagatccacccaagcaagtcagcatgtttaataatttttgagggggatctcaaatgtgggaaggattgttatataagacaaccaaatgatgacatgagacaataaatgctataggaattatggaggaataattagctatttattttcttggttagggaagagatattattagttgtagaagtaattactaacttctacattttttattgtggaaatcaaaaatatatatatgaaaataaaatgttataattgacttcagtgtcccataaaccagcttcaacaattaccaaattgtgaccaatctttacacacatgcacaggtgtccctcagtatctgtggggcattggttctaggaccacttatggataccaacatctatggatgctcaagtccctgatataaaatggtggactatttgcatataacctgtgtacatcccgtattatttaaatcatccctagatcacttataatacgtaatacaatgtaaatgccatgtaaataactgttatactgtattaaggaataacaacaagaaaaatgtacatgttcagtacagacgcaattttttttgtgtgtggaatattttcattccaaggtcagttgaacccatggacataggaggctgactcgtgtgtgtgtgtgtgtgtgtgtgtgtgtgtgtgtgtgcatacagacacacatatttctgaaatgtaaatattctctttttaaaaaaattattatcacagctaaacaaattaccagtaattcttttatcctcatatacccggtgttcagattttctagattggctcctaatttttttacagattatttgaatctgattcaattcatgtactgtaatgtttgataacttaagtaccctttataggttctcttttacctcttctttattaaattccttgtaatttgttgtactaaatagattgtcttctagaatttcctgtagtctgaattatgtagtattgtttcacatgttccagtgtcctcttatttcctgtgagttggtagttagatctagaagcttgattaaattcagattttctctctttagatcatcaactttagatcatcaacttggatcatttgtttcattttgcttttgatatgttgttttttagaattacctcttaaaattttgatttaattttataatcatgtaaaatgtttataaatttccaaattcagatcagcaaaacacaataaaatctattcagagaaggcaaa

SEQ ID NO: 441567 - DNA, 5963 bp, Homo sapiens
cttacttacaaaaacaggtggctggctcagactgtagtttgctaaccctgagaacttgacagcaaaaagaagagataaatagtagttaaaacataaagcagaatcaaataaattttttttccatataggtgagatctgataatgtttttaggtagaaaggaagaaacttgtgaagcaggagagactaaacctgtttgatgtttttggttgggggccaggttagagataggatcgggtgtatgtgttgttgaattattcctaaaagggaagagagacaccagtaattgcaaaatcatcaagtatttatagaggtagaggagaaagaataaattcagatgtgttgagatagatgagagtacctatgaggatttgtttgatttgggaaaatgaaagcagaagtaggagaagcagaagtaggagaaattcagatgtgttgagatagatgagagtacctatgaggatttgtttgatttgggaaaatgaaagcagaagtaggagagggcagaggataattggaagcttagaatggggaaaggatgtctgtgctgtggggaatactttcaggcagttgttaccagtattttgaagatgacaacttgtttaacctcgaaacaatttgtggaccaccccatgattgtagttacatttttagtattcatcaatggagaatatgcatattagaaaaaagctactactcagttctctcttagatgactttgtattttattaaccacaacatggactgcacatttgaaaaatgttaatacatgtatgtgagaaattgtctttatgtaatgcaatgccctgggtacccactgagataactaatttaacagcttcccaggaggctgaaagctcataagttagaaatcattgcgttctaatgaatcaacaataagagaataaaggattgcttagaagtagtattctgtcaaaattaaaatgaacttataatgaactcactttgaaggattccataactttttattcagtagtacttggcagttttgagcaagatgacagaaacaaaatgatctagggttaggcataacattgtatagaaggccagaataaacatttagcttattctttctctaaattaccttttcctgagatcacacccagtttcattaatcacttctgtatttatggtgatcaaattggcatctcattttcttaaccgttttgttgatttcatgttccccatttacaccttactgaatatttccatttgggtatcttactgtttcacatttaacctactgaaaagaaagcttcttatctttcctttgaaacgagctctctgctgatttctacttggagtagagaatatacagagatgctgaagttgatgggaaaatgtggataggttgggaaaaacatgaattaggtgtgggattcattgaagaaattgaacagcatcatgactggtaaatgatggtgatgagaaagtagagaaaacctactgtttgctcttaccatttgttttttaaattttagccaaatcaagttcttgactcatacactcttacaaatattcaaatatatgttctctattttgtttccttaatccaataatgttgtaatccttttccaattaataagcaatatgttcaataccgatgcccatttaagtgtgctgttactctctaatcattattattcctttcataaatagatctgggcataggaaccaatcagaaacaatcgcttcagcaatcaagaccattgttcatcatggaggaacccatggatacctctgagcctctatctgcattaccattcactgggcagcagtcttttgagccaagtggcaaatttggacagtatccatcgatgcagatgaaccacatccaggcactggggaagtggaggacatagaacagctcaatcagtgtttgatccaacacttccatctcattaagacaagtttgatttttctttgctttttatttcatggaatacatgagaatctcttaactgttggagtttccaaggaggcatacctcatgacttcagttaatggaaagaacaaaactaaaatgctgtatggccaaagccacaaagggaaggatccacaatttacattcttggagctatcatctgtactgtactgttgtgatctactgattggcattggcatagtagtaggggtcaagtgacagaatccgtgccagcagtctccaggttcagaagcaattcaagaccctgatgatagctctccagcaaccaacacatggtgattgtgccaacttgttgctcagttataatgcagggccagtgattggtttaagtgaagaccatggttgagatcatttgtctttggtctaatagaatttgagtctagtagaatttgagtctccagggaaagagctacttgaccaaattaaactagtagcaggtagagcatgaatgacagcatattataccatcaagatgttcttagagcagtgtatggatggatcgattgtactgccatcagttgtgactgacgttgtattcaaggagaaagagaaacttgtttagaaagcactttgaaagttttttgagtacgggggtgccctgtatcaccccgttatggttgaactttctccttcaaaattaccagacttggcagcagtggcaaattattgggctaaaagacttaatcagacatattctgggttcaaggctcctaatataatacctggtgcaaacattatacttccactcattcagatggttgcatcctgccaggcatccagtgggactgggaatatggacacttgaacattaaacatcctgaagaattttggaatgacaggttacaagtgaacataatcagttctctatattaaaaaaaaaaaaaagatttgggcatagattgggctcacataatctttagagagattttttcatttttgtgaaagtacagaaattcttaactgcttatgaaatgctgattgttaaacagcatccacagctattttgtgttgtttccctgaccccaccctgaagaaaagaaaaattatggcatattgaaaacagcagtatgatgtaagagaaaagatcacaaattccttgagggtgggtcttttccatactcataagcctatttataatattcagagtaatttattgacacatattaatattccctcctatcccattaattgccaaatcatcaaacatttattgagcatctactctgtgtagggtgtaagcagtactggggacttacagtgataaaagacatagttttagccttaagtgatgtactgtttcactgaagagatggaatataagaagccaagtaatttatggaattctcttctttgtttttcttttttttttttggcagtggagtcttgctctttaaatagagcaaggctagtctggaactcctgggctcatgtggtcctcccgccttagctttcagtgtagctgggactacaggtgtgaacacagcttggaaatctcttaaccatgggagttaagtctcaaaattctggtgatacaagtggttgaaacttaaaactgtatttaaaaaataggattcgtgaatttgagatagttcataagtctgcaaaaggctgtataaatacatattttacatttactattattaattttgtagtaaatttgagtacagcactctctttatctgtggaaacttcagactctcccctattactttaatttcagtgagacattattaaatataagtgggcttacacatttgttttgctttactgacaaataatacacaacttggaggcttttttttcctttctattcttcctctaaatgttcaacacttttctgattttgtgatttgaggttgtttaatagcttcctgaggctccattgagaccgtatatacgtgacacttaacagtctagccttcctcggtacatatagatatatgatggtggctttgcctgtagtaaattcatgccaaaacataggctttcagtgcctattacatatggctttcagctctctctactgagggatgtaggagtttatttctgaggtctgagcctcttttcctttacttcctttactctttcctaagccttctttataaaaactatgcatgttctattgttttcctttttgattccctttcttttattatccccagtaggagtgacttgtaattctcatatgttagaaaggcagatctcctggttgaagaaaagatccacccaagcaagtcagcatgtttaataatttttgagggggatctcaaatgtgggaaggattgttatataagacaaccaaatgatgacatgagacaataaatgctataggaattatggaggaataattagctatttattttcttggttagggaagagatattattagttgtagaagtaattactaacttctacattttttattgtggaaatcaaaaatatatatatgaaaataaaatgttataattgacttcagtgtcccataaaccagcttcaacaattaccaaattgtgaccaatctttacacacatgcacaggtgtccctcagtatctgtggggcattggttctaggaccacttatggataccaacatctatggatgctcaagtccctgatataaaatggtggactatttgcatataacctgtgtacatcccgtattatttaaatcatccctagatcacttataatacgtaatacaatgtaaatgccatgtaaataactgttatactgtattaaggaataacaacaagaaaaatgtacatgttcagtacagacgcaattttttttgtgtgtggaatattttcattccaaggtcagttgaacccatggacataggaggctgactcgtgtgtgtgtgtgtgtgtgtgtgtgtgtgtgtgtgtgcatacagacacacatatttctgaaatgtaaatattctctttttaaaaaaattattatcacagctaaacaaattaccagtaattcttttatcctcatatacccggtgttcagattttctagattggctcctaatttttttacagattatttgaatctgattcaattcatgtactgtaatgtttgataacttaagtaccctttataggttctcttttacctcttctttattaaattccttgtaatttgttgtactaaatagattgtcttctagaatttcctgtagtctgaattatgtagtattgtttcacatgttccagtgtcctcttatttcctgtgagttggtagttagatctagaagcttgattaaattcagattttctctctttagatcatcaactttagatcatcaacttggatcatttgtttcattttgcttttgatatgttgttttttagaattacctcttaaaattttgatttaattttataatcatgtaaaatgtttataaatttccaaattcagatcagcaaaacacaataaaatctattcagagaaggcaaaaaaaaaaaacaaaacaacaaaaaaacaaaaaaacacacaagaataaaaagaacaaacaaaaacagaaaaaaaaaggagaaacacataaggaatacagaatggcaaaaaaaaacaagatacaagaaatggcacaagcgcccaataagaaaaaacaaacaaaaagaaaatggccatcaaaaaaaacaaaagcaagcgaacatgcaccagaacccaaggaaaacagacaaaaagcgaggtagacctgggacaaacccacaaagaaagaaacaaggacaaccaaccagaaagacagacagtaaacaagagatacataagagataaaaaatgaagcgcaaacaccaaacaacaaggagagaacagaaaaaaacgcagaaaagaagagtcgagacgcgcagagacacacagaaaaacgcgaagcgaaacgcacgaagaagagaagagaagagagcacaaacgagagaaggagccgagacaggaaacgacggagagccgacacagacacacagacaaccagagcgaacgagaaagaacagaaacgaatacaaaaaaagg

SEQ ID NO: 441568 - DNA, 3873 bp, Homo sapiens
gcctgtactcccagttactcgggaggctgaagccggagaattgcttgaacccgggaggcagaggttgcggtgagccgagatcgcgccattgcactgcagcctgggcaacaagagcgaaactccatctcaaaaaacataaaatctgggcataggaaccaatcagaaacaatcgcttcagcaatcaagaccattgttcatcatggaggaacccatggatacctctgagcctctatctgcattaccattcactgggcagcagtcttttgagccaagtggcaaatttggacagtatccatcgatgcagatgaaccacatccaggcactggggaagtggaggacatagaacagctcaatcagtgtttgatccaacacttccatctcattaagacaagtttgatttttctttgctttttatttcatggaatacatgagaatctcttaactgttggagtttccaaggaggcatacctcatgacttcagttaatggaaagaacaaaactaaaatgctgtatggccaaagccacaaagggaaggatccacaatttacattcttggagctatcatctgtactgtactgttgtgatctactgattggcattggcatagtagtaggggtcaagtgacagaatccgtgccagcagtctccaggttcagaagcaattcaagaccctgatgatagctctccagcaaccaacacatggtgattgtgccaacttgttgctcagttataatgcagggccagtgattggtttaagtgaagaccatggttgagatcatttgtctttggtctaatagaatttgagtctagtagaatttgagtctccagggaaagagctacttgaccaaattaaactagtagcaggtagagcatgaatgacagcatattataccatcaagatgttcttagagcagtgtatggatggatcgattgtactgccatcagttgtgactgacgttgtattcaaggagaaagagaaacttgtttagaaagcactttgaaagttttttgagtacgggggtgccctgtatcaccccgttatggttgaactttctccttcaaaattaccagacttggcagcagtggcaaattattgggctaaaagacttaatcagacatattctgggttcaaggctcctaatataatacctggtgcaaacattatacttccactcattcagatggttgcatcctgccaggcatccagtgggactgggaatatggacacttgaacattaaacatcctgaagaattttggaatgacaggttacaagtgaacataatcagttctctatattaaaaaaaaaaaaaagatttgggcatagattgggctcacataatctttagagagattttttcatttttgtgaaagtacagaaattcttaactgcttatgaaatgctgattgttaaacagcatccacagctattttgtgttgtttccctgaccccaccctgaagaaaagaaaaattatggcatattgaaaacagcagtatgatgtaagagaaaagatcacaaattccttgagggtgggtcttttccatactcataagcctatttataatattcagagtaatttattgacacatattaatattccctcctatcccattaattgccaaatcatcaaacatttattgagcatctactctgtgtagggtgtaagcagtactggggacttacagtgataaaagacatagttttagccttaagtgatgtactgtttcactgaagagatggaatataagaagccaagtaatttatggaattctcttctttgtttttcttttttttttttggcagtggagtcttgctctttaaatagagcaaggctagtctggaactcctgggctcatgtggtcctcccgccttagctttcagtgtagctgggactacaggtgtgaacacagcttggaaatctcttaaccatgggagttaagtctcaaaattctggtgatacaagtggttgaaacttaaaactgtatttaaaaaataggattcgtgaatttgagatagttcataagtctgcaaaaggctgtataaatacatattttacatttactattattaattttgtagtaaatttgagtacagcactctctttatctgtggaaacttcagactctcccctattactttaatttcagtgagacattattaaatataagtgggcttacacatttgttttgctttactgacaaataatacacaacttggaggcttttttttcctttctattcttcctctaaatgttcaacacttttctgattttgtgatttgaggttgtttaatagcttcctgaggctccattgagaccgtatatacgtgacacttaacagtctagccttcctcggtacatatagatatatgatggtggctttgcctgtagtaaattcatgccaaaacataggctttcagtgcctattacatatggctttcagctctctctactgagggatgtaggagtttatttctgaggtctgagcctcttttcctttacttcctttactctttcctaagccttctttataaaaactatgcatgttctattgttttcctttttgattccctttcttttattatccccagtaggagtgacttgtaattctcatatgttagaaaggcagatctcctggttgaagaaaagatccacccaagcaagtcagcatgtttaataatttttgagggggatctcaaatgtgggaaggattgttatataagacaaccaaatgatgacatgagacaataaatgctataggaattatggaggaataattagctatttattttcttggttagggaagagatattattagttgtagaagtaattactaacttctacattttttattgtggaaatcaaaaatatatatatgaaaataaaatgttataattgacttcagtgtcccataaaccagcttcaacaattaccaaattgtgaccaatctttacacacatgcacaggtgtccctcagtatctgtggggcattggttctaggaccacttatggataccaacatctatggatgctcaagtccctgatataaaatggtggactatttgcatataacctgtgtacatcccgtattatttaaatcatccctagatcacttataatacgtaatacaatgtaaatgccatgtaaataactgttatactgtattaaggaataacaacaagaaaaatgtacatgttcagtacagacgcaattttttttgtgtgtggaatattttcattccaaggtcagttgaacccatggacataggaggctgactcgtgtgtgtgtgtgtgtgtgtgtgtgtgtgtgtgtgtgcatacagacacacatatttctgaaatgtaaatattctctttttaaaaaaattattatcacagctaaacaaattaccagtaattcttttatcctcatatacccggtgttcagattttctagattggctcctaatttttttacagattatttgaatctgattcaattcatgtactgtaatgtttgataacttaagtaccctttataggttctcttttacctcttctttattaaattccttgtaatttgttgtactaaatagattgtcttctagaatttcctgtagtctgaattatgtagtattgtttcacatgttccagtgtcctcttatttcctgtgagttggtagttagatctagaagcttgattaaattcagattttctctctttagatcatcaactttagatcatcaacttggatcatttgtttcattttgcttttgatatgttgttttttagaattacctcttaaaattttgatttaattttataatcatgtaaaatgtttataaatttccaaattcagatcagcaaaacacaataaaatctattcagagaaggcaaa

SEQ ID NO: 441569 - DNA, 4203 bp, Homo sapiens
cttacttacaaaaacaggtggctggctcagactgtagtttgctaaccctgagaacttgacagcaaaaagaagagataaatagtagttaaaacataaagcagaatcaaataaattttttttccatataggtgagatctgataatgtttttaggtagaaaggaagaaacttgtgaagcaggagagactaaacctgtttgatgtttttggttgggggccaggttagagataggatcgggtgtatgtgttgttgaattattcctaaaagggaagagagacaccagtaattgcaaaatcatcaagtatttatagaggtagaggagaaagaataaattcagatgtgttgagatagatgagagtacctatgaggatttgtttgatttgggaaaatgaaagcagaagtaggagaagcagaagtaggagaaattcagatgtgttgagatagatgagagtacctatgaggatttgtttgatttgggaaaatgaaagcagaagtaggagagggcagaggataattggaagcttagaatggggaaaggatgtctgtgctgtggggaatactttcaggcagttgttaccagtattttgaagatgacaacttgtttaacctcgaaacaatttgtggaccaccccatgattgtagttacatttttagtattcatcaatggagaatatgcatattagaaaaaagctactactcagttctctcttagatgactttgtattttattaaccacaacatggactgcacatttgaaaaatgttaatacatgtatgtgagaaattgtctttatgtaatgcaatgccctgggtacccactgagataactaatttaacagcttcccaggaggctgaaagctcataagttagaaatcattgcgttctaatgaatcaacaataagagaataaaggattgcttagaagtagtattctgtcaaaattaaaatgaacttataatgaactcactttgaaggattccataactttttattcagtagtacttggcagttttgagcaagatgacagaaacaaaatgatctagggttaggcataacattgtatagaaggccagaataaacatttagcttattctttctctaaattaccttttcctgagatcacacccagtttcattaatcacttctgtatttatggtgatcaaattggcatctcattttcttaaccgttttgttgatttcatgttccccatttacaccttactgaatatttccatttgggtatcttactgtttcacatttaacctactgaaaagaaagcttcttatctttcctttgaaacgagctctctgctgatttctacttggagtagagaatatacagagatgctgaagttgatgggaaaatgtggataggttgggaaaaacatgaattaggtgtgggattcattgaagaaattgaacagcatcatgactggtaaatgatggtgatgagaaagtagagaaaacctactgtttgctcttaccatttgttttttaaattttagccaaatcaagttcttgactcatacactcttacaaatattcaaatatatgttctctattttgtttccttaatccaataatgttgtaatccttttccaattaataagcaatatgttcaataccgatgcccatttaagtgtgctgttactctctaatcattattattcctttcataaatagatctgggcataggaaccaatcagaaacaatcgcttcagcaatcaagaccattgttcatcatggaggaacccatggatacctctgagcctctatctgcattaccattcactgggcagcagtcttttgagccaagtggcaaatttggacagtatccatcgatgcagatgaaccacatccaggcactggggaagtggaggacatagaacagctcaatcagtgtttgatccaacacttccatctcattaagacaagtttgatttttctttgctttttatttcatggaatacatgagaatctcttaactgttggagtttccaaggaggcatacctcatgacttcagttaatggaaagaacaaaactaaaatgctgtatggccaaagccacaaagggaaggatccacaatttacattcttggagctatcatctgtactgtactgttgtgatctactgattggcattggcatagtagtaggggtcaagtgacagaatccgtgccagcagtctccaggttcagaagcaattcaagaccctgatgatagctctccagcaaccaacacatggtgattgtgccaacttgttgctcagttataatgcagggccagtgattggtttaagtgaagaccatggttgagatcatttgtctttggtctaatagaatttgagtctagtagaatttgagtctccagggaaagagctacttgaccaaattaaactagtagcaggtagagcatgaatgacagcatattataccatcaagatgttcttagagcagtgtatggatggatcgattgtactgccatcagttgtgactgacgttgtattcaaggagaaagagaaacttgtttagaaagcactttgaaagttttttgagtacgggggtgccctgtatcaccccgttatggttgaactttctccttcaaaattaccagacttggcagcagtggcaaattattgggctaaaagacttaatcagacatattctgggttcaaggctcctaatataatacctggtgcaaacattatacttccactcattcagatggttgcatcctgccaggcatccagtgggactgggaatatggacacttgaacattaaacatcctgaagaattttggaatgacaggttacaagtgaacataatcagttctctatattaaaaaaaaaaaaaagatttgggcatagattgggctcacataatctttagagagattttttcatttttgtgaaagtacagaaattcttaactgcttatgaaatgctgattgttaaacagcatccacagctattttgtgttgtttccctgaccccaccctgaagaaaagaaaaattatggcatattgaaaacagcagtatgatgtaagagaaaagatcacaaattccttgagggtgggtcttttccatactcataagcctatttataatattcagagtaatttattgacacatattaatattccctcctatcccattaattgccaaatcatcaaacatttattgagcatctactctgtgtagggtgtaagcagtactggggacttacagtgataaaagacatagttttagccttaagtgatgtactgtttcactgaagagatggaatataagaagccaagtaatttatggaattctcttctttgtttttcttttttttttttggcagtggagtcttgctctttaaatagagcaaggctagtctggaactcctgggctcatgtggtcctcccgccttagctttcagtgtagctgggactacaggtgtgaacacagcttggaaatctcttaaccatgggagttaagtctcaaaattctggtgatacaagtggttgaaacttaaaactgtatttaaaaaataggattcgtgaatttgagatagttcataagtctgcaaaaggctgtataaatacatattttacatttactattattaattttgtagtaaatttgagtacagcactctctttatctgtggaaacttcagactctcccctattactttaatttcagtgagacattattaaatataagtgggcttacacatttgttttgctttactgacaaataatacacaacttggaggcttttttttcctttctattcttcctctaaatgttcaacacttttctgattttgtgatttgaggttgtttaatagcttcctgaggctccattgagaccgtatatacgtgacacttaacagtctagccttcctcggtacatatagatatatgatggtggctttgcctgtagtaaattcatgtagtattgtttcacatgttccagtgtcctcttatttcctgtgagttggtagttagatctagaagcttgattaaattcagattttctctctttagatcatcaactttagatcatcaacttggatcatttgtttcattttgcttttgatatgttgttttttagaattacctcttaaaattttgatttaattttataatcatgtaaaatgtttataaatttccaaattcagatcagcaaaacacaataaaatctattcagagaaggcaaa

SEQ ID NO: 441570 - DNA, 1070 bp, Homo sapiens
  misc_feature (3)..(3): n is a, c, g, or t
  misc_feature (41)..(41): n is a, c, g, or t
  misc_feature (69)..(69): n is a, c, g, or t
  misc_feature (85)..(85): n is a, c, g, or t
agnggtcccctggaagcaaagccttgtcagcttgcctactngacaaagtagtaaaaagcactaatcagngttgagtcagatgtcnacagaaaaatacaatacctatgaggaatccagcaaaaattaccaaattgtgaccaatctttacacacatgcacaggtgtccctcagtatctgtggggcattggttctaggaccacttatggataccaacatctatggatgctcaagtccctgatataaaatggtggactatttgcatataacctgtgtacatcccgtattatttaaatcatccctagatcacttataatacgtaatacaatgtaaatgccatgtaaataactgttatactgtattaaggaataacaacaagaaaaatgtacatgttcagtacagacgcaattttttttgtgtgtggaatattttcattccaaggtcagttgaacccatggacataggaggctgactcgtgtgtgtgtgtgtgtgtgtgtgtgtgtgtgtgtgtgcatacagacacacatatttctgaaatgtaaatattctctttttaaaaaaattattatcacagctaaacaaattaccagtaattcttttatcctcatatacccggtgttcagattttctagattggctcctaatttttttacagattatttgaatctgattcaattcatgtactgtaatgtttgataacttaagtaccctttataggttctcttttacctcttctttattaaattccttgtaatttgttgtactaaatagattgtcttctagaatttcctgtagtctgaattatgtagtattgtttcacatgttccagtgtcctcttatttcctgtgagttggtagttagatctagaagcttgattaaattcagattttctctctttagatcatcaactttagatcatcaacttggatcatttgtttcattttgcttttgatatgttgttttttagaattacctcttaaaattttgatttaattttataatcatgtaaaatgtttataaatttccaaattcagatcagcaaaacacaataaaatctattcagagaaggcaaa

SEQ ID NO: 441571 - DNA, 4370 bp, Homo sapiens
tgtcccggaagtgccttctctcctcccgggtctgcgcggacgcggcctccttacctcatttgtcctcgcccctccccgtccctctacgcgttttggtccctgtttggtgctttctgtttgcagctacggcagtgagtatgtatgtgacggaccccgagtcacccgcggcctgggacccctgcctaccctccgtctcgccagccgagctgtggaactagcgcgtgccccctcgccgacctcggcgtctccggtccgcccctcacttgtggtggggcgcagctcctggtccctcagctgcgcgccgccccacgcggccgggctgcgggtctagggggtccgcatctccctggctttccaagggctaaggtcgtgattctagggcggctgggcgtccagggcctcggtgggggtggcgtgtctgccctttttatctccccgcaaggcccccagtcttctagggaagccagtcagtgaagcgcggaggtccgggcgcgccgagagagagtccagtctttgaggaccgagtagtcctgggccacctcccgcctctgctgtcagaagcagcagctgccgccgtggaatccaaaatttcgggagctgtgaccctttcctcatgtaaaacgagtagtcttggacgatctgggcataggaaccaatcagaaacaatcgcttcagcaatcaagaccattgttcatcatggaggaacccatggatacctctgagcctctatctgcattaccattcactgggcagcagtcttttgagccaagtggcaaatttggacagtatccatcgatgcagatgaaccacatccaggcactggggaagtggaggacatagaacagctcaatcagtgtttgatccaacacttccatctcattaagacaagtttgatttttctttgctttttatttcatggaatacatgagaatctcttaactgttggagtttccaaggaggcatacctcatgacttcagttaatggaaagaacaaaactaaaatgctgtatggccaaagccacaaagggaaggatccacaatttacattcttggagctatcatctgtactgtactgttgtgatctactgattggcattggcatagtagtaggggtcaagtgacagaatccgtgccagcagtctccaggttcagaagcaattcaagaccctgatgatagctctccagcaaccaacacatggtgattgtgccaacttgttgctcagttataatgcagggccagtgattggtttaagtgaagaccatggttgagatcatttgtctttggtctaatagaatttgagtctagtagaatttgagtctccagggaaagagctacttgaccaaattaaactagtagcaggtagagcatgaatgacagcatattataccatcaagatgttcttagagcagtgtatggatggatcgattgtactgccatcagttgtgactgacgttgtattcaaggagaaagagaaacttgtttagaaagcactttgaaagttttttgagtacgggggtgccctgtatcaccccgttatggttgaactttctccttcaaaattaccagacttggcagcagtggcaaattattgggctaaaagacttaatcagacatattctgggttcaaggctcctaatataatacctggtgcaaacattatacttccactcattcagatggttgcatcctgccaggcatccagtgggactgggaatatggacacttgaacattaaacatcctgaagaattttggaatgacaggttacaagtgaacataatcagttctctatattaaaaaaaaaaaaaagatttgggcatagattgggctcacataatctttagagagattttttcatttttgtgaaagtacagaaattcttaactgcttatgaaatgctgattgttaaacagcatccacagctattttgtgttgtttccctgaccccaccctgaagaaaagaaaaattatggcatattgaaaacagcagtatgatgtaagagaaaagatcacaaattccttgagggtgggtcttttccatactcataagcctatttataatattcagagtaatttattgacacatattaatattccctcctatcccattaattgccaaatcatcaaacatttattgagcatctactctgtgtagggtgtaagcagtactggggacttacagtgataaaagacatagttttagccttaagtgatgtactgtttcactgaagagatggaatataagaagccaagtaatttatggaattctcttctttgtttttcttttttttttttggcagtggagtcttgctctttaaatagagcaaggctagtctggaactcctgggctcatgtggtcctcccgccttagctttcagtgtagctgggactacaggtgtgaacacagcttggaaatctcttaaccatgggagttaagtctcaaaattctggtgatacaagtggttgaaacttaaaactgtatttaaaaaataggattcgtgaatttgagatagttcataagtctgcaaaaggctgtataaatacatattttacatttactattattaattttgtagtaaatttgagtacagcactctctttatctgtggaaacttcagactctcccctattactttaatttcagtgagacattattaaatataagtgggcttacacatttgttttgctttactgacaaataatacacaacttggaggcttttttttcctttctattcttcctctaaatgttcaacacttttctgattttgtgatttgaggttgtttaatagcttcctgaggctccattgagaccgtatatacgtgacacttaacagtctagccttcctcggtacatatagatatatgatggtggctttgcctgtagtaaattcatgccaaaacataggctttcagtgcctattacatatggctttcagctctctctactgagggatgtaggagtttatttctgaggtctgagcctcttttcctttacttcctttactctttcctaagccttctttataaaaactatgcatgttctattgttttcctttttgattccctttcttttattatccccagtaggagtgacttgtaattctcatatgttagaaaggcagatctcctggttgaagaaaagatccacccaagcaagtcagcatgtttaataatttttgagggggatctcaaatgtgggaaggattgttatataagacaaccaaatgatgacatgagacaataaatgctataggaattatggaggaataattagctatttattttcttggttagggaagagatattattagttgtagaagtaattactaacttctacattttttattgtggaaatcaaaaatatatatatgaaaataaaatgttataattgacttcagtgtcccataaaccagcttcaacaattaccaaattgtgaccaatctttacacacatgcacaggtgtccctcagtatctgtggggcattggttctaggaccacttatggataccaacatctatggatgctcaagtccctgatataaaatggtggactatttgcatataacctgtgtacatcccgtattatttaaatcatccctagatcacttataatacgtaatacaatgtaaatgccatgtaaataactgttatactgtattaaggaataacaacaagaaaaatgtacatgttcagtacagacgcaattttttttgtgtgtggaatattttcattccaaggtcagttgaacccatggacataggaggctgactcgtgtgtgtgtgtgtgtgtgtgtgtgtgtgtgtgtgtgcatacagacacacatatttctgaaatgtaaatattctctttttaaaaaaattattatcacagctaaacaaattaccagtaattcttttatcctcatatacccggtgttcagattttctagattggctcctaatttttttacagattatttgaatctgattcaattcatgtactgtaatgtttgataacttaagtaccctttataggttctcttttacctcttctttattaaattccttgtaatttgttgtactaaatagattgtcttctagaatttcctgtagtctgaattatgtagtattgtttcacatgttccagtgtcctcttatttcctgtgagttggtagttagatctagaagcttgattaaattcagattttctctctttagatcatcaactttagatcatcaacttggatcatttgtttcattttgcttttgatatgttgttttttagaattacctcttaaaattttgatttaattttataatcatgtaaaatgtttataaatttccaaattcagatcagcaaaacacaataaaatctattcagagaaggcaaa

SEQ ID NO: 441572 - DNA, 3872 bp, Homo sapiens
tgtcccggaagtgccttctctcctcccgggtctgcgcggacgcggcctccttacctcatttgtcctcgcccctccccgtccctctacgcgttttggtccctgtttggtgctttctgtttgcagctacggcagtgagtatatctgggcataggaaccaatcagaaacaatcgcttcagcaatcaagaccattgttcatcatggaggaacccatggatacctctgagcctctatctgcattaccattcactgggcagcagtcttttgagccaagtggcaaatttggacagtatccatcgatgcagatgaaccacatccaggcactggggaagtggaggacatagaacagctcaatcagtgtttgatccaacacttccatctcattaagacaagtttgatttttctttgctttttatttcatggaatacatgagaatctcttaactgttggagtttccaaggaggcatacctcatgacttcagttaatggaaagaacaaaactaaaatgctgtatggccaaagccacaaagggaaggatccacaatttacattcttggagctatcatctgtactgtactgttgtgatctactgattggcattggcatagtagtaggggtcaagtgacagaatccgtgccagcagtctccaggttcagaagcaattcaagaccctgatgatagctctccagcaaccaacacatggtgattgtgccaacttgttgctcagttataatgcagggccagtgattggtttaagtgaagaccatggttgagatcatttgtctttggtctaatagaatttgagtctagtagaatttgagtctccagggaaagagctacttgaccaaattaaactagtagcaggtagagcatgaatgacagcatattataccatcaagatgttcttagagcagtgtatggatggatcgattgtactgccatcagttgtgactgacgttgtattcaaggagaaagagaaacttgtttagaaagcactttgaaagttttttgagtacgggggtgccctgtatcaccccgttatggttgaactttctccttcaaaattaccagacttggcagcagtggcaaattattgggctaaaagacttaatcagacatattctgggttcaaggctcctaatataatacctggtgcaaacattatacttccactcattcagatggttgcatcctgccaggcatccagtgggactgggaatatggacacttgaacattaaacatcctgaagaattttggaatgacaggttacaagtgaacataatcagttctctatattaaaaaaaaaaaaaagatttgggcatagattgggctcacataatctttagagagattttttcatttttgtgaaagtacagaaattcttaactgcttatgaaatgctgattgttaaacagcatccacagctattttgtgttgtttccctgaccccaccctgaagaaaagaaaaattatggcatattgaaaacagcagtatgatgtaagagaaaagatcacaaattccttgagggtgggtcttttccatactcataagcctatttataatattcagagtaatttattgacacatattaatattccctcctatcccattaattgccaaatcatcaaacatttattgagcatctactctgtgtagggtgtaagcagtactggggacttacagtgataaaagacatagttttagccttaagtgatgtactgtttcactgaagagatggaatataagaagccaagtaatttatggaattctcttctttgtttttcttttttttttttggcagtggagtcttgctctttaaatagagcaaggctagtctggaactcctgggctcatgtggtcctcccgccttagctttcagtgtagctgggactacaggtgtgaacacagcttggaaatctcttaaccatgggagttaagtctcaaaattctggtgatacaagtggttgaaacttaaaactgtatttaaaaaataggattcgtgaatttgagatagttcataagtctgcaaaaggctgtataaatacatattttacatttactattattaattttgtagtaaatttgagtacagcactctctttatctgtggaaacttcagactctcccctattactttaatttcagtgagacattattaaatataagtgggcttacacatttgttttgctttactgacaaataatacacaacttggaggcttttttttcctttctattcttcctctaaatgttcaacacttttctgattttgtgatttgaggttgtttaatagcttcctgaggctccattgagaccgtatatacgtgacacttaacagtctagccttcctcggtacatatagatatatgatggtggctttgcctgtagtaaattcatgccaaaacataggctttcagtgcctattacatatggctttcagctctctctactgagggatgtaggagtttatttctgaggtctgagcctcttttcctttacttcctttactctttcctaagccttctttataaaaactatgcatgttctattgttttcctttttgattccctttcttttattatccccagtaggagtgacttgtaattctcatatgttagaaaggcagatctcctggttgaagaaaagatccacccaagcaagtcagcatgtttaataatttttgagggggatctcaaatgtgggaaggattgttatataagacaaccaaatgatgacatgagacaataaatgctataggaattatggaggaataattagctatttattttcttggttagggaagagatattattagttgtagaagtaattactaacttctacattttttattgtggaaatcaaaaatatatatatgaaaataaaatgttataattgacttcagtgtcccataaaccagcttcaacaattaccaaattgtgaccaatctttacacacatgcacaggtgtccctcagtatctgtggggcattggttctaggaccacttatggataccaacatctatggatgctcaagtccctgatataaaatggtggactatttgcatataacctgtgtacatcccgtattatttaaatcatccctagatcacttataatacgtaatacaatgtaaatgccatgtaaataactgttatactgtattaaggaataacaacaagaaaaatgtacatgttcagtacagacgcaattttttttgtgtgtggaatattttcattccaaggtcagttgaacccatggacataggaggctgactcgtgtgtgtgtgtgtgtgtgtgtgtgtgtgtgtgtgtgcatacagacacacatatttctgaaatgtaaatattctctttttaaaaaaattattatcacagctaaacaaattaccagtaattcttttatcctcatatacccggtgttcagattttctagattggctcctaatttttttacagattatttgaatctgattcaattcatgtactgtaatgtttgataacttaagtaccctttataggttctcttttacctcttctttattaaattccttgtaatttgttgtactaaatagattgtcttctagaatttcctgtagtctgaattatgtagtattgtttcacatgttccagtgtcctcttatttcctgtgagttggtagttagatctagaagcttgattaaattcagattttctctctttagatcatcaactttagatcatcaacttggatcatttgtttcattttgcttttgatatgttgttttttagaattacctcttaaaattttgatttaattttataatcatgtaaaatgtttataaatttccaaattcagatcagcaaaacacaataaaatctattcagagaaggcaaa

SEQ ID NO: 441573 - DNA, 747 bp, Homo sapiens
gcgcatgcgcgcttcgtcacaagggtgcgaggaaagtcagtgagcaaatcgcggaccaccggggctgccagctcgcctgactcccggcctcttgcgctcctaggggcggagaagggtgcgggctcttcgccctttgtgtcctccttctttcactaacttctggactttccagctcttccgaagttcgttcttgcgcaaagcccaaaggctggaaaaccgtccacgatgaccagcatgactcagtctctgcgggaggtgataaaggccatgaccaaggctcgcaattttgagagagttttgggaaagattactcttgtctctgctgctcctgggaaagtgatttgtgaaatgaaagtagaagaagagcataccaatgcaataggcactctccacggcggtttgacagccacgttagtagataacatatcaacaatggctctgctatgcacggaaaggggagcacccggagtcagtgtcgatatgaacataacgtacatgtcacctgcaaaattaggagaagatatagtgattacagcacatgttctgaagcaaggaaaaacacttgcatttacctctgtggatctgaccaacaaggccacaggaaaattaatagcacaaggaagacacacaaaacacctgggaaactgagagaacagcagaatgacctaaagaaacccaacaatgaatatcaagtatagatttgactcaaacaattgtaatttttgaaataaactagcaaaaccagaa

SEQ ID NO: 441574 - DNA, 499 bp, Homo sapiens
tgtgctgttctagaacaccacaacagcccaagaaggaagaaaacaaaaaaaactctgcattactcttgtctctgctgctcctgggaaagtgatttgtgaaatgaaagtagaagaagagcataccaatgcaataggcactctccacggcggtttgacagccacgttagtagataacatatcaacaatggctctgctatgcacggaaaggggagcacccggagtcagtgtcgatatgaacataacgtacatgtcacctgcaaaattaggagaagatatagtgattacagcacatgttctgaagcaaggaaaaacacttgcatttacctctgtggatctgaccaacaaggccacaggaaaattaatagcacaaggaagacacacaaaacacctgggaaactgagagaacagcagaatgacctaaagaaacccaacaatgaatatcaagtatagatttgactcaaacaattgtaatttttgaaataaactagcaaaaccagaa

SEQ ID NO: 441575 - DNA, 693 bp, Homo sapiens
gcgcatgcgcgcttcgtcacaagggtgcgaggaaagtcagtgagcaaatcgcggaccaccggggctgccagctcgcctgactcccggcctcttgcgctcctaggggcggagaagggtgcgggctcttcgccctttgtgtcctccttctttcactaacttctggactttccagctcttccgaagttcgttcttgcgcaaagcccaaaggctggaaaaccgtccacgatgaccagcatgactcagtctctgcgggaggtgataaaggccatgaccaaggctcgcaattttgagagagttttgggaaagattactcttgtctctgctgctcctgggaaagtgatttgtgaaatgaaagtagaagaagagcataccaatgcaataggcactctccacggcggtttgacagccacgttagtagataacatatcaacaatggctctgctatgcacggaaaggggagcacccggagtcagtgtcgatatgaacataacgtacatgtcacctgcaaaattaggagaagatatagtgattacagcacatgttctgaagcaaggaaaaacacttgcatttacctctgtggatctgaccaacaaggccacaggaaaattaatagcacaaggaagacacacgaatatcaagtatagatttgactcaaacaattgtaatttttgaaataaactagcaaaaccagaa

SEQ ID NO: 441576 - DNA, 795 bp, Homo sapiens
ggtaagagcacatgcgcgctgcgcgacacacggtgcgatggataatcatggacctaatcctgctgtgacctaccgagatctcgggccatctcgactgatgcccggacttctctgccgctcctaagagcggccagaagggtgccgactcttctgccttatgtgctaccaccttcttctcaactatctttctcggaggcttctccacactctgtccgttcacgatggcgtacttgcagcatcagcctccacagcgccctggaccagccgtccacgatgaccagcatgactcagtctctgcgggaggtgataaaggccatgaccaaggctcgcaattttgagagagttttgggaaagattactcttgtctctgctgctcctgggaaagtgatttgtgaaatgaaagtagaagaagagcataccaatgcaataggcactctccacggcggtttgacagccacgttagtagataacatatcaacaatggctctgctatgcacggaaaggggagcacccggagtcagtgtcgatatgaacataacgtacatgtcacctgcaaaattaggagaagatatagtgattacagcacatgttctgaagcaaggaaaaacacttgcatttacctctgtggatctgaccaacaaggccacaggaaaattaatagcacaaggaagacacacaaaacacctgggaaactgagagaacagcagaatgacctaaagaaacccaacaatgaatatcaagtatagatttgactcaaacaattgtaatttttgaaataaactagcaaaaccagaa

SEQ ID NO: 441577 - DNA, 1036 bp, Homo sapiens
gcgcatgcgcgcttcgtcacaagggtgcgaggaaagtcagtgagcaaatcgcggaccaccggggctgccagctcgcctgactcccggcctcttgcgctcctaggggcggagaagggtgcgggctcttcgccctttgtgtcctccttctttcactaacttctggactttccagctcttccgaagttcgttcttgcgcaaagcccaaaggctggaaaaccgtccacgatgaccagcatgactcagtctctgcgggaggtgataaaggccatgaccaaggctcgcaattttgagagagttttgggaaagtaacacgtggaggaacatacgttgggaatatcaactgacacgcactgtgctaggatctagaaataccatgtggactccaacacacatagaaataaggaagtggaattccaaaggaaggcaaagtgtaaagtcgtctttatggaaatgagtgatgaaggtgaatacctgaatgagatgtcaagaggaggaacacactggagagaagcagtaaagatttaggactgaaccttaaagacatacaggcttgagagaaagaaagcatgtaaagaagacagaaatggttagaaagattactcttgtctctgctgctcctgggaaagtgatttgtgaaatgaaagtagaagaagagcataccaatgcaataggcactctccacggcggtttgacagccacgttagtagataacatatcaacaatggctctgctatgcacggaaaggggagcacccggagtcagtgtcgatatgaacataacgtacatgtcacctgcaaaattaggagaagatatagtgattacagcacatgttctgaagcaaggaaaaacacttgcatttacctctgtggatctgaccaacaaggccacaggaaaattaatagcacaaggaagacacacaaaacacctgggaaactgagagaacagcagaatgacctaaagaaacccaacaatgaatatcaagtatagatttgactcaaacaattgtaatttttgaaataaactagcaaaaccagaa

SEQ ID NO: 441578 - DNA, 1050 bp, Homo sapiens
gcgcatgcgcgcttcgtcacaagggtgcgaggaaagtcagtgagcaaatcgcggaccaccggggctgccagctcgcctgactcccggcctcttgcgctcctaggggcggagaagggtgcgggctcttcgccctttgtgtcctccttctttcactaacttctggactttccagctcttccgaagttcgttcttgcgcaaagcccaaaggctggaaaaccgtccacgatgaccagcatgactcagtctctgcgggaggtgataaaggccatgaccaaggctcgcaattttgagagagttttgggaaagattactcttgtctctgctgctcctgggaaagtgatttgtgaaatgaaagtagaagaagagcataccaatgcaataggcactctccacggcggtttgacagccacgttagtagataacatatcaacaatggctctgctatgcacggaaaggggagcacccggagtcagtgtcgatatgaacataacgtacatgtcacctgcaaaattaggagaagatatagtgattacagcacatgttctgaagcaaggaaaaacacttgcatttacctctgtggatctgaccaacaaggccacaggaaaattaatagcacaaggaagacacacaaaacacctgggaaactgagagaacagcagaatgacctaaagaaacccaacaatgaatatcaagtatagatttgactcaaacaattgtaatttttgaaataaactagcaaaaccagaaaaaaaaaaaaaaaaaaaaaaaaaaatttggggggggcgggcagaaagagtttccaaagacacacccctgtggggggcgcgggggcccaggtaggtgtaaggtagaccgtcgggacaaaaggcgtggccccaagagagaaaccgtgggcaagagacacacggcgtcgggttttctccaccaaaaaaaaaagcgcgggggggaacccgagcgcgttcggaaaaatcccaagatgggggccaggaggccataccggggtgtcatcaaccgggggccaggcaggcagaataaatacgcgacagaggg

SEQ ID NO: 441579 - DNA, 2440 bp, Homo sapiens
cccaggctggagtccagtggcgcgatctcggctcactgcaacctctgcctcctgggttcctgccattcttctgcctcagcctcaaaagtagctgagattacaggtgcccaccaccatgcctagctaacttctgtatttttagttgagacggggtttcaccacgttggccgggctggtctcgaactcctgccctcaggtgatctgcccacctcggcctcccaaagtgctgggattacaggcttgagccatcgtgcccggccagatccacctttcttatacctcctagccataaatactgaagtcttattttgaatatggcaaaaatacatatcctttttaaaggtttctttctaaaaagcagaaacataaaaataaactgtaaggaaattatttccctttaaaacattaacatttgttttaaacaatcctcatctccccaattttttttttaattagctggagccagctgagttaaagacaacttatgattacaagtgactaggatgtacatctcttaaaaatatagacagtccatcatcaagattgtaaggacatcatatcaattccttatagttgttatattgtcattttagagtcaaataaattgtaaatatggataggacaatatacagacaccaagtgatatttcatctaagaagttaaggagattaaatgaaagctggaggaaatctttcaccagccccaaataaatgtgaagtgggaaatgtaaagggaaaaaaggggaggcaagaaaacctcttctcacatatttgggaaaagaaacttgtgtgggtaaggaatgggtaaaatagaacctggttaggaccagccattcacatttgatagtacagaaagcttaccaatactaccgttaaaactatttttaggagtaaaataagttacataggaacactgttgtgagatgcacacaactttccctttgaaaaattatctgctgttaactatattcattttctttcaaggtacatgtcacctgcaaaattaggagaagatatagtgattacagcacatgttctgaagcaaggaaaaacacttgcatttacctctgtggatctgaccaacaaggccacaggaaaattaatagcacaaggaagacacacaaaacacctgggaaactgagagaacagcagaatgacctaaagaaacccaacaatgaatatcaagtatagatttgactcaaacaattgtaatttttgaaataaactagcaaaaccagaagcagctagaaatattcttggaggaaaaggacctggatatcaagtagggtaaaggtgggggtgtcttttttcactttaagcatcttgttttctaatcatgtgtgataattgggtgaaaaattcttagctcaaagtgttttaaaaacaggtaaagcaaagaaactagcaggaccactctcagttaagattaaaactaaagtccagtgttaagctaaaggagaaatagaaattaatggttctaattctgtttgggctgctaggaacaacagaaatttttcatggttctagaagctggaaagtcctgggtcaaggcccagcagatcctgttaggtgagggcccgcttcctggctcatagatggtgccttctcactgtgtggtggaaggggcaagtgagccctctgggttctcgtttttgaaatggagtctcgctctgttgcccaggctggagtacagcagcacgatctcggctcactgcaatctctgccccctgggttcaagtgattctcctgcctcagcctcccaagtagctgggactataggcatgtgccatcacacctagctaatttttgtagttttttgtagaaacagggttcaccatgttggccaggctggtctcgaactcgtgacctcaggtgatccgcctgccttggccccccaaagtgctgggattacaggtgtgagccaatgtgcccagcctgggttctcttttgtaagggcacttactccaatcttgagggttctgccctcgtgatctaataacttcccaaagacccccacctgctaatatcaccttgggggttgggattttaacatacaaatttaggggaaacacatggagaccacagcaatggccaatccttagcgaatcttaggtccttcccagatctaaaatgccaagctacacttgcatttcctttttttaagattatgaaacttcaaaatatatgaactacagcccatattgaaaaataaaatagattgagccatatgcctaaaaaagacctcaagaaaagtttgaggcaaagcatgttagtgttacaggaaatggtccaatagagggggaagaaaaaaagcatgctactagccccttttcttgtaccgagaataaaaccatgcagatctcaaacctccaagtctatagtattgaaaagaccaagttcacttctcagaagtctccaagttcagttgactgtggcactct

SEQ ID NO: 441580 - DNA, 748 bp, Homo sapiens
gcgcatgcgcgcttcgtcacaagggtgcgaggaaagtcagtgagcaaatcgcggaccaccggggctgccagctcgcctgactcccggcctcttgcgctcctaggggcggagaagggtgcgggctcttcgccctttgtgtcctccttctttcactaacttctggactttccagctcttccgaagttcgttcttgcgcaaagcccaaaggctggaaaaccgtccacgatgaccagcatgactcagtctctgcgggaggtgataaaggccatgaccaaggctcgcaattttgagagagttttgggaaagattactcttgtctctgctgctcctgggaaagtgatttgtgaaatgaaagtagaagaagagcataccaatgcaataggcactctccacggcggtttgacagccacgttagtagataacatatcaacaatggctctgctatgcacggaaaggggagcacccgacagcataatataatttgttaagtgggtctcggttcgctcatagggaggttaagagtatatgtgatttcagcaccagcttctcgtcaagaatcttgctacgccctaacggcatgtctcttttcaaacacgtccgcagttattagttgagtcccagtacagcacaaggtacaaaggggaaacccatggtaggtagtgttatcattgatagatccaacattgaatatcacgggttcattttaatctttccttggtaatgcttagaatgaactagcatatcctta

SEQ ID NO: 441581 - DNA, 533 bp, Homo sapiens
gcgcatgcgcgcttcgtcacaagggtgcgaggaaagtcagtgagcaaatcgcggaccaccggggctgccagctcgcctgactcccggcctcttgcgctcctaggggcggagaagggtgcgggctcttcgccctttgtgtcctccttctttcactaacttctggactttccagctcttccgaagttcgttcttgcgcaaagcccaaaggctggaaaaccgtccacgatgaccagcatgactcagtctctgcgggaggtgataaaggccatgaccaaggctcgcaattttgagagagttttgggaaagatatagtgattacagcacatgttctgaagcaaggaaaaacacttgcatttacctctgtggatctgaccaacaaggccacaggaaaattaatagcacaaggaagacacacaaaacacctgggaaactgagagaacagcagaatgacctaaagaaacccaacaatgaatatcaagtatagatttgactcaaacaattgtaatttttgaaataaactagcaaaaccagaa

SEQ ID NO: 441582 - DNA, 958 bp, Homo sapiens
  misc_feature (4)..(4): n is a, c, g, or t
  misc_feature (29)..(29): n is a, c, g, or t
  misc_feature (47)..(47): n is a, c, g, or t
  misc_feature (60)..(60): n is a, c, g, or t
  misc_feature (65)..(65): n is a, c, g, or t
  misc_feature (67)..(67): n is a, c, g, or t
  misc_feature (72)..(73): n is a, c, g, or t
  misc_feature (80)..(80): n is a, c, g, or t
  misc_feature (82)..(83): n is a, c, g, or t
  misc_feature (94)..(94): n is a, c, g, or t
  misc_feature (98)..(100): n is a, c, g, or t
  misc_feature (102)..(102): n is a, c, g, or t
  misc_feature (114)..(117): n is a, c, g, or t
  misc_feature (119)..(119): n is a, c, g, or t
  misc_feature (122)..(122): n is a, c, g, or t
  misc_feature (126)..(127): n is a, c, g, or t
  misc_feature (130)..(130): n is a, c, g, or t
ttgngctcctaggggcggagaagggtgcnggttcttcgtcttttctntaattatttaaanaaatnancctanntaaacananntatcaacttanttannnanataattataaannnngnaanaatnnatnagatgaatataatgaataaggtctctgcgggaggtgataaaggccatgaccaaggctcgcaattttgagagagttttgggaaagattactcttgtctctgctgctcctgggaaagtgatttgtgaaatgaaagtagaagaagagcataccaatgcaataggcactctccacggcggtttgacagccacgttagtagataacatatcaacaatggctctgctatgcacggaaaggggagcacccggagtcagtgtcgatatgaacataacgtacatgtcacctgcaaaattaggagaagatatagtgattacagcacatgttctgaagcaaggaaaaacacttgcatttacctctgtggatctgaccaacaaggccacaggaaaattaatagcacaaggaagacacacaaaacacctgggaaactgagagaacagcagaatgacctaaagaaacccaacaatgaatatcaagtatagatttgactcaaacaattgtaatttttgaaataaactagcaaaaccagaaaaaaaaaaaaaaaaaaaaaaaaaaatttggggggggcgggcagaaagagtttccaaagacacacccctgtggggggcgcgggggcccaggtaggtgtaaggtagaccgtcgggacaaaaggcgtggccccaagagagaaaccgtgggcaagagacacacggcgtcgggttttctccaccaaaaaaaaaagcgcgggggggaacccgagcgcgttcggaaaaatcccaagatgggggccaggaggccataccggggtgtcatcaaccgggggccaggcaggcagaataaatacgcgacagaggg

SEQ ID NO: 441583 - DNA, 1948 bp, Homo sapiens
gcgcatgcgcgcttcgtcacaagggtgcgaggaaagtcagtgagcaaatcgcggaccaccggggctgccagctcgcctgactcccggcctcttgcgctcctaggggcggagaagggtgcgggctcttcgccctttgtgtcctccttctttcactaacttctggactttccagctcttccgaagttcgttcttgcgcaaagcccaaaggctggaaaaccgtccacgatgaccagcatgactcagtctctgcgggaggtgataaaggccatgaccaaggctcgcaattttgagagagttttgggaaagattactcttgtctctgctgctcctgggaaagtgatttgtgaaatgaaagtagaagaagagcataccaatgcaataggcactctccacggcggtttgacagccacgttagtagataacatatcaacaatggctctgctatgcacggaaaggggagcacccggagtcagtgtcgatatgaacataacgtacatgtcacctgcaaaattaggagaagatatagtgattacagcacatgttctgaagcaaggaaaaacacttgcatttacctctgtggatctgaccaacaaggccacaggaaaattaatagcacaaggaagacacacaaaacacctgggaaactgagagaacagcagaatgacctaaagaaacccaacaatgaatatcaagtatagatttgactcaaacaattgtaatttttgaaataaactagcaaaaccagaagcagctagaaatattcttggaggaaaaggacctggatatcaagtagggtaaaggtgggggtgtcttttttcactttaagcatcttgttttctaatcatgtgtgataattgggtgaaaaattcttagctcaaagtgttttaaaaacaggtaaagcaaagaaactagcaggaccactctcagttaagattaaaactaaagtccagtgttaagctaaaggagaaatagaaattaatggttctaattctgtttgggctgctaggaacaacagaaatttttcatggttctagaagctggaaagtcctgggtcaaggcccagcagatcctgttaggtgagggcccgcttcctggctcatagatggtgccttctcactgtgtggtggaaggggcaagtgagccctctgggttctcgtttttgaaatggagtctcgctctgttgcccaggctggagtacagcagcacgatctcggctcactgcaatctctgccccctgggttcaagtgattctcctgcctcagcctcccaagtagctgggactataggcatgtgccatcacacctagctaatttttgtagttttttgtagaaacagggttcaccatgttggccaggctggtctcgaactcgtgacctcaggtgatccgcctgccttggccccccaaagtgctgggattacaggtgtgagccaatgtgcccagcctgggttctcttttgtaagggcacttactccaatcttgagggttctgccctcgtgatctaataacttcccaaagacccccacctgctaatatcaccttgggggttgggattttaacatacaaatttaggggaaacacatggagaccacagcaatggccaatccttagcgaatcttaggtccttcccagatctaaaatgccaagctacacttgcatttcctttttttaagattatgaaacttcaaaatatatgaactacagcccatattgaaaaataaaatagattgagccatatgcctaaaaaagacctcaagaaaagtttgaggcaaagcatgttagtgttacaggaaatggtccaatagagggggaagaaaaaaagcatgctactagccccttttcttgtaccgagaataaaaccatgcagatctcaaacctccaagtctatagtattgaaaagaccaagttcacttctcagaagtctccaagttcagttgactgtggcactct

SEQ ID NO: 441584 - DNA, 1939 bp, Homo sapiens
  misc_feature (1263)..(1263): n is a, c, g, or t
  misc_feature (1288)..(1288): n is a, c, g, or t
  misc_feature (1292)..(1292): n is a, c, g, or t
  misc_feature (1325)..(1325): n is a, c, g, or t
  misc_feature (1344)..(1344): n is a, c, g, or t
  misc_feature (1364)..(1364): n is a, c, g, or t
  misc_feature (1367)..(1367): n is a, c, g, or t
  misc_feature (1369)..(1369): n is a, c, g, or t
  misc_feature (1381)..(1381): n is a, c, g, or t
  misc_feature (1397)..(1397): n is a, c, g, or t
  misc_feature (1411)..(1411): n is a, c, g, or t
  misc_feature (1422)..(1422): n is a, c, g, or t
  misc_feature (1439)..(1439): n is a, c, g, or t
  misc_feature (1458)..(1458): n is a, c, g, or t
  misc_feature (1472)..(1472): n is a, c, g, or t
  misc_feature (1484)..(1484): n is a, c, g, or t
  misc_feature (1487)..(1487): n is a, c, g, or t
  misc_feature (1489)..(1489): n is a, c, g, or t
  misc_feature (1504)..(1506): n is a, c, g, or t
  misc_feature (1508)..(1508): n is a, c, g, or t
  misc_feature (1548)..(1548): n is a, c, g, or t
  misc_feature (1550)..(1551): n is a, c, g, or t
  misc_feature (1554)..(1555): n is a, c, g, or t
  misc_feature (1562)..(1562): n is a, c, g, or t
  misc_feature (1565)..(1565): n is a, c, g, or t
  misc_feature (1567)..(1567): n is a, c, g, or t
  misc_feature (1577)..(1577): n is a, c, g, or t
  misc_feature (1586)..(1586): n is a, c, g, or t
  misc_feature (1592)..(1592): n is a, c, g, or t
  misc_feature (1594)..(1594): n is a, c, g, or t
  misc_feature (1599)..(1599): n is a, c, g, or t
  misc_feature (1603)..(1603): n is a, c, g, or t
gcgcatgcgcgcttcgtcacaagggtgcgaggaaagtcagtgagcaaatcgcggaccaccggggctgccagctcgcctgactcccggcctcttgcgctcctaggggcggagaagggtgcgggctcttcgccctttgtgtcctccttctttcactaacttctggactttccagctcttccgaagttcgttcttgcgcaaagcccaaaggctggaaaaccgtccacgatgaccagcatgactcagtctctgcgggaggtgataaaggccatgaccaaggctcgcaattttgagagagttttgggaaagattactcttgtctctgctgctcctgggaaagtgatttgtgaaatgaaagtagaagaagagcataccaatgcaataggcactctccacggcggtttgacagccacgttagtagataacatatcaacaatggctctgctatgcacggaaaggggagcacccggagtcagtgtcgatatgaacataacgtacatgtcacctgcaaaattaggagaagatatagtgattacagcacatgttctgaagcaaggaaaaacacttgcatttacctctgtggatctgaccaacaaggccacaggaaaattaatagcacaaggaagacacacaaaacacctgggaaactgagagaacagcagaatgacctaaagaaacccaacaatgaatatcaagtatagatttgactcaaacaattgtaatttttgaaataaactagcaaaaccagaagcagctagaaatattcttggaggaaaaggacctggatatcaagtagggtaaaggtgggggtgtcttttttcactttaagcatcttgttttctaatcatgtgtgataattgggtgaaaaattcttagctcaaagtgttttaaaaacaggtaaagcaaagaaactagcaggaccactctcagttaagattaaaactaaagtccagtgttaagctaaaggagaaatagaaattaatggttctaattctgtttgggctgctaggaacaacagaaatttttcatggttctagaagctggaaagtcctgggtcaaggcccagcagatcctgttaggtgagggcccgcttcctggctcatagatggtgccttctcactgtgtggtggaaggggcaagtgagccctctgggttctcgtttttgaaatggagtctcgctctgttgcccaggctggagtacagcagcacgatctcggctcactgcaatctctgccccctgggttcaactcagccccccccctcccncccgcccaccatacccctctccccncacncctccctaatttttctacttttttctacacacncccttcaccatcttccccnccctcctctcccactcctcnccncncctcatcccccncccttccccccccccncccctcccatcacncctctcacccnatctcccccccctcccnccccttttctcaccccacncaccccaatcttcncccctctccccnccncntctcatcacttcccnnncnccccccccccctcatatccccttcccccttcccattttcncnnccnnatttacnccncncacatccccnccaccccantccccnanccttncccnctcttccgtccttcccagatctaaaatgccaagctacacttgcatttcctttttttaagattatgaaacttcaaaatatatgaactacagcccatattgaaaaataaaatagattgagccatatgcctaaaaaagacctcaagaaaagtttgaggcaaagcatgttagtgttacaggaaatggtccaatagagggggaagaaaaaaagcatgctactagccccttttcttgtaccgagaataaaaccatgcagatctcaaacctccaagtctatagtattgaaaagaccaagttcacttctcagaagtctccaagttcagttgactgtggcactct

SEQ ID NO: 441585 - DNA, 684 bp, Homo sapiens
gcgcatgcgcgcttcgtcacaagggtgcgaggaaagtcagtgagcaaatcgcggaccaccggggctgccagctcgcctgactcccggcctcttgcgctcctaggggcggagaagggtgcgggctcttcgccctttgtgtcctccttctttcactaacttctggactttccagctcttccgaagttcgttcttgcgcaaagcccaaaggctggaaaaccgtccacgatgaccagcatgactcagtctctgcgggaggtgataaaggccatgaccaaggctcgcaattttgagagagttttgggaaagattactcttgtctctgctgctcctgggaaagtgatttgtgaaatgaaagtagaagaagagcataccaatgcaataggcactctccacggcggtttgacagccacgttagtagataacatatcaacaatggctctgctatgcacggaaaggggagcacccggagtcagtgtcgatatgaacataacgtacatgtcacctgcaaaattaggagaagatatagtgattacagcacatgttctgaagcaaggaaaaacacttgcatttacctctgtggatctgaccaacaaggccacaggaaaattaatagcacaaggaagacacacaaaacacctgggaaactgagagaacagcctctcaaacactggaaattaagccttt

SEQ ID NO: 441586 - DNA, 3315 bp, Homo sapiens
gttttttttcatatcaaatttacctgtttattcattccatagcaagcaggatattcactatttaaaacaaatttaagcagatttctgttagatttctttaaatcactgaaaagtaacacaaaaatacatataggtagtaactaagtactgacaaagtattctacctatgcaatatcctattaaatgtctaaattaccatatgtaaatttaattgtattatttactcaatggggaaaatctggattacagaactgaggaaaattatgttttatgtaaattataaaaggccaaagtcaatcatgttgaataaaataattttgaaatataagccagtaatataccatatgagtatcccaagagaaaccctggatagaaagaaacttttaaagtcactctttttttttttattagtaatgttaatgtttgagctcagtgtttgagcatgctggttttacctatttatgctaattttaaaccaacaattgaagtgagaaaataatcatttatccttgaaagtatctttagcatggtcttcctaattaaaaataccacttaaaaaagtgaggcagcaaaagcatgaactggagtcagtggtctgtctgggttaaaattggccccacgatttactacctatgacttcaagcaagttgcttaacctcgcacttcatcccacttcattatctcatttgtgaaatagaggtaaataattaaccctgtactcacagggaataccgagattatgcatgtaaagtgcttacagtgcctagcacatagtaagtgcctaataaatgttagccataaatattattgtgggtatagaaaatcaaattccctagttgcaaaatgtatgcactaaatgctgaatatcaaagaagtcaaaattcaaccacacaagtcttaacagttatagagtctttgcatggacacagtttcgaagctaaaaaatgagaacctaatattacatgcaagttatgtgactcatcagtaaattcttcctagaaaaacaaactataccacttgtcagattcttccagcataagcctgagtccccttgcacctataattagattcttattttactatcttttgcgtatcttgtattaattttacttggttgataagatgttgaagaaaccatggaattatacacagcactatacattattactatagaatgtctggtccctcccatcataaatatggtttaatgaagttattgaaaaacttcacaatatcgagctgcaattcttttttctttttatacaaatacaagttaattagctctattaagttgcaattttatttttataaagctttgtaaagttatgaacatggaaaccctaagaatcacctaagctttttacataagtaaatttcaagttgacagtctgtccattttgaactatttataattaacaggacacttaacacagtaatatcttagacaaggaagagggcattaattctgcaggcaggtagcaatgaaaatgccaaacctgaacaatcagtcactatttccttatacagtttgagtaaaagaggtagactacagaaagaaaaaaaaaagtgaatataaaatgtatcttccccaaatacaactctacttcaataagtcttgaagattaccgatgacatcaacaaaaatgaatgaactcagggaatgagttctttctccccatcaaagaaaaaaacagcatgtgtaattttaaatttgaaaaaaaaaaagaatggcaatttgcaagccaaaagaaaaccagattcacattctactatttacatttgttctattcacaggtcaaaaataaaatatttcattagataatttaaaaaaaaaacacttttttaaaacaaatgtattttactccatcaatactgcaaggaagataactgaatttagaaatgctctctctctacagcaaagttaacttaacttttcggggcccaactggcctatcatttagatctttaatagcagccatagcttcattatagtttatcatagcaacaatggcttcccctgtaggtaagccttgctcattatactgtatcgaaactgaatcaggtatgattctgtaaccatggaaaaagtctaaaatttcattcacattagctttaaatggaagattcattatcttaataggagttactctacctgaaccacaatttatttttggatcaggcataaatctcccctcaggaaaacttcccatattatgctttccaaaatcaaacttgccaccttctgggcgaccaaaattcacaaaagggcggtgacttctaaaatcatcaggcgggctcctaaaatcctcaccaggaggtctaaaattgtcaggaagtctagggtcctcctccggagcttccctaaggtcttcctctgggagctgcctgaagtcctcatcagaagggcatctaaaatcttcctcctgggggctcctgaagtcctcatcaggagggtgcctaaagtcttcatcaggagggcccctgaagtcttcatctggtgggtgcctgaaatcttcctctcgggagcgcctgaaatgctcctgaggcggccgcctgaaatgctcctggggcggtctccggaagtgctccgggggcgggcgcctgaaatgctctgggggtggccgcctgaagtgctctgggggtggccgccggaagtgctctgggggaggccgcctaaaatgctctggaggtggtctccggaaatgctctgggggtggccgacggaaatgctcctgaggtggcctccggaaatgctcctggggtgactgcctgaagtcctcctcaggggaatgcctgaaatcctcctctgggggccgcctgaagtcatcctcgggtggtcgcctccattctccctgaagaggccgcctaaagtcctcctctgggggccgtctccagtcctcctcaggtggccgcctgaaatcttcctctgggagccaccttaagtcctcctcagggggttgcctgaagtcctcctcggggagctgcctgaagtcctccgtgggagaccgcctgaaatcctcctccagtggccgcctccagtcctcctcaaggggcctcctccagtcctcctccctagggtgcctgaagtcatcctccggagggcgcctgaaatcttcctcccaagggcgcctgaagtcctcctcagaaggccgcctgaagtcttcctccctaggtcgcctgaagtcctctggggagtgcctgaagtcctccggggggaacctaaagtcctctgaggagtgtcggaagtcttctggagggtgcctgtcaggctgccggaaatccctctggggatgcttgaagttatccagttgcctc

SEQ ID NO: 441587 - DNA, 3262 bp, Homo sapiens
gttttttttcatatcaaatttacctgtttattcattccatagcaagcaggatattcactatttaaaacaaatttaagcagatttctgttagatttctttaaatcactgaaaagtaacacaaaaatacatataggtagtaactaagtactgacaaagtattctacctatgcaatatcctattaaatgtctaaattaccatatgtaaatttaattgtattatttactcaatggggaaaatctggattacagaactgaggaaaattatgttttatgtaaattataaaaggccaaagtcaatcatgttgaataaaataattttgaaatataagccagtaatataccatatgagtatcccaagagaaaccctggatagaaagaaacttttaaagtcactctttttttttttattagtaatgttaatgtttgagctcagtgtttgagcatgctggttttacctatttatgctaattttaaaccaacaattgaagtgagaaaataatcatttatccttgaaagtatctttagcatggtcttcctaattaaaaataccacttaaaaaagtgaggcagcaaaagcatgaactggagtcagtggtctgtctgggttaaaattggccccacgatttactacctatgacttcaagcaagttgcttaacctcgcacttcatcccacttcattatctcatttgtgaaatagaggtaaataattaaccctgtactcacagggaataccgagattatgcatgtaaagtgcttacagtgcctagcacatagtaagtgcctaataaatgttagccataaatattattgtgggtatagaaaatcaaattccctagttgcaaaatgtatgcactaaatgctgaatatcaaagaagtcaaaattcaaccacacaagtcttaacagttatagagtctttgcatggacacagtttcgaagctaaaaaatgagaacctaatattacatgcaagttatgtgactcatcagtaaattcttcctagaaaaacaaactataccacttgtcagatttatcttttgcgtatcttgtattaattttacttggttgataagatgttgaagaaaccatggaattatacacagcactatacattattactatagaatgtctggtccctcccatcataaatatggtttaatgaagttattgaaaaacttcacaatatcgagctgcaattcttttttctttttatacaaatacaagttaattagctctattaagttgcaattttatttttataaagctttgtaaagttatgaacatggaaaccctaagaatcacctaagctttttacataagtaaatttcaagttgacagtctgtccattttgaactatttataattaacaggacacttaacacagtaatatcttagacaaggaagagggcattaattctgcaggcaggtagcaatgaaaatgccaaacctgaacaatcagtcactatttccttatacagtttgagtaaaagaggtagactacagaaagaaaaaaaaaagtgaatataaaatgtatcttccccaaatacaactctacttcaataagtcttgaagattaccgatgacatcaacaaaaatgaatgaactcagggaatgagttctttctccccatcaaagaaaaaaacagcatgtgtaattttaaatttgaaaaaaaaaaagaatggcaatttgcaagccaaaagaaaaccagattcacattctactatttacatttgttctattcacaggtcaaaaataaaatatttcattagataatttaaaaaaaaaacacttttttaaaacaaatgtattttactccatcaatactgcaaggaagataactgaatttagaaatgctctctctctacagcaaagttaacttaacttttcggggcccaactggcctatcatttagatctttaatagcagccatagcttcattatagtttatcatagcaacaatggcttcccctgtaggtaagccttgctcattatactgtatcgaaactgaatcaggtatgattctgtaaccatggaaaaagtctaaaatttcattcacattagctttaaatggaagattcattatcttaataggagttactctacctgaaccacaatttatttttggatcaggcataaatctcccctcaggaaaacttcccatattatgctttccaaaatcaaacttgccaccttctgggcgaccaaaattcacaaaagggcggtgacttctaaaatcatcaggcgggctcctaaaatcctcaccaggaggtctaaaattgtcaggaagtctagggtcctcctccggagcttccctaaggtcttcctctgggagctgcctgaagtcctcatcagaagggcatctaaaatcttcctcctgggggctcctgaagtcctcatcaggagggtgcctaaagtcttcatcaggagggcccctgaagtcttcatctggtgggtgcctgaaatcttcctctcgggagcgcctgaaatgctcctgaggcggccgcctgaaatgctcctggggcggtctccggaagtgctccgggggcgggcgcctgaaatgctctgggggtggccgcctgaagtgctctgggggtggccgccggaagtgctctgggggaggccgcctaaaatgctctggaggtggtctccggaaatgctctgggggtggccgacggaaatgctcctgaggtggcctccggaaatgctcctggggtgactgcctgaagtcctcctcaggggaatgcctgaaatcctcctctgggggccgcctgaagtcatcctcgggtggtcgcctccattctccctgaagaggccgcctaaagtcctcctctgggggccgtctccagtcctcctcaggtggccgcctgaaatcttcctctgggagccaccttaagtcctcctcagggggttgcctgaagtcctcctcggggagctgcctgaagtcctccgtgggagaccgcctgaaatcctcctccagtggccgcctccagtcctcctcaaggggcctcctccagtcctcctccctagggtgcctgaagtcatcctccggagggcgcctgaaatcttcctcccaagggcgcctgaagtcctcctcagaaggccgcctgaagtcttcctccctaggtcgcctgaagtcctctggggagtgcctgaagtcctccggggggaacctaaagtcctctgaggagtgtcggaagtcttctggagggtgcctgtcaggctgccggaaatccctctggggatgcttgaagttatccagttgcctc

SEQ ID NO: 441588 - DNA, 3204 bp, Homo sapiens
gttttttttcatatcaaatttacctgtttattcattccatagcaagcaggatattcactatttaaaacaaatttaagcagatttctgttagatttctttaaatcactgaaaagtaacacaaaaatacatataggtagtaactaagtactgacaaagtattctacctatgcaatatcctattaaatgtctaaattaccatatgtaaatttaattgtattatttactcaatggggaaaatctggattacagaactgaggaaaattatgttttatgtaaattataaaaggccaaagtcaatcatgttgaataaaataattttgaaatataagccagtaatataccatatgagtatcccaagagaaaccctggatagaaagaaacttttaaagtcactctttttttttttattagtaatgttaatgtttgagctcagtgtttgagcatgctggttttacctatttatgctaattttaaaccaacaattgaagtgagaaaataatcatttatccttgaaagtatctttagcatggtcttcctaattaaaaataccacttaaaaaagtgaggcagcaaaagcatgaactggagtcagtggtctgtctgggttaaaattggccccacgatttactacctatgacttcaagcaagttgcttaacctcgcacttcatcccacttcattatctcatttgtgaaatagaggtaaataattaaccctgtactcacagggaataccgagattatgcatgtaaagtgcttacagtgcctagcacatagtaagtgcctaataaatgttagccataaatattattgtgggtatagaaaatcaaattccctagttgcaaaatgtatgcactaaatgctgaatatcaaagaagtcaaaattcaaccacacaagtcttaacagttatagagtctttgcatggacacagtttcgaagctaaaaaatgagaacctaatattacatgcaagttatgtgactcatcagtaaattcttcctagaaaaacaaactataccacttgtcagattcttccagcataagcctgagtccccttgcacctataattagattcttattttactatcttttgcgtatcttgtattaattttacttggttgataagatgttgaagaaaccatggaattatacacagcactatacattattactatagaatgtctggtccctcccatcataaatatggtttaatgaagttattgaaaaacttcacaatatcgagctgcaattcttttttctttttatacaaatacaagttaattagctctattaagttgcaattttatttttataaagctttgtaaagttatgaacatggaaaccctaagaatcacctaagctttttacataagtaaatttcaagttgacagtctgtccattttgaactatttataattaacaggacacttaacacagtaatatcttagacaaggaagagggcattaattctgcaggcaggtagcaatgaaaatgccaaacctgaacaatcagtcactatttccttatacagtttgagtaaaagaggtagactacagaaagaaaaaaaaaagtgaatataaaatgtatcttccccaaatacaactctacttcaataagtcttgaagattaccgatgacatcaacaaaaatgaatgaactcagggaatgagttctttctccccatcaaagaaaaaaacagcatgtgtaattttaaatttgaaaaaaaaaaagaatggcaatttgcaagccaaaagaaaaccagattcacattctactatttacatttgttctattcacaggtcaaaaataaaatatttcattagataatttaaaaaaaaaacacttttttaaaacaaatgtattttactccatcaatactgcaaggaagataactgaatttagaaatgctctctctctacagcaaagttaacttaacttttcggggcccaactggcctatcatttagatctttaatagcagccatagcttcattatagtttatcatagcaacaatggcttcccctgtaggtaagccttgctcattatactgtatcgaaactgaatcaggtatgattctgtaaccatggaaaaagtctaaaatttcattcacattagctttaaatggaagattcattatcttaataggagttactctacctgaaccacaatttatttttggatcaggcataaatctcccctcaggaaaacttcccatattatgctttccaaaatcaaacttgccaccttctgggcgaccaaaattcacaaaagggcggtgacttctaaaatcatcagaagggcatctaaaatcttcctcctgggggctcctgaagtcctcatcaggagggtgcctaaagtcttcatcaggagggcccctgaagtcttcatctggtgggtgcctgaaatcttcctctcgggagcgcctgaaatgctcctgaggcggccgcctgaaatgctcctggggcggtctccggaagtgctccgggggcgggcgcctgaaatgctctgggggtggccgcctgaagtgctctgggggtggccgccggaagtgctctgggggaggccgcctaaaatgctctggaggtggtctccggaaatgctctgggggtggccgacggaaatgctcctgaggtggcctccggaaatgctcctggggtgactgcctgaagtcctcctcaggggaatgcctgaaatcctcctctgggggccgcctgaagtcatcctcgggtggtcgcctccattctccctgaagaggccgcctaaagtcctcctctgggggccgtctccagtcctcctcaggtggccgcctgaaatcttcctctgggagccaccttaagtcctcctcagggggttgcctgaagtcctcctcggggagctgcctgaagtcctccgtgggagaccgcctgaaatcctcctccagtggccgcctccagtcctcctcaaggggcctcctccagtcctcctccctagggtgcctgaagtcatcctccggagggcgcctgaaatcttcctcccaagggcgcctgaagtcctcctcagaaggccgcctgaagtcttcctccctaggtcgcctgaagtcctctggggagtgcctgaagtcctccggggggaacctaaagtcctctgaggagtgtcggaagtcttctggagggtgcctgtcaggctgccggaaatccctctggggatgcttgaagttatccagttgcctc

SEQ ID NO: 441589 - DNA, 4356 bp, Homo sapiens
agcgagcgggggcgcgaggcgtttacctggaggcagcggcttgggcgcgcagagcggccgcggctcccccgcacctgcggccatggatgaggagcgcgccctctacatcgtccgggccggcgaagcaggggctatcgagcgggtcctgagggattacagcgacaagcatagggctactttcaaatttgaatcaacagatgaagataaaagaaagaaactctgtgaaggcatatttaaagtccttataaaggacatcccaacaacatgtcaagtgtcctgcctggaagtactccgcattctctccagagacaaaaaggttttagttcctgtgacaactaaggaaaatatgcagatactgctgcgactagccaagctaaatgagttagatgattctttggagaaagtatcagagttcccagttattgtggagtcattaaaatgtctgtgtaatatagtgttcaacagtcagatggcacagcagctcagcctggaacttaatcttgctgcaaagctctgtaacctcctgagaaagtgcaaggaccggaaatttatcaatgacattaagtgctttgacttgcgcttgctcttccttctgtcacttttgcacaccgacatcaggtcacaattgcgctatgagctccagggactaccgctgctaacgcagatcttggaaagtgcctttagcatcaagtggaccgatgagtatgaatcggccatagaccataatggacctcctctctcacctcaggagacagactgtgccattgaggccctcaaagctctcttcaatgtgacggtagacagttggaaggtgcataaagagagtgattctcatcagttccgtgtaatggcagctgtccttcgtcattgtttactaatcgtaggtccaactgaagacaaaacagaagagctacacagcaatgcagtcaaccttttaagcaatgttccagtctcttgtttggatgttctcatttgtccgttaacccatgaagaaacagcccaagaggcaacgactctagatgaactgcccagtaataaaacagctgagaaagaaacagttttgaaaaacaataccatggtatacaatggtatgaatatggaggccattcatgttttactgaattttatggagaagagaatagacaagggaagcagctatagagagggtctaactccagttctcagcttattaaccgaatgttcccgagcccatcgaaacatccgaaaatttctcaaagatcaggttttaccaccgttgagggatgtgacaaatcgacctgaagttggctcaactgtgagaaataagctggtgcgcctcatgacacatgttgaccttggagtcaagcaaattgctgctgaattcctttttgtcctttgcaaagagagagtggatagtctgctgaaatacactggctatgggaatgctgcaggactgttggcggccaggggcctcttggctggaggaagaggagataattggtactcagaggatgaggacacagacactgaagaatacaaaaatgcaaaaccaaacattaatcttatcactggtcatttagaggaaccaatgccaaaccccatagatgaaatgacagaagaacaaaaagaatatgaagccatgaaacttgtcaacatgcttgataaactttccaggagagcagatgtgaaggacctgcaccaggatggtggttagcaacagtggcccgtgccaaagcacttaccaaagtgatgatgactaagaccctgtcattaattccatgtgtcaatactgccctgtagtacacagagcagacaagaaagaagagcccttgaaaacaagggaatgatttttgagtcgttatcaagctaagtggcaagcgggaagctgaaactcgtatagttgaacattcttggaggcttatctcttccctggccagatgcctgatcagatgagaagcccgccatgatactgtcacagtgcctagaatgggctctttatccagtagacaccactgtactttttgatacgagggcagtcttaacttgtgttaaggcctgtgtgtagcattgaagagaggagttgcttaaaccaatgggactaaaacctgatgggacaataacgcctttggaggaagcactcaaccagtactctgtcatcgaagagaccagctctgacacagactaaaagcatcacctgctcaactctcaatattgctttatcagcatcttttctctgtagctccaggggaatcttttctctaaaacatttatgcccttgctttggctagaaacacattaactggtttactcattgagaatccagcatatttaagaggtgaccctgtgttttttgtgatattgaggcattcatacagagctgcagttagacggggttacgggggctaaaagcagaaaaaaaattccatttcatcgggatggaactgaaggattttattctataaagcggccctggttgaatctggcaattctttttgccaagatccctagcagaagatttagccatgtccttcccctcacttgtgtgagtggccccttctgaatctctccagcagccagaggcacgtgagaagcagaaagagctggtaaataaagccttgggcaagcgacttcttagatcagaactcaccaaatggaagcctagcagctgctccataaacctagccccattcttcatatcaattttgtataaatatatagaaacacacacacagcctcagacttacaaactgattatactctaaaagtttgtatgtcagttagctaaaacttcagaatacatttctccctataaagagttataaatgatggtttagttctcaggcagctacaaatgcctatttattccctaatgtacctgaacactagtaccatagaactgaaccaccatctgtatcagcgcatggggagtgtgcattctgaggtctaacccggggtgccaggaacacacacatcctccatcccagcatagagaatggggactccctgagtaatgggagttctttcatggcctctgcttggggtgggggagtcagcagcacccatttgtacatataggtcattcatacatcacattttaaattggggactgtgtgtgctggtgtgtgtgtgagttctacgtttctaccatatgtgatcagtttaatagtaactttatttatttaaaaaaaagaaacacaattagttactgttaaactgataaagggtgtttatttttacttttagaattggtcctatgaagaagtagaaagtgagtcatgcactagacagtgggcctagctcatcagtggctaaagttgaaaaggggttggtttcctgtatatatatgtatgtatatacacacgtacatacattcatatatatacatatatacataatgtgcttaaccactgccttttaaaactttaaattaaataaaacattggggttgattcaatttggccatctgtgtgtgtttctttatagatacatgggctaaacaatactatttcacagtttatgcttttttaaagtgcttttacatccatggtcccacttctaatagcctttttaaggacaggtagagtacatggagggttagtgaaaaggtcatttatccagaagttacctctctggcaaagcaaaaaaatcaggaattacgtcttaaaggcctttcagctgccagaggagatgtcacaaagtttcttgcaacttacttatgggagagatcttcaagaatatcactcttagactctgaactgaaatttgcatacgcttccaacatgttttattagctggctttgaagctcacaaaagaatgggcaaagaaagaggctgctagattgaagggcaggcatactgaaagaagaaaaaggccaacttgaaaactagatagtgagatgagaagaataaaacttcaagacatagcaaatctgggactgtctacttaccaaaggatactctagttgacccagaaaatgtgtgtacaacagtatggcccgtagactacttcctataatggtgaccctgagtttttttaaaagaagaaattaaatccagaacgctttataaaagggtaggaagaagacaatagatgttagaatttcatccaaaatgtttgagggagaggtgagtgacccaggttttaaccaacagcaaaagaaatgggcaattcataattttagattaagtgaaaagtttagaaaaaatttaagtatttttgttattctacaaatgcatttttaaagtatttttataatttctataatcaaatagctttggcatgcatgtcagcttacctaaatgaagatgtgtttaatgaaatgccatcttaccagctttctttatgcagagtaagtgtttgaacagtcctgtttcagt

SEQ ID NO: 441590 - DNA, 3837 bp, Homo sapiens
agcgagcgggggcgcgaggcgtttacctggaggcagcggcttgggcgcgcagagcggccgcggctcccccgcacctgcggccatggatgaggagcgcgccctctacatcgtccgggccggcgaagcaggggctatcgagcgggtcctgagggattacagcgacaagcatagggctactttcaaatttgaatcaacagatgaagataaaagaaagaaactctgtgaaggcatatttaaagtccttataaaggacatcccaacaacatgtcaagtgtcctgcctggaagtactccgcattctctccagagacaaaaaggttttagttcctgtgacaactaaggaaaatatgcagatactgctgcgactagccaagctaaatgagttagatgattctttggagaaagtatcagagttcccagttattgtggagtcattaaaatgtctgtgtaatatagtgttcaacagtcagatggcacagcagctcagcctggaacttaatcttgctgcaaagctctgtaacctcctgagaaagtgcaaggaccggaaatttatcaatgacattaagtgctttgacttgcgcttgctcttccttctgtcacttttgcacaccgacatcaggtcacaattgcgctatgagctccagggactaccgctgctaacgcagatcttggaaagtgcctttagcatcaagtggaccgatgagtatgaatcggccatagaccataatggacctcctctctcacctcaggagacagactgtgccattgaggccctcaaagctctcttcaatgtgacggtagacagttggaaggtgcataaagagagtgattctcatcagttccgtgtaatggcagctgtccttcgtcattgtttactaatcgtaggtccaactgaagacaaaacagaagagctacacagcaatgcagtcaaccttttaagcaatgttccagtctcttgtttggatgttctcatttgtccgttaacccatgaagaaacagcccaagaggcaacgactctagatgaactgcccagtaataaaacagctgagaaagaaacagttttgaaaaacaataccatggtatacaatggtatgaatatggaggccattcatgttttactgaattttatggagaagagaatagacaagggaagcagctatagagagggtctaactccagttctcagcttattaaccgaatgttcccgagcccatcgaaacatccgaaaatttctcaaagatcaggttttaccaccgttgagggatgtgacaaatcgacctgaagttggctcaactgtgagaaataagctggtgcgcctcatgacacatgttgaccttggagtcaagcaaattgctgctgaattcctttttgtcctttgcaaagagagagtggatagtctgctgaaatacactggctatgggaatgctgcaggactgttggcggccaggggcctcttggctggaggaagaggagataattggtactcagaggatgaggacacagacactgaagaatacaaaaatgcaaaaccaaaagaggagttgcttaaaccaatgggactaaaacctgatgggacaataacgcctttggaggaagcactcaaccagtactctgtcatcgaagagaccagctctgacacagactaaaagcatcacctgctcaactctcaatattgctttatcagcatcttttctctgtagctccaggggaatcttttctctaaaacatttatgcccttgctttggctagaaacacattaactggtttactcattgagaatccagcatatttaagaggtgaccctgtgttttttgtgatattgaggcattcatacagagctgcagttagacggggttacgggggctaaaagcagaaaaaaaattccatttcatcgggatggaactgaaggattttattctataaagcggccctggttgaatctggcaattctttttgccaagatccctagcagaagatttagccatgtccttcccctcacttgtgtgagtggccccttctgaatctctccagcagccagaggcacgtgagaagcagaaagagctggtaaataaagccttgggcaagcgacttcttagatcagaactcaccaaatggaagcctagcagctgctccataaacctagccccattcttcatatcaattttgtataaatatatagaaacacacacacagcctcagacttacaaactgattatactctaaaagtttgtatgtcagttagctaaaacttcagaatacatttctccctataaagagttataaatgatggtttagttctcaggcagctacaaatgcctatttattccctaatgtacctgaacactagtaccatagaactgaaccaccatctgtatcagcgcatggggagtgtgcattctgaggtctaacccggggtgccaggaacacacacatcctccatcccagcatagagaatggggactccctgagtaatgggagttctttcatggcctctgcttggggtgggggagtcagcagcacccatttgtacatataggtcattcatacatcacattttaaattggggactgtgtgtgctggtgtgtgtgtgagttctacgtttctaccatatgtgatcagtttaatagtaactttatttatttaaaaaaaagaaacacaattagttactgttaaactgataaagggtgtttatttttacttttagaattggtcctatgaagaagtagaaagtgagtcatgcactagacagtgggcctagctcatcagtggctaaagttgaaaaggggttggtttcctgtatatatatgtatgtatatacacacgtacatacattcatatatatacatatatacataatgtgcttaaccactgccttttaaaactttaaattaaataaaacattggggttgattcaatttggccatctgtgtgtgtttctttatagatacatgggctaaacaatactatttcacagtttatgcttttttaaagtgcttttacatccatggtcccacttctaatagcctttttaaggacaggtagagtacatggagggttagtgaaaaggtcatttatccagaagttacctctctggcaaagcaaaaaaatcaggaattacgtcttaaaggcctttcagctgccagaggagatgtcacaaagtttcttgcaacttacttatgggagagatcttcaagaatatcactcttagactctgaactgaaatttgcatacgcttccaacatgttttattagctggctttgaagctcacaaaagaatgggcaaagaaagaggctgctagattgaagggcaggcatactgaaagaagaaaaaggccaacttgaaaactagatagtgagatgagaagaataaaacttcaagacatagcaaatctgggactgtctacttaccaaaggatactctagttgacccagaaaatgtgtgtacaacagtatggcccgtagactacttcctataatggtgaccctgagtttttttaaaagaagaaattaaatccagaacgctttataaaagggtaggaagaagacaatagatgttagaatttcatccaaaatgtttgagggagaggtgagtgacccaggttttaaccaacagcaaaagaaatgggcaattcataattttagattaagtgaaaagtttagaaaaaatttaagtatttttgttattctacaaatgcatttttaaagtatttttataatttctataatcaaatagctttggcatgcatgtcagcttacctaaatgaagatgtgtttaatgaaatgccatcttaccagctttctttatgcagagtaagtgtttgaacagtcctgtttcagt

SEQ ID NO: 441591 - DNA, 4449 bp, Homo sapiens
agcgagcgggggcgcgaggcgtttacctggaggcagcggcttgggcgcgcagagcggccgcggctcccccgcacctgcggccatggatgaggagcgcgccctctacatcgtccgggccggcgaagcaggggctatcgagcgggtcctgagggattacagcgacaagcatagggctactttcaaatttgaatcaacagatgaagataaaagaaaggcacccgaaatgtgagatttgatggagaacataaagctttgacattaaactagttatagcgttgacagaaaacagaagatcatgcttgccagtaaactctgtgaaggcatatttaaagtccttataaaggacatcccaacaacatgtcaagtgtcctgcctggaagtactccgcattctctccagagacaaaaaggttttagttcctgtgacaactaaggaaaatatgcagatactgctgcgactagccaagctaaatgagttagatgattctttggagaaagtatcagagttcccagttattgtggagtcattaaaatgtctgtgtaatatagtgttcaacagtcagatggcacagcagctcagcctggaacttaatcttgctgcaaagctctgtaacctcctgagaaagtgcaaggaccggaaatttatcaatgacattaagtgctttgacttgcgcttgctcttccttctgtcacttttgcacaccgacatcaggtcacaattgcgctatgagctccagggactaccgctgctaacgcagatcttggaaagtgcctttagcatcaagtggaccgatgagtatgaatcggccatagaccataatggacctcctctctcacctcaggagacagactgtgccattgaggccctcaaagctctcttcaatgtgacggtagacagttggaaggtgcataaagagagtgattctcatcagttccgtgtaatggcagctgtccttcgtcattgtttactaatcgtaggtccaactgaagacaaaacagaagagctacacagcaatgcagtcaaccttttaagcaatgttccagtctcttgtttggatgttctcatttgtccgttaacccatgaagaaacagcccaagaggcaacgactctagatgaactgcccagtaataaaacagctgagaaagaaacagttttgaaaaacaataccatggtatacaatggtatgaatatggaggccattcatgttttactgaattttatggagaagagaatagacaagggaagcagctatagagagggtctaactccagttctcagcttattaaccgaatgttcccgagcccatcgaaacatccgaaaatttctcaaagatcaggttttaccaccgttgagggatgtgacaaatcgacctgaagttggctcaactgtgagaaataagctggtgcgcctcatgacacatgttgaccttggagtcaagcaaattgctgctgaattcctttttgtcctttgcaaagagagagtggatagtctgctgaaatacactggctatgggaatgctgcaggactgttggcggccaggggcctcttggctggaggaagaggagataattggtactcagaggatgaggacacagacactgaagaatacaaaaatgcaaaaccaaacattaatcttatcactggtcatttagaggaaccaatgccaaaccccatagatgaaatgacagaagaacaaaaagaatatgaagccatgaaacttgtcaacatgcttgataaactttccaggagagcagatgtgaaggacctgcaccaggatggtggttagcaacagtggcccgtgccaaagcacttaccaaagtgatgatgactaagaccctgtcattaattccatgtgtcaatactgccctgtagtacacagagcagacaagaaagaagagcccttgaaaacaagggaatgatttttgagtcgttatcaagctaagtggcaagcgggaagctgaaactcgtatagttgaacattcttggaggcttatctcttccctggccagatgcctgatcagatgagaagcccgccatgatactgtcacagtgcctagaatgggctctttatccagtagacaccactgtactttttgatacgagggcagtcttaacttgtgttaaggcctgtgtgtagcattgaagagaggagttgcttaaaccaatgggactaaaacctgatgggacaataacgcctttggaggaagcactcaaccagtactctgtcatcgaagagaccagctctgacacagactaaaagcatcacctgctcaactctcaatattgctttatcagcatcttttctctgtagctccaggggaatcttttctctaaaacatttatgcccttgctttggctagaaacacattaactggtttactcattgagaatccagcatatttaagaggtgaccctgtgttttttgtgatattgaggcattcatacagagctgcagttagacggggttacgggggctaaaagcagaaaaaaaattccatttcatcgggatggaactgaaggattttattctataaagcggccctggttgaatctggcaattctttttgccaagatccctagcagaagatttagccatgtccttcccctcacttgtgtgagtggccccttctgaatctctccagcagccagaggcacgtgagaagcagaaagagctggtaaataaagccttgggcaagcgacttcttagatcagaactcaccaaatggaagcctagcagctgctccataaacctagccccattcttcatatcaattttgtataaatatatagaaacacacacacagcctcagacttacaaactgattatactctaaaagtttgtatgtcagttagctaaaacttcagaatacatttctccctataaagagttataaatgatggtttagttctcaggcagctacaaatgcctatttattccctaatgtacctgaacactagtaccatagaactgaaccaccatctgtatcagcgcatggggagtgtgcattctgaggtctaacccggggtgccaggaacacacacatcctccatcccagcatagagaatggggactccctgagtaatgggagttctttcatggcctctgcttggggtgggggagtcagcagcacccatttgtacatataggtcattcatacatcacattttaaattggggactgtgtgtgctggtgtgtgtgtgagttctacgtttctaccatatgtgatcagtttaatagtaactttatttatttaaaaaaaagaaacacaattagttactgttaaactgataaagggtgtttatttttacttttagaattggtcctatgaagaagtagaaagtgagtcatgcactagacagtgggcctagctcatcagtggctaaagttgaaaaggggttggtttcctgtatatatatgtatgtatatacacacgtacatacattcatatatatacatatatacataatgtgcttaaccactgccttttaaaactttaaattaaataaaacattggggttgattcaatttggccatctgtgtgtgtttctttatagatacatgggctaaacaatactatttcacagtttatgcttttttaaagtgcttttacatccatggtcccacttctaatagcctttttaaggacaggtagagtacatggagggttagtgaaaaggtcatttatccagaagttacctctctggcaaagcaaaaaaatcaggaattacgtcttaaaggcctttcagctgccagaggagatgtcacaaagtttcttgcaacttacttatgggagagatcttcaagaatatcactcttagactctgaactgaaatttgcatacgcttccaacatgttttattagctggctttgaagctcacaaaagaatgggcaaagaaagaggctgctagattgaagggcaggcatactgaaagaagaaaaaggccaacttgaaaactagatagtgagatgagaagaataaaacttcaagacatagcaaatctgggactgtctacttaccaaaggatactctagttgacccagaaaatgtgtgtacaacagtatggcccgtagactacttcctataatggtgaccctgagtttttttaaaagaagaaattaaatccagaacgctttataaaagggtaggaagaagacaatagatgttagaatttcatccaaaatgtttgagggagaggtgagtgacccaggttttaaccaacagcaaaagaaatgggcaattcataattttagattaagtgaaaagtttagaaaaaatttaagtatttttgttattctacaaatgcatttttaaagtatttttataatttctataatcaaatagctttggcatgcatgtcagcttacctaaatgaagatgtgtttaatgaaatgccatcttaccagctttctttatgcagagtaagtgtttgaacagtcctgtttcagt

SEQ ID NO: 441592 - DNA, 2524 bp, Homo sapiens
ccttatcgtttagtaagatcaaatttctaaatgatgtttcgttccagttgaacattcttggaggcttatctcttccctggccagatgcctgatcagatgagaagcccgccatgatactgtcacagtgcctagaatgggctctttatccagtagacaccactgtactttttgatacgagggcagtcttaacttgtgttaaggcctgtgtgtagcattgaagagaggagttgcttaaaccaatgggactaaaacctgatgggacaataacgcctttggaggaagcactcaaccagtactctgtcatcgaagagaccagctctgacacagactaaaagcatcacctgctcaactctcaatattgctttatcagcatcttttctctgtagctccaggggaatcttttctctaaaacatttatgcccttgctttggctagaaacacattaactggtttactcattgagaatccagcatatttaagaggtgaccctgtgttttttgtgatattgaggcattcatacagagctgcagttagacggggttacgggggctaaaagcagaaaaaaaattccatttcatcgggatggaactgaaggattttattctataaagcggccctggttgaatctggcaattctttttgccaagatccctagcagaagatttagccatgtccttcccctcacttgtgtgagtggccccttctgaatctctccagcagccagaggcacgtgagaagcagaaagagctggtaaataaagccttgggcaagcgacttcttagatcagaactcaccaaatggaagcctagcagctgctccataaacctagccccattcttcatatcaattttgtataaatatatagaaacacacacacagcctcagacttacaaactgattatactctaaaagtttgtatgtcagttagctaaaacttcagaatacatttctccctataaagagttataaatgatggtttagttctcaggcagctacaaatgcctatttattccctaatgtacctgaacactagtaccatagaactgaaccaccatctgtatcagcgcatggggagtgtgcattctgaggtctaacccggggtgccaggaacacacacatcctccatcccagcatagagaatggggactccctgagtaatgggagttctttcatggcctctgcttggggtgggggagtcagcagcacccatttgtacatataggtcattcatacatcacattttaaattggggactgtgtgtgctggtgtgtgtgtgagttctacgtttctaccatatgtgatcagtttaatagtaactttatttatttaaaaaaaagaaacacaattagttactgttaaactgataaagggtgtttatttttacttttagaattggtcctatgaagaagtagaaagtgagtcatgcactagacagtgggcctagctcatcagtggctaaagttgaaaaggggttggtttcctgtatatatatgtatgtatatacacacgtacatacattcatatatatacatatatacataatgtgcttaaccactgccttttaaaactttaaattaaataaaacattggggttgattcaatttggccatctgtgtgtgtttctttatagatacatgggctaaacaatactatttcacagtttatgcttttttaaagtgcttttacatccatggtcccacttctaatagcctttttaaggacaggtagagtacatggagggttagtgaaaaggtcatttatccagaagttacctctctggcaaagcaaaaaaatcaggaattacgtcttaaaggcctttcagctgccagaggagatgtcacaaagtttcttgcaacttacttatgggagagatcttcaagaatatcactcttagactctgaactgaaatttgcatacgcttccaacatgttttattagctggctttgaagctcacaaaagaatgggcaaagaaagaggctgctagattgaagggcaggcatactgaaagaagaaaaaggccaacttgaaaactagatagtgagatgagaagaataaaacttcaagacatagcaaatctgggactgtctacttaccaaaggatactctagttgacccagaaaatgtgtgtacaacagtatggcccgtagactacttcctataatggtgaccctgagtttttttaaaagaagaaattaaatccagaacgctttataaaagggtaggaagaagacaatagatgttagaatttcatccaaaatgtttgagggagaggtgagtgacccaggttttaaccaacagcaaaagaaatgggcaattcataattttagattaagtgaaaagtttagaaaaaatttaagtatttttgttattctacaaatgcatttttaaagtatttttataatttctataatcaaatagctttggcatgcatgtcagcttacctaaatgaagatgtgtttaatgaaatgccatcttaccagctttctttatgcagagtaagtgtttgaacagtcctgtttcagt

SEQ ID NO: 441593 - DNA, 1082 bp, Homo sapiens
agcgagcgggggcgcgaggcgtttacctggaggcagcggcttgggcgcgcagagcggccgcggctcccccgcacctgcggccatggatgaggagcgcgccctctacatcgtccgggccggcgaagcaggggctatcgagcgggtcctgagggattacagcgacaagcatagggctactttcaaatttgaatcaacagatgaagataaaagaaagaaactctgtgaaggcatatttaaagtccttataaaggacatcccaacaacatgtcaagtgtcctgcctggaagtactccgcattctctccagagacaaaaaggttttagttcctgtgacaactaaggaaaatatgcagatactgctgcgactagccaagctaaatgagttagatgattctttggagaaagtatcagagttcccagttattgtggagtcattaaaatgtctgtgtaatatagtgttcaacagtcagatggcacagcagctcagcctggaacttaatcttgctgcaaagctctgtaacctcctgagaaagtgcaaggaccggaaatttatcaatgacattaagtgctttgacttgcgcttgctcttccttctgtcacttttgcacaccgacatcaggtcacaattgcgctatgagctccagggactaccgctgctaacgcagatcttggaaagtgcctttagcatcaagtggaccgatgagtatgaatcggccatagaccataatggacctcctctctcacctcaggagacagactgtgccattgaggccctcaaagctctcttcaatgtgacggtagacagttggaaggtgcataaagaggtaaggtagagaaggctatttttgtctacctggaatttaattggtctgggacatccctagagtttcctgcaagagaagaatacaagttgggaaatggaaaaagttcccacttctcccattaagcaattgtattacccaggatatacttcttaaccattgtaagtcttattctttccatttgtgtgataacacctatcagaataggtgtaaaaatggactactattttgtaagatgccaaatatagttttctgagttgca

SEQ ID NO: 441594 - DNA, 3957 bp, Homo sapiens
agcgagcgggggcgcgaggcgtttacctggaggcagcggcttgggcgcgcagagcggccgcggctcccccgcacctgcggccatggatgaggagcgcgccctctacatcgtccgggccggcgaagcaggggctatcgagcgggtcctgagggattacagcgacaagcatagggctactttcaaatttgaatcaacagatgaagataaaagaaagaaactctgtgaaggcatatttaaagtccttataaaggacatcccaacaacatgtcaagtgtcctgcctggaagtactccgcattctctccagagacaaaaaggttttagttcctgtgacaactaaggaaaatatgcagatactgctgcgactagccaagctaaatgagttagatgattctttggagaaagtatcagagttcccagttattgtggagtcattaaaatgtctgtgtaatatagtgttcaacagtcagatggcacagcagctcagcctggaacttaatcttgctgcaaagctctgtaacctcctgagaaagtgcaaggaccggaaatttatcaatgacattaagtgctttgacttgcgcttgctcttccttctgtcacttttgcacaccgacatcaggtcacaattgcgctatgagctccagggactaccgctgctaacgcagatcttggaaagtgcctttagcatcaagtggaccgatgagtatgaatcggccatagaccataatggacctcctctctcacctcaggagacagactgtgccattgaggccctcaaagctctcttcaatgtgacggtagacagttggaaggtgcataaagagagtgattctcatcagttccgtgtaatggcagctgtccttcgtcattgtttactaatcgtaggtccaactgaagacaaaacagaagagctacacagcaatgcagtcaaccttttaagcaatgttccagtctcttgtttggatgttctcatttgtccgttaacccatgaagaaacagcccaagaggcaacgactctagatgaactgcccagtaataaaacagctgagaaagaaacagttttgaaaaacaataccatggtatacaatggtatgaatatggaggccattcatgttttactgaattttatggagaagagaatagacaagggaagcagctatagagagggtctaactccagttctcagcttattaaccgaatgttcccgagcccatcgaaacatccgaaaatttctcaaagatcaggttttaccaccgttgagggatgtgacaaatcgacctgaagttggctcaactgtgagaaataagctggtgcgcctcatgacacatgttgaccttggagtcaagcaaattgctgctgaattcctttttgtcctttgcaaagagagagtggatagtctgctgaaatacactggctatgggaatgctgcaggactgttggcggccaggggcctcttggctggaggaagaggagataattggtactcagaggatgaggacacagacactgaagaatacaaaaatgcaaaaccaaacattaatcttatcactggtcatttagaggaaccaatgccaaaccccatagatgaaatgacagaagaacaaaaagaatatgaagccatgaaacttgtcaacatgcttgataaactttccagagaggagttgcttaaaccaatgggactaaaacctgatgggacaataacgcctttggaggaagcactcaaccagtactctgtcatcgaagagaccagctctgacacagactaaaagcatcacctgctcaactctcaatattgctttatcagcatcttttctctgtagctccaggggaatcttttctctaaaacatttatgcccttgctttggctagaaacacattaactggtttactcattgagaatccagcatatttaagaggtgaccctgtgttttttgtgatattgaggcattcatacagagctgcagttagacggggttacgggggctaaaagcagaaaaaaaattccatttcatcgggatggaactgaaggattttattctataaagcggccctggttgaatctggcaattctttttgccaagatccctagcagaagatttagccatgtccttcccctcacttgtgtgagtggccccttctgaatctctccagcagccagaggcacgtgagaagcagaaagagctggtaaataaagccttgggcaagcgacttcttagatcagaactcaccaaatggaagcctagcagctgctccataaacctagccccattcttcatatcaattttgtataaatatatagaaacacacacacagcctcagacttacaaactgattatactctaaaagtttgtatgtcagttagctaaaacttcagaatacatttctccctataaagagttataaatgatggtttagttctcaggcagctacaaatgcctatttattccctaatgtacctgaacactagtaccatagaactgaaccaccatctgtatcagcgcatggggagtgtgcattctgaggtctaacccggggtgccaggaacacacacatcctccatcccagcatagagaatggggactccctgagtaatgggagttctttcatggcctctgcttggggtgggggagtcagcagcacccatttgtacatataggtcattcatacatcacattttaaattggggactgtgtgtgctggtgtgtgtgtgagttctacgtttctaccatatgtgatcagtttaatagtaactttatttatttaaaaaaaagaaacacaattagttactgttaaactgataaagggtgtttatttttacttttagaattggtcctatgaagaagtagaaagtgagtcatgcactagacagtgggcctagctcatcagtggctaaagttgaaaaggggttggtttcctgtatatatatgtatgtatatacacacgtacatacattcatatatatacatatatacataatgtgcttaaccactgccttttaaaactttaaattaaataaaacattggggttgattcaatttggccatctgtgtgtgtttctttatagatacatgggctaaacaatactatttcacagtttatgcttttttaaagtgcttttacatccatggtcccacttctaatagcctttttaaggacaggtagagtacatggagggttagtgaaaaggtcatttatccagaagttacctctctggcaaagcaaaaaaatcaggaattacgtcttaaaggcctttcagctgccagaggagatgtcacaaagtttcttgcaacttacttatgggagagatcttcaagaatatcactcttagactctgaactgaaatttgcatacgcttccaacatgttttattagctggctttgaagctcacaaaagaatgggcaaagaaagaggctgctagattgaagggcaggcatactgaaagaagaaaaaggccaacttgaaaactagatagtgagatgagaagaataaaacttcaagacatagcaaatctgggactgtctacttaccaaaggatactctagttgacccagaaaatgtgtgtacaacagtatggcccgtagactacttcctataatggtgaccctgagtttttttaaaagaagaaattaaatccagaacgctttataaaagggtaggaagaagacaatagatgttagaatttcatccaaaatgtttgagggagaggtgagtgacccaggttttaaccaacagcaaaagaaatgggcaattcataattttagattaagtgaaaagtttagaaaaaatttaagtatttttgttattctacaaatgcatttttaaagtatttttataatttctataatcaaatagctttggcatgcatgtcagcttacctaaatgaagatgtgtttaatgaaatgccatcttaccagctttctttatgcagagtaagtgtttgaacagtcctgtttcagt

SEQ ID NO: 441595 - DNA, 4100 bp, Homo sapiens
agcgagcgggggcgcgaggcgtttacctggaggcagcggcttgggcgcgcagagcggccgcggctcccccgcacctgcggccatggatgaggagcgcgccctctacatcgtccgggccggcgaagcaggggctatcgagcgggtcctgagggattacagcgacaagcatagggctactttcaaatttgaatcaacagatgaagataaaagaaagaaactctgtgaaggcatatttaaagtccttataaaggacatcccaacaacatgtcaagtgtcctgcctggaagtactccgcattctctccagagacaaaaaggttttagttcctgtgacaactaaggaaaatatgcagatactgctgcgactagccaagctaaatgagttagatgattctttggagaaagtatcagagttcccagttattgtggagtcattaaaatgtctgtgtaatatagtgttcaacagtcagatggcacagcagctcagcctggaacttaatcttgctgcaaagctctgtaacctcctgagaaagtgcaaggaccggaaatttatcaatgacattaagtgctttgacttgcgcttgctcttccttctgtcacttttgcacaccgacatcaggtcacaattgcgctatgagctccagggactaccgctgctaacgcagatcttggaaagtgcctttagcatcaagtggaccgatgagtatgaatcggccatagaccataatggacctcctctctcacctcaggagacagactgtgccattgaggccctcaaagctctcttcaatgtgacggtagacagttggaaggtgcataaagagagtgattctcatcagttccgtgtaatggcagctgtccttcgtcattgtttactaatcgtaggtccaactgaagacaaaacagaagagctacacagcaatgcagtcaaccttttaagcaatgttccagtctcttgtttggatgttctcatttgtccgttaacccatgaagaaacagcccaagaggcaacgactctagatgaactgcccagtaataaaacagctgagaaagaaacagttttgaaaaacaataccatggtatacaatggtatgaatatggaggccattcatgttttactgaattttatggagaagagaatagacaagggaagcagctatagagagggtctaactccagttctcagcttattaaccgaatgttcccgagcccatcgaaacatccgaaaatttctcaaagatcaggttttaccaccgttgagggatgtgacaaatcgacctgaagttggctcaactgtgagaaataagctggtgcgcctcatgacacatgttgaccttggagtcaagcaaattgctgctgaattcctttttgtcctttgcaaagagagagtggatagtctgctgaaatacactggctatgggaatgctgcaggactgttggcggccaggggcctcttggctggaggaagaggagataattggtactcagaggatgaggacacagacactgaagaatacaaaaatgcaaaaccaaacattaatcttatcactggtcatttagaggaaccaatgccaaaccccatagatgaaatgacagaagaacaaaaagaatatgaagccatgaaacttgtcaacatgcttgataaactttccaggggaatccacatattctagaagctgccaacaaataaatatacaaacgtcaagtctgaaataccccagcttccacctgatttaaactatgcctcaaagaagatgcctacttatccggaagtacccagcagatgcccaactgaagagaggagttgcttaaaccaatgggactaaaacctgatgggacaataacgcctttggaggaagcactcaaccagtactctgtcatcgaagagaccagctctgacacagactaaaagcatcacctgctcaactctcaatattgctttatcagcatcttttctctgtagctccaggggaatcttttctctaaaacatttatgcccttgctttggctagaaacacattaactggtttactcattgagaatccagcatatttaagaggtgaccctgtgttttttgtgatattgaggcattcatacagagctgcagttagacggggttacgggggctaaaagcagaaaaaaaattccatttcatcgggatggaactgaaggattttattctataaagcggccctggttgaatctggcaattctttttgccaagatccctagcagaagatttagccatgtccttcccctcacttgtgtgagtggccccttctgaatctctccagcagccagaggcacgtgagaagcagaaagagctggtaaataaagccttgggcaagcgacttcttagatcagaactcaccaaatggaagcctagcagctgctccataaacctagccccattcttcatatcaattttgtataaatatatagaaacacacacacagcctcagacttacaaactgattatactctaaaagtttgtatgtcagttagctaaaacttcagaatacatttctccctataaagagttataaatgatggtttagttctcaggcagctacaaatgcctatttattccctaatgtacctgaacactagtaccatagaactgaaccaccatctgtatcagcgcatggggagtgtgcattctgaggtctaacccggggtgccaggaacacacacatcctccatcccagcatagagaatggggactccctgagtaatgggagttctttcatggcctctgcttggggtgggggagtcagcagcacccatttgtacatataggtcattcatacatcacattttaaattggggactgtgtgtgctggtgtgtgtgtgagttctacgtttctaccatatgtgatcagtttaatagtaactttatttatttaaaaaaaagaaacacaattagttactgttaaactgataaagggtgtttatttttacttttagaattggtcctatgaagaagtagaaagtgagtcatgcactagacagtgggcctagctcatcagtggctaaagttgaaaaggggttggtttcctgtatatatatgtatgtatatacacacgtacatacattcatatatatacatatatacataatgtgcttaaccactgccttttaaaactttaaattaaataaaacattggggttgattcaatttggccatctgtgtgtgtttctttatagatacatgggctaaacaatactatttcacagtttatgcttttttaaagtgcttttacatccatggtcccacttctaatagcctttttaaggacaggtagagtacatggagggttagtgaaaaggtcatttatccagaagttacctctctggcaaagcaaaaaaatcaggaattacgtcttaaaggcctttcagctgccagaggagatgtcacaaagtttcttgcaacttacttatgggagagatcttcaagaatatcactcttagactctgaactgaaatttgcatacgcttccaacatgttttattagctggctttgaagctcacaaaagaatgggcaaagaaagaggctgctagattgaagggcaggcatactgaaagaagaaaaaggccaacttgaaaactagatagtgagatgagaagaataaaacttcaagacatagcaaatctgggactgtctacttaccaaaggatactctagttgacccagaaaatgtgtgtacaacagtatggcccgtagactacttcctataatggtgaccctgagtttttttaaaagaagaaattaaatccagaacgctttataaaagggtaggaagaagacaatagatgttagaatttcatccaaaatgtttgagggagaggtgagtgacccaggttttaaccaacagcaaaagaaatgggcaattcataattttagattaagtgaaaagtttagaaaaaatttaagtatttttgttattctacaaatgcatttttaaagtatttttataatttctataatcaaatagctttggcatgcatgtcagcttacctaaatgaagatgtgtttaatgaaatgccatcttaccagctttctttatgcagagtaagtgtttgaacagtcctgtttcagt

SEQ ID NO: 441596 - DNA, 1667 bp, Homo sapiens
agcgagcgggggcgcgaggcgtttacctggaggcagcggcttgggcgcgcagagcggccgcggctcccccgcacctgcggccatggatgaggagcgcgccctctacatcgtccgggccggcgaagcaggggctatcgagcgggtcctgagggattacagcgacaagcatagggctactttcaaatttgaatcaacagatgaagataaaagaaagaaactctgtgaaggcatatttaaagtccttataaaggacatcccaacaacatgtcaagtgtcctgcctggaagtactccgcattctctccagagacaaaaaggttttagttcctgtgacaactaaggaaaatatgcagatactgctgcgactagccaagctaaatgagttagatgattctttggagaaagtatcagagttcccagttattgtggagtcattaaaatgtctgtgtaatatagtgttcaacagtcagatggcacagcagctcagcctggaacttaatcttgctgcaaagctctgtaacctcctgagaaagtgcaaggaccggaaatttatcaatgacattaagtgctttgacttgcgcttgctcttccttctgtcacttttgcacaccgacatcaggtcacaattgcgctatgagctccagggactaccgctgctaacgcagatcttggaaagtgcctttagcatcaagtggaccgatgagtatgaatcggccatagaccataatggacctcctctctcacctcaggagacagactgtgccattgaggccctcaaagctctcttcaatgtgacggtagacagttggaaggtgcataaagagagtgattctcatcagttccgtgtaatggcagctgtccttcgtcattgtttactaatcgtaggtccaactgaagacaaaacagaagagctacacagcaatgcagtcaaccttttaagcaatgttccagtctcttgtttggatgttctcatttgtccgttaacccatgaagaaacagcccaagaggcaacgactctagatgaactgcccagtaataaaacagctgagaaagaaacagttttgaaaaacaataccatggtatacaatggtatgaatatggaggccattcatgttttactgaattttatggagaagagaatagacaagggaagcagctatagagagggtctaactccagttctcagcttattaaccgaatgttcccgagcccatcgaaacatccgaaaatttctcaaagatcaggttttaccaccgttgagggatgtgacaaatcgacctgaagttggctcaactgtgagaaataagctggtgcgcctcatgacacatgttgaccttggagtcaagcaaattgctgctgaattcctttttgtcctttgcaaagagagagtggatagtctgctgaaatacactggctatgggaatgctgcaggactgttggcggccaggggcctcttggctggaggaagaggagataattggtactcagaggatgaggacacagacactgaagaatacaaaaatgcaaaaccaaagtatagtatcaaatttcttttcacctaactatggctgtgcctttgagttggttatttcctttgtctttcattttccaagtgtttcttttctcttgtggatttggaaactttccatttaatggtgtttttagagg

SEQ ID NO: 441597 - DNA, 1389 bp, Homo sapiens
acccagagggccctgcgccgcctttctccgctggcaacggcgccgctccccgctcctcctccccagccatggcgttcacgttcgcggccttctgctacatgctggcgctgctgctcactgccgcgctcatcttcttcgccatttggcacattatagcatttgatgagctgaagactgattacaagaatcctatagaccagtgtaataccctgaatccccttgtactcccagagtacctcatccacgctttcttctgtgtcatgtttctttgtgcagcagagtggcttacactgggtctcaatatgcccctcttggcatatcatatttggaggtatatgagtagaccagtgatgagtggcccaggactctatgaccctacaaccatcatgaatgcagatattctagcatattgtcagaaggaaggatggtgcaaattagctttttatcttctagcatttttttactacctatatggcatgatctatgttttggtgagctcttagaacaacacacagaagaattggtccagttaagtgcatgcaaaaagccaccaaatgaagggattctatccagcaagatcctgtccaagagtagcctgtggaatctgatcagttactttaaaaaatgactccttattttttaaatgtttccacatttttgcttgtggaaagactgttttcatatgttatactcagataaagattttaaatggtattacgtataaattaatataaaatgattacctctggtgttgacaggtttgaacttgcacttcttaaggaacagccataatcctctgaatgatgcattaattactgactgtcctagtacattggaagcttttgtttataggaacttgtagggctcattttggtttcattgaaacagtatctaattataaattagctgtagatatcaggtgcttctgatgaagtgaaaatgtatatctgactagtgggaaacttcatgggtttcctcatctgtcatgtcgatgattatatatggatacatttacaaaaataaaaagcgggaattttcccttcgcttgaatattatccctgtatattgcatgaatgagagatttcccatatttccatcagagtaataaatatacttgctttaattcttaagcataagtaaacatgatataaaaatatatgctgaattacttgtgaagaatgcatttaaagctattttaaatgtgtttttatttgtaagacattacttattaagaaattggttattatgcttactgttctaatctggtggtaaaggtattcttaagaatttgcaggtactacagattttcaaaactgaatgagagaaaattgtataaccatcctgctgttcctttagtgcaatacaataaaactctgaaattaagactca

SEQ ID NO: 441598 - DNA, 1404 bp, Homo sapiens
agcactcgttgtagatgaagccggtgtagatggagaacaggcccataagcaggagcaggtagcggcccctgaagaaagtctgccagatctcgttgttcgcggccttctgctacatgctggcgctgctgctcactgccgcgctcatcttcttcgccatttggcacattatagcatttgatgagctgaagactgattacaagaatcctatagaccagtgtaataccctgaatccccttgtactcccagagtacctcatccacgctttcttctgtgtcatgtttctttgtgcagcagagtggcttacactgggtctcaatatgcccctcttggcatatcatatttggaggtatatgagtagaccagtgatgagtggcccaggactctatgaccctacaaccatcatgaatgcagatattctagcatattgtcagaaggaaggatggtgcaaattagctttttatcttctagcatttttttactacctatatggcatgatctatgttttggtgagctcttagaacaacacacagaagaattggtccagttaagtgcatgcaaaaagccaccaaatgaagggattctatccagcaagatcctgtccaagagtagcctgtggaatctgatcagttactttaaaaaatgactccttattttttaaatgtttccacatttttgcttgtggaaagactgttttcatatgttatactcagataaagattttaaatggtattacgtataaattaatataaaatgattacctctggtgttgacaggtttgaacttgcacttcttaaggaacagccataatcctctgaatgatgcattaattactgactgtcctagtacattggaagcttttgtttataggaacttgtagggctcattttggtttcattgaaacagtatctaattataaattagctgtagatatcaggtgcttctgatgaagtgaaaatgtatatctgactagtgggaaacttcatgggtttcctcatctgtcatgtcgatgattatatatggatacatttacaaaaataaaaagcgggaattttcccttcgcttgaatattatccctgtatattgcatgaatgagagatttcccatatttccatcagagtaataaatatacttgctttaattcttaagcataagtaaacatgatataaaaatatatgctgaattacttgtgaagaatgcatttaaagctattttaaatgtgtttttatttgtaagacattacttattaagaaattggttattatgcttactgttctaatctggtggtaaaggtattcttaagaatttgcaggtactacagattttcaaaactgaatgagagaaaattgtataaccatcctgctgttcctttagtgcaatacaataaaactctgaaattaagactca

SEQ ID NO: 441599 - DNA, 1885 bp, Homo sapiens
acccagagggccctgcgccgcctttctccgctggcaacggcgccgctccccgctcctcctccccagccatggcgttcacgttcgcggccttctgctacatgctggcgctgctgctcactgccgcgctcatcttcttcgccatttggcacattatagcatttgatgagctgaagactgattacaagaatcctatagaccagtgtaataccctgaatccccttgtactcccagagtacctcatccacgctttcttctgtgtcatgtttctttgtgcagcagagtggcttacactgggtctcaatatgcccctcttggcatatcatatttggaggtatatgagtagaccagtgatgagtggcccaggactctatgaccctacaaccatcatgaatgcagatattctagcatattgtcagaaggaaggatggtgcaaattagctttttatcttctagcatttttttactacctatatggcatgatctatgttttggtgagctcttagaacaacacacagaagaattggtccagttaagtgcatgcaaaaagccaccaaatgaagggattctatccagcaagatcctgtccaagagtagcctgtggaatctgatcagttactttaaaaaatgactccttattttttaaatgtttccacatttttgcttgtggaaagactgttttcatatgttatactcagataaagattttaaatggtattacgtataaattaatataaaatgattacctctggtgttgacaggtttgaacttgcacttcttaaggaacagccataatcctctgaatgatgcattaattactgactgtcctagtacattggaagcttttgtttataggaacttgtagggctcattttggtttcattgaaacagtatctaattataaattagctgtagatatcaggtgcttctgatgaagtgaaaatgtatatctgactagtgggaaacttcatgggtttcctcatctgtcatgtcgatgattatatatggatacatttacaaaaataaaaagcgggaattttcccttcgcttgaatattatccctgtatattgcatgaatgagagatttcccatatttccatcagagtaataaatatacttgctttaattcttaagcataagtaaacatgatataaaaatatatgctgaattacttgtgaagaatgcatttaaagctattttaaatgtgtttttatttgtaagacattacttattaagaaattggttattatgcttactgttctaatctggtggtaaaggtattcttaagaatttgcaggtactacagattttcaaaactgaatgagagaaaattgtataaccatcctgctgttcctttagtgcaatacaataaaactctgaaattaagactcaaaaaaaaaaaaaaaaaaaaaaaaaaaaaaaacaaaaaaaaaaaaaaaaaatacaacaaaaagagagcgaaacccaaacaataacactcaaaaagaccacgacacaacggcgcccaaaacacagcgcaccaccaaaaaacctcacacaccacgcgcacaccaataacacaccccacaccgcgcccacaccggcaacctaaccacctcgcaacacgaacccccacacaagcggagaaaaccacgcgcacaccatccagagaaaagaccacaagcctcacacgccaccaacacaacaccaccacaccacccccgcacccacagcgagccacacagcgagcacacacaaacaactgcgcaccacgaccacaaccacacgaaccaagctcacaccaggagaccccgcaagaccaccccacagacagaccagccaacacgaacaaaccccacccaaccccaccccaccgaaacacccacaccccaaagcgcgaacgcaggcg

SEQ ID NO: 441600 - DNA, 871 bp, Homo sapiens
acccagagggccctgcgccgcctttctccgctggcaacggcgccgctccccgctcctcctccccagccatggcgttcacgttcgcggccttctgctacatgctggcgctgctgctcactgccgcgctcatcttcttcgccatttggcacattatagcatttgatgagctgaagactgattacaagaatcctatagaccagtgtaataccctgaatccccttgtactcccagagtacctcatccacgctttcttctgtgtcatgtttctttgtgcagcagagtggcttacactgggtctcaatatgcccctcttggcatatcatatttggaggtatatgagtagaccagtgatgagtggcccaggactctatgaccctacaaccatcatgaatgcagatattctagcatattgtcagaaggaaggatggtgcaaattagctttttatcttctagcatttttttactacctatatggcatgatctatgttttggtgagctcttagaacaacacacagaagaattggtccagttaagtgcatgcaaaaagccaccaaatgaagggattctatccagcaagatcctgtccaagagtagcctgtggaatctgatcagttactttaaaaaatgactccttattttttaaatgtttccacatttttgcttgtggaaagactgttttcatatgttatactcagataaagattttaaatggtattacgtataaattaatataaaatgattacctctggtgttgacaggtttgaacttgcacttcttaaggaacagccataatcctctgaatgtaatacttcctaaatgtacatatcttcccccaccgtctgtttcacctggttcgttcatttgtttgtgg

SEQ ID NO: 441601 - DNA, 1338 bp, Homo sapiens
tcaacgttttcagccggagcccttttccatggacttaacaaatggcattggggcgcctgctgctcactgccgcgctcatcttcttcgccatttggcacattatagcatttgatgagctgaagactgattacaagaatcctatagaccagtgtaataccctgaatccccttgtactcccagagtacctcatccacgctttcttctgtgtcatgtttctttgtgcagcagagtggcttacactgggtctcaatatgcccctcttggcatatcatatttggaggtatatgagtagaccagtgatgagtggcccaggactctatgaccctacaaccatcatgaatgcagatattctagcatattgtcagaaggaaggatggtgcaaattagctttttatcttctagcatttttttactacctatatggcatgatctatgttttggtgagctcttagaacaacacacagaagaattggtccagttaagtgcatgcaaaaagccaccaaatgaagggattctatccagcaagatcctgtccaagagtagcctgtggaatctgatcagttactttaaaaaatgactccttattttttaaatgtttccacatttttgcttgtggaaagactgttttcatatgttatactcagataaagattttaaatggtattacgtataaattaatataaaatgattacctctggtgttgacaggtttgaacttgcacttcttaaggaacagccataatcctctgaatgatgcattaattactgactgtcctagtacattggaagcttttgtttataggaacttgtagggctcattttggtttcattgaaacagtatctaattataaattagctgtagatatcaggtgcttctgatgaagtgaaaatgtatatctgactagtgggaaacttcatgggtttcctcatctgtcatgtcgatgattatatatggatacatttacaaaaataaaaagcgggaattttcccttcgcttgaatattatccctgtatattgcatgaatgagagatttcccatatttccatcagagtaataaatatacttgctttaattcttaagcataagtaaacatgatataaaaatatatgctgaattacttgtgaagaatgcatttaaagctattttaaatgtgtttttatttgtaagacattacttattaagaaattggttattatgcttactgttctaatctggtggtaaaggtattcttaagaatttgcaggtactacagattttcaaaactgaatgagagaaaattgtataaccatcctgctgttcctttagtgcaatacaataaaactctgaaattaagactca

SEQ ID NO: 441602 - DNA, 1437 bp, Homo sapiens
acccagagggccctgcgccgcctttctccgctggcaacggcgccgctccccgctcctcctccccagccatggcgttcacgttcgcggccttctgctacatgctggcgctgctgctcactgccgcgctcatcttcttcgccatttggcacattatagcatttgatgagctgaagactgattacaagaatcctatagaccagtgtaataccctgaatcccacagttgaaaaggtcaaaaagattaaaagagtcaaaattgcattaaagcttgtactcccagagtacctcatccacgctttcttctgtgtcatgtttctttgtgcagcagagtggcttacactgggtctcaatatgcccctcttggcatatcatatttggaggtatatgagtagaccagtgatgagtggcccaggactctatgaccctacaaccatcatgaatgcagatattctagcatattgtcagaaggaaggatggtgcaaattagctttttatcttctagcatttttttactacctatatggcatgatctatgttttggtgagctcttagaacaacacacagaagaattggtccagttaagtgcatgcaaaaagccaccaaatgaagggattctatccagcaagatcctgtccaagagtagcctgtggaatctgatcagttactttaaaaaatgactccttattttttaaatgtttccacatttttgcttgtggaaagactgttttcatatgttatactcagataaagattttaaatggtattacgtataaattaatataaaatgattacctctggtgttgacaggtttgaacttgcacttcttaaggaacagccataatcctctgaatgatgcattaattactgactgtcctagtacattggaagcttttgtttataggaacttgtagggctcattttggtttcattgaaacagtatctaattataaattagctgtagatatcaggtgcttctgatgaagtgaaaatgtatatctgactagtgggaaacttcatgggtttcctcatctgtcatgtcgatgattatatatggatacatttacaaaaataaaaagcgggaattttcccttcgcttgaatattatccctgtatattgcatgaatgagagatttcccatatttccatcagagtaataaatatacttgctttaattcttaagcataagtaaacatgatataaaaatatatgctgaattacttgtgaagaatgcatttaaagctattttaaatgtgtttttatttgtaagacattacttattaagaaattggttattatgcttactgttctaatctggtggtaaaggtattcttaagaatttgcaggtactacagattttcaaaactgaatgagagaaaattgtataaccatcctgctgttcctttagtgcaatacaataaaactctgaaattaagactca

SEQ ID NO: 441603 - DNA, 1320 bp, Homo sapiens
acccagagggccctgcgccgcctttctccgctggcaacggcgccgctccccgctcctcctccccagccatggcgttcacgttcgcggccttctgctacatgctggcgctgctgctcactgccgcgctcatcttcttcgccatttggcaccttgtactcccagagtacctcatccacgctttcttctgtgtcatgtttctttgtgcagcagagtggcttacactgggtctcaatatgcccctcttggcatatcatatttggaggtatatgagtagaccagtgatgagtggcccaggactctatgaccctacaaccatcatgaatgcagatattctagcatattgtcagaaggaaggatggtgcaaattagctttttatcttctagcatttttttactacctatatggcatgatctatgttttggtgagctcttagaacaacacacagaagaattggtccagttaagtgcatgcaaaaagccaccaaatgaagggattctatccagcaagatcctgtccaagagtagcctgtggaatctgatcagttactttaaaaaatgactccttattttttaaatgtttccacatttttgcttgtggaaagactgttttcatatgttatactcagataaagattttaaatggtattacgtataaattaatataaaatgattacctctggtgttgacaggtttgaacttgcacttcttaaggaacagccataatcctctgaatgatgcattaattactgactgtcctagtacattggaagcttttgtttataggaacttgtagggctcattttggtttcattgaaacagtatctaattataaattagctgtagatatcaggtgcttctgatgaagtgaaaatgtatatctgactagtgggaaacttcatgggtttcctcatctgtcatgtcgatgattatatatggatacatttacaaaaataaaaagcgggaattttcccttcgcttgaatattatccctgtatattgcatgaatgagagatttcccatatttccatcagagtaataaatatacttgctttaattcttaagcataagtaaacatgatataaaaatatatgctgaattacttgtgaagaatgcatttaaagctattttaaatgtgtttttatttgtaagacattacttattaagaaattggttattatgcttactgttctaatctggtggtaaaggtattcttaagaatttgcaggtactacagattttcaaaactgaatgagagaaaattgtataaccatcctgctgttcctttagtgcaatacaataaaactctgaaattaagactca

SEQ ID NO: 441604 - DNA, 1227 bp, Homo sapiens
aagcagtggtatcaacgcagagtgcccattacggccggggtaataccctgaatccccttgtactcccagagtacctcatccacgctttcttctgtgtcatgtttctttgtgcagcagagtggcttacactgggtctcaatatgcccctcttggcatatcatatttggaggtatatgagtagaccagtgatgagtggcccaggactctatgaccctacaaccatcatgaatgcagatattctagcatattgtcagaaggaaggatggtgcaaattagctttttatcttctagcatttttttactacctatatggcatgatctatgttttggtgagctcttagaacaacacacagaagaattggtccagttaagtgcatgcaaaaagccaccaaatgaagggattctatccagcaagatcctgtccaagagtagcctgtggaatctgatcagttactttaaaaaatgactccttattttttaaatgtttccacatttttgcttgtggaaagactgttttcatatgttatactcagataaagattttaaatggtattacgtataaattaatataaaatgattacctctggtgttgacaggtttgaacttgcacttcttaaggaacagccataatcctctgaatgatgcattaattactgactgtcctagtacattggaagcttttgtttataggaacttgtagggctcattttggtttcattgaaacagtatctaattataaattagctgtagatatcaggtgcttctgatgaagtgaaaatgtatatctgactagtgggaaacttcatgggtttcctcatctgtcatgtcgatgattatatatggatacatttacaaaaataaaaagcgggaattttcccttcgcttgaatattatccctgtatattgcatgaatgagagatttcccatatttccatcagagtaataaatatacttgctttaattcttaagcataagtaaacatgatataaaaatatatgctgaattacttgtgaagaatgcatttaaagctattttaaatgtgtttttatttgtaagacattacttattaagaaattggttattatgcttactgttctaatctggtggtaaaggtattcttaagaatttgcaggtactacagattttcaaaactgaatgagagaaaattgtataaccatcctgctgttcctttagtgcaatacaataaaactctgaaattaagactca

SEQ ID NO: 441605 - DNA, 1432 bp, Homo sapiens
ggcgttcttcatcacccagtcagggggtcgacggtccgtgggctatatctgacataacacatgtgctggttacgctgttgcctccagcgggcacgtcggctcgtgcaatactgtacttacgtgcacttgtggtacattatactaagtatatatgaatgacgcgtgagagacctgagttacgatgaagtcctaatatacacaatggtagataactcggcatggatctcctccaccttggtatcttcactcaggaagatagcacgttcatacacgacgacgtcttcgtatcatgtagtctatagtgctccttgtggtggagcagagtggcttacactgggtctcaatatgcccctcttggcatatcatatttggaggtatatgagtagaccagtgatgagtggcccaggactctatgaccctacaaccatcatgaatgcagatattctagcatattgtcagaaggaaggatggtgcaaattagctttttatcttctagcatttttttactacctatatggcatgatctatgttttggtgagctcttagaacaacacacagaagaattggtccagttaagtgcatgcaaaaagccaccaaatgaagggattctatccagcaagatcctgtccaagagtagcctgtggaatctgatcagttactttaaaaaatgactccttattttttaaatgtttccacatttttgcttgtggaaagactgttttcatatgttatactcagataaagattttaaatggtattacgtataaattaatataaaatgattacctctggtgttgacaggtttgaacttgcacttcttaaggaacagccataatcctctgaatgatgcattaattactgactgtcctagtacattggaagcttttgtttataggaacttgtagggctcattttggtttcattgaaacagtatctaattataaattagctgtagatatcaggtgcttctgatgaagtgaaaatgtatatctgactagtgggaaacttcatgggtttcctcatctgtcatgtcgatgattatatatggatacatttacaaaaataaaaagcgggaattttcccttcgcttgaatattatccctgtatattgcatgaatgagagatttcccatatttccatcagagtaataaatatacttgctttaattcttaagcataagtaaacatgatataaaaatatatgctgaattacttgtgaagaatgcatttaaagctattttaaatgtgtttttatttgtaagacattacttattaagaaattggttattatgcttactgttctaatctggtggtaaaggtattcttaagaatttgcaggtactacagattttcaaaactgaatgagagaaaattgtataaccatcctgctgttcctttagtgcaatacaataaaactctgaaattaagactca

SEQ ID NO: 441606 - DNA, 1046 bp, Homo sapiens
gacagccattaggtgacagccatttaggtacctaaatggctgcatgaatgcagatattctagcatattgtcagaaggaaggatggtgcaaattagctttttatcttctagcatttttttactacctatatggcatgatctatgttttggtgagctcttagaacaacacacagaagaattggtccagttaagtgcatgcaaaaagccaccaaatgaagggattctatccagcaagatcctgtccaagagtagcctgtggaatctgatcagttactttaaaaaatgactccttattttttaaatgtttccacatttttgcttgtggaaagactgttttcatatgttatactcagataaagattttaaatggtattacgtataaattaatataaaatgattacctctggtgttgacaggtttgaacttgcacttcttaaggaacagccataatcctctgaatgatgcattaattactgactgtcctagtacattggaagcttttgtttataggaacttgtagggctcattttggtttcattgaaacagtatctaattataaattagctgtagatatcaggtgcttctgatgaagtgaaaatgtatatctgactagtgggaaacttcatgggtttcctcatctgtcatgtcgatgattatatatggatacatttacaaaaataaaaagcgggaattttcccttcgcttgaatattatccctgtatattgcatgaatgagagatttcccatatttccatcagagtaataaatatacttgctttaattcttaagcataagtaaacatgatataaaaatatatgctgaattacttgtgaagaatgcatttaaagctattttaaatgtgtttttatttgtaagacattacttattaagaaattggttattatgcttactgttctaatctggtggtaaaggtattcttaagaatttgcaggtactacagattttcaaaactgaatgagagaaaattgtataaccatcctgctgttcctttagtgcaatacaataaaactctgaaattaagactca

SEQ ID NO: 441607 - DNA, 1248 bp, Homo sapiens
acccagagggccctgcgccgcctttctccgctggcaacggcgccgctccccgctcctcctccccagccatggcgttcacgttcgcggccttctgctacatgctggcgctgctgctcactgccgcgctcatcttcttcgccatttggcacattatagcatttgatgagctgaagactgattacaagaatcctatagaccagtgtaataccctgaatccccttgtactcccagagtacctcatccacgctttcttctgtgtcatgtttctttgtgcagcagagtggcttacactgggtctcaatatgcccctcttggcatatcatatttggaggtatatgagtagaccagtgatgagtggcccaggactctatgaccctacaaccatcatgaatgcagatattctagcatattgtcagaaggaaggatggtgcaaattagctttttatcttctagcatttttttactacctatatggtttaaaaaatgactccttattttttaaatgtttccacatttttgcttgtggaaagactgttttcatatgttatactcagataaagattttaaatggtattacgtataaattaatataaaatgattacctctggtgttgacaggtttgaacttgcacttcttaaggaacagccataatcctctgaatgatgcattaattactgactgtcctagtacattggaagcttttgtttataggaacttgtagggctcattttggtttcattgaaacagtatctaattataaattagctgtagatatcaggtgcttctgatgaagtgaaaatgtatatctgactagtgggaaacttcatgggtttcctcatctgtcatgtcgatgattatatatggatacatttacaaaaataaaaagcgggaattttcccttcgcttgaatattatccctgtatattgcatgaatgagagatttcccatatttccatcagagtaataaatatacttgctttaattcttaagcataagtaaacatgatataaaaatatatgctgaattacttgtgaagaatgcatttaaagctattttaaatgtgtttttatttgtaagacattacttattaagaaattggttattatgcttactgttctaatctggtggtaaaggtattcttaagaatttgcaggtactacagattttcaaaactgaatgagagaaaattgtataaccatcctgctgttcctttagtgcaatacaataaaactctgaaattaagactca

SEQ ID NO: 441608 - DNA, 1381 bp, Homo sapiens
acccagagggccctgcgccgcctttctccgctggcaacggcgccgctccccgctcctcctccccagccatggcgttcacgttcgcggccttctgctacatgctggcgctgctgctcactgccgcgctcatcttcttcgccatttggcacattatagcatttgatgagctgaagactgattacaagaatcctatagaccagtgtaataccctgaatccccttgtactcccagagtacctcatccacgctttcttctgtgtcatgtttctttgtgcagcagagtggcttacactgggtctcaatatgcccctcttggcatatcatatttggaggtatatgagtagaccagtgatgagtggcccaggactctatgaccctacaaccatcatgaatgcagatattctagcatattgtcagaaggaaggatggtgcaaattagctttttatcttctagcatttttttactacctatatggcatgatctatgttttggtgagctcttagaacaacacacagaagaattggtccagttaagtgcatgcaaaaagccaccaaatgaagggattctatccagcaagatcctgtccaagagtagcctgtggaatctgatcagttactttaaaaaatgactccttatcctcccacacactgttcccacactctccgcctgctggaaagactgcccccactatgcttactacctcacgcactcacgcatcccaaactggctatcacgtactaacaccttactactaacaactgacttaccatcatggaatgatagacaggctccgaagccttggcacctctcctcaccgcgaacacgcccataactcctcctgacactgactgccactcacacttacctggtctgtacctcagctaccactggcgcaacgcctcccacgctccactacgcgaaccctcgctacggcgctcactaaaccgcgctcacccactctggacaaccacgccactcccaacttcactaaacactcaagccccgctcagaactacttcagcgactggcccccccggcactcgccagcctggaaaccaccgggccactaatccctgaacccaaggccgcccgcacccagccccccaccgccgacgctcacccccaatcaaaaacaagagaacaacaagcagtcgaaacctgaacctccgacccttcactgcgcgacccacccccccactctcacccccagacacggagcgaagacacaacccccgcagcggagacaaacactaccacgacaccacactcacacccacggtacacactgaccaccactccccccagcgcgcactacccggcaccccatcaccacacacacataaactccccgccaacactgacgacccccatccacgacagc

SEQ ID NO: 441609 - DNA, 280 bp, Homo sapiens
ggaggaggagcatgcacagataaataaaaatggtccttctccctgagagtgtagaggggcagacagacctgtgtgtaaataccacactccagggtgagaaaagccatatcgatggcattatagagtcccatgctgtgtggagatgtgggcaattacttctgcccaaaggagttaggaaagcctgcagaaagaagttgacctaggaaggtttgttttttttttaggataaagaggaatttggataaacagttgaaattatttttctactcagaagattatt

SEQ ID NO: 441610 - DNA, 721 bp, Homo sapiens
ggaacttgtagggctcattttggtttcattgaaacagtatctaattataaattagctgtagatatcaggtgcttctgatgaagtgaaaatgtatatctgactagtgggaaacttcatgggtttcctcatctgtcatgtcgatgattatatatggatacatttacaaaaataaaaagcgggaattttcccttcgcttgaatattatccctgtatattgcatgaatgagagatttcccatatttccatcagagtaataaatatacttgctttaattcttaagcataagtaaacatgatataaaaatatatgctgaattacttgtgaagaatgcatttaaagctattttaaatgtgtttttatttgtaagacattacttattaagaaattggttattatgcttactgttctaatctggtggtaaaggtattcttaagaatttgcaggtactacagattttcaaaactgaatgagagaaaattgtataaccatcctgctgttcctttagtgcaatacaataaaactctgaaattaagactcactttcagtgcattgtttgagattaaaaatagtatttcttaaacttgcttaatccatgataaagacatgttgctgtcatttttaaaaagtgacgtactacattatgggttttctgaaaaataccatgcctagatctaaaaaggaaaatttttaaatgccgagcacattaacctcttttgtcatt

SEQ ID NO: 441611 - DNA, 602 bp, Homo sapiens
ggcagatatctgagctcaagggttgagaacagcccagcaacataggtaccccatctctacaaaaatgcaaaaatagccaggtctggtgtgcaacacctgtaatcccagctactctgtatgggggatctcgagatcccccattacagcttgtactcccagagtacctcatccacgctttcttctgtgtcatgtttctttgtgcagcagagtggcttacactgggtctcaatatgcccctcttggcatatcatatttggaggtatatgagtagaccagtgatgagtggcccaggactctatgaccctacaaccatcatgaatgcagatattctagcatattgtcagaaggaaggatggtgcaaattagctttttatcttctagcatttttttactacctatatggggatctcgagatcccccatacagagtactctggactcatagaacttacacctgaagttatagtgaacttggcttcccctgctgtcagctctttgaaagtaaggctcatttttaaaattgtatccccaggacctagcatagctcctaactcaaaataggcactcactcatacttgtgtactctgtatggggatctcggta

SEQ ID NO: 441612 - DNA, 976 bp, Homo sapiens
acccagagggccctgcgccgcctttctccgctggcaacggcgccgctccccgctcctcctccccagccatggcgttcacgttcgcggccttctgctacatgctggcgctgctgctcactgccgcgctcatcttcttcgccatttggcacattatagcatttgatgagctgaagactgattacaagaatcctatagaccagtgtaataccctgaatccccttgtactcccagagtacctcatccacgctttcttctgtgtcatgtttctttgtgcagcagagtggcttacactgggtctcaatatgcccctcttggcatatcatatttggaggtatatgagtagaccagtgatgagtggcccaggactctatgaccctacaaccatcatgaatgcagatattctagcatattgtcagaaggaaggatggtgcaaattagctttttatcttctagcatttttttactacctatatggcatgatctatgttttggtgagctcttagaacaacacacagaagaattggtccagttaagtgcatgcaaaaagccaccaaatgaagggattctatccagcaagatcctgtccaagagtagcctgtggaatctgatcagttactttaaaaaatgactccttattttttaaatgtttccacatttttgcttgtggaaagactgttttcatatgttatactcagataaagattttaaatggtattacgtataaattaatataaaatgattacctctggtgttgacaggtttgaacttgcacttcttaaggaacagccataatcctctgaatgatgcattaattactgactgtcctagtacattggaagcttttgtttataggaacttgtagggctcattttggtttcattgaaacagtatctaattataaattagctgtagatatcaggtgcttctgatgaagtgaaaatgtatatcaaccagtgaaatcgggccgagctcgatt

SEQ ID NO: 441613 - DNA, 1505 bp, Homo sapiens
acccagagggccctgcgccgcctttctccgctggcaacggcgccgctccccgctcctcctccccagccatggcgttcacgttcgcggccttctgctacatgctggcgctgctgctcactgccgcgctcatcttcttcgccatttggcacgataaagaggaatttggataaacagttgaaattatttttctactcagaagattatttcgagtagagataagttgaaataacttgagcagaggcattgacgaaattgaaaattgaagattatagcatttgatgagctgaagactgattacaagaatcctatagaccagtgtaataccctgaatccccttgtactcccagagtacctcatccacgctttcttctgtgtcatgtttctttgtgcagcagagtggcttacactgggtctcaatatgcccctcttggcatatcatatttggaggtatatgagtagaccagtgatgagtggcccaggactctatgaccctacaaccatcatgaatgcagatattctagcatattgtcagaaggaaggatggtgcaaattagctttttatcttctagcatttttttactacctatatggcatgatctatgttttggtgagctcttagaacaacacacagaagaattggtccagttaagtgcatgcaaaaagccaccaaatgaagggattctatccagcaagatcctgtccaagagtagcctgtggaatctgatcagttactttaaaaaatgactccttattttttaaatgtttccacatttttgcttgtggaaagactgttttcatatgttatactcagataaagattttaaatggtattacgtataaattaatataaaatgattacctctggtgttgacaggtttgaacttgcacttcttaaggaacagccataatcctctgaatgatgcattaattactgactgtcctagtacattggaagcttttgtttataggaacttgtagggctcattttggtttcattgaaacagtatctaattataaattagctgtagatatcaggtgcttctgatgaagtgaaaatgtatatctgactagtgggaaacttcatgggtttcctcatctgtcatgtcgatgattatatatggatacatttacaaaaataaaaagcgggaattttcccttcgcttgaatattatccctgtatattgcatgaatgagagatttcccatatttccatcagagtaataaatatacttgctttaattcttaagcataagtaaacatgatataaaaatatatgctgaattacttgtgaagaatgcatttaaagctattttaaatgtgtttttatttgtaagacattacttattaagaaattggttattatgcttactgttctaatctggtggtaaaggtattcttaagaatttgcaggtactacagattttcaaaactgaatgagagaaaattgtataaccatcctgctgttcctttagtgcaatacaataaaactctgaaattaagactca

SEQ ID NO: 441614 - DNA, 1276 bp, Homo sapiens
acccagagggccctgcgccgcctttctccgctggcaacggcgccgctccccgctcctcctccccagccatggcgttcacgttcgcggccttctgctacatgctggcgctgctgctcactgccgcgctcatcttcttcgccatttggcacattatagcatttgatgagctgaagactgattacaagaatcctatagaccagtgtaataccctgaatcccgtatatgagtagaccagtgatgagtggcccaggactctatgaccctacaaccatcatgaatgcagatattctagcatattgtcagaaggaaggatggtgcaaattagctttttatcttctagcatttttttactacctatatggcatgatctatgttttggtgagctcttagaacaacacacagaagaattggtccagttaagtgcatgcaaaaagccaccaaatgaagggattctatccagcaagatcctgtccaagagtagcctgtggaatctgatcagttactttaaaaaatgactccttattttttaaatgtttccacatttttgcttgtggaaagactgttttcatatgttatactcagataaagattttaaatggtattacgtataaattaatataaaatgattacctctggtgttgacaggtttgaacttgcacttcttaaggaacagccataatcctctgaatgatgcattaattactgactgtcctagtacattggaagcttttgtttataggaacttgtagggctcattttggtttcattgaaacagtatctaattataaattagctgtagatatcaggtgcttctgatgaagtgaaaatgtatatctgactagtgggaaacttcatgggtttcctcatctgtcatgtcgatgattatatatggatacatttacaaaaataaaaagcgggaattttcccttcgcttgaatattatccctgtatattgcatgaatgagagatttcccatatttccatcagagtaataaatatacttgctttaattcttaagcataagtaaacatgatataaaaatatatgctgaattacttgtgaagaatgcatttaaagctattttaaatgtgtttttatttgtaagacattacttattaagaaattggttattatgcttactgttctaatctggtggtaaaggtattcttaagaatttgcaggtactacagattttcaaaactgaatgagagaaaattgtataaccatcctgctgttcctttagtgcaatacaataaaactctgaaattaagactca

SEQ ID NO: 441615 - DNA, 1245 bp, Homo sapiens
acccagagggccctgcgccgcctttctccgctggcaacggcgccgctccccgctcctcctccccagccatggcgttcacgttcgcggccttctgctacatgctggcgctgctgctcactgccgcgctcatcttcttcgccatttggcacattatagcatttgatgagctgaagactgattacaagaatcctatagaccagtgtaataccctgaatccccttgtactcccagagtacctcatccacgctttcttctgtgtcatgtttctttgtgcagcagagtggcttacactgggtctcaatatgcccctcttggcatatcatatttggagcatgatctatgttttggtgagctcttagaacaacacacagaagaattggtccagttaagtgcatgcaaaaagccaccaaatgaagggattctatccagcaagatcctgtccaagagtagcctgtggaatctgatcagttactttaaaaaatgactccttattttttaaatgtttccacatttttgcttgtggaaagactgttttcatatgttatactcagataaagattttaaatggtattacgtataaattaatataaaatgattacctctggtgttgacaggtttgaacttgcacttcttaaggaacagccataatcctctgaatgatgcattaattactgactgtcctagtacattggaagcttttgtttataggaacttgtagggctcattttggtttcattgaaacagtatctaattataaattagctgtagatatcaggtgcttctgatgaagtgaaaatgtatatctgactagtgggaaacttcatgggtttcctcatctgtcatgtcgatgattatatatggatacatttacaaaaataaaaagcgggaattttcccttcgcttgaatattatccctgtatattgcatgaatgagagatttcccatatttccatcagagtaataaatatacttgctttaattcttaagcataagtaaacatgatataaaaatatatgctgaattacttgtgaagaatgcatttaaagctattttaaatgtgtttttatttgtaagacattacttattaagaaattggttattatgcttactgttctaatctggtggtaaaggtattcttaagaatttgcaggtactacagattttcaaaactgaatgagagaaaattgtataaccatcctgctgttcctttagtgcaatacaataaaactctgaaattaagactca

SEQ ID NO: 441616 - DNA, 823 bp, Homo sapiens
tggaagtcgtgcggaggtcagaaggcggaaccgctgctgggagacggcgggatctctttcgccatggctgccgggccgatctccgagcggaatcaggatgccactgtgtacgtggggggcctggatgagaaggttagtgaaccgctgctgtgggaactgtttctccaggctggaccagtagtcaacacccacatgccaaaggatagagtcactggccagcaccaaggctatggctttgtggaattcttgagtgaggaagatgctgactatgccattaagatcatgaacatgatcaaactctatgggaagccaatacgggtgaacaaagcatcagctcacaacaaaaacctggatgtaggggccaacattttcattgggaacctggaccctgagattgatgagaagttgctttatgatactttcagcgcctttggggtcatcttacaaacccccaaaattatgcgggaccctgacacaggcaactccaaaggttatgcctttattaattttgcttcatttgatgcttcggatgcagcaattgaagccatgaatgggcagtacctctgtaaccgtcctatcaccgtatcttatgccttcaagaaggactccaagggtgagcgccatggctcagcagccgaacgacttctggcagctcagaacccgctctcccaggctgatcgccctcatcagctgtttgcagatgcacctcctccaccctctgctcccaatcctgtggtatcatcattggggtctgggcttcctccaccaggcatgctctctgggtccttttcccccccggggcctctggggcccccgtcccccg

SEQ ID NO: 441617 - DNA, 1576 bp, Homo sapiens
tctggatactcggcccctcccgggaatgttttaccgcggcaagtaatcaggttcgcacggcgggatctctttcgccatggctgccgggccgatctccgagcggaatcaggatgccactgtgtacgtggggggcctggatgagaaggttagtgaaccgctgctgtgggaactgtttctccaggctggaccagtagtcaacacccacatgccaaaggatagagtcactggccagcaccaaggctatggctttgtggaattcttgagtgaggaagatgctgactatgccattaagatcatgaacatgatcaaactctatgggaagccaatacgggtgaacaaagcatcagctcacaacaaaaacctggatgtaggggccaacattttcattgggaacctggaccctgagattgatgagaagttgctttatgatactttcagcgcctttggggtcatcttacaaacccccaaaattatgcgggaccctgacacaggcaactccaaaggttatgcctttattaattttgcttcatttgatgcttcggatgcagcaattgaagccatgaatgggcagtacctctgtaaccgtcctatcaccgtatcttatgccttcaagaaggactccaagggtgagcgccatggctcagcagccgaacgacttctggcagctcagaacccgctctcccaggctgatcgccctcatcagctgtttgcagatgcacctcctccaccctctgctcccaatcctgtggtatcatcattggggtctgggcttcctccaccaggcatgcctcctcctggctccttcccacccccagtgccacctcctggagccctcccacctgggatacccccagccatgcccccaccacctatgcctcctggggctgcaggacatggccccccatcggcaggaaccccaggggcaggacatcctggtcatggacactcacatcctcacccattcccaccgggtgggatgccccatccagggatgtctcagatgcagcttgcacaccatggccctcatggcttaggacatccccacgctggacccccaggctctgggggccagccaccgccccgaccaccacctggaatgcctcatcctggacctcctccaatgggcatgcccccccgagggcctccattcggatctcccatgggtcacccaggtcctatgcctccgcatggtatgcgtggacctcctccactgatgcccccccatggatacactggccctccacgacccccaccctatggctaccagcgggggcctctccctccacccagacccactccccggccaccagttccccctcgaggcccacttcgaggccctctccctcagtaaattcacattttccttcctcctgttacattttcccaatatcttttctattccttggaccaatcagagatgctgtagctccttggggcaaaggtactaatccctttcagcacccccactccattcccctttttaatgtaactttttccacaggaggtatttcttttttatgttggtcctgagtattttgcaaatgcacagagaaaataaaactaaactccttgttta

SEQ ID NO: 441618 - DNA, 1551 bp, Homo sapiens
acccaaacagctagtagggccgcgtttaaatcgggcagaggctcctttcgccatggttgcgggccgatctccgagcggaatcaggatgccactgtgtacgtggggggcctggatgagaaggttagtgaaccgctgctgtgggaactgtttctccaggctggaccagtagtcaacacccacatgccaaaggatagagtcactggccagcaccaaggctatggctttgtggaattcttgagtgaggaagatgctgactatgccattaagatcatgaacatgatcaaactctatgggaagccaatacgggtgaacaaagcatcagctcacaacaaaaacctggatgtaggggccaacattttcattgggaacctggaccctgagattgatgagaagttgctttatgatactttcagcgcctttggggtcatcttacaaacccccaaaattatgcgggaccctgacacaggcaactccaaaggttatgcctttattaattttgcttcatttgatgcttcggatgcagcaattgaagccatgaatgggcagtacctctgtaaccgtcctatcaccgtatcttatgccttcaagaaggactccaagggtgagcgccatggctcagcagccgaacgacttctggcagctcagaacccgctctcccaggctgatcgccctcatcagctgtttgcagatgcacctcctccaccctctgctcccaatcctgtggtatcatcattggggtctgggcttcctccaccaggcatgcctcctcctggctccttcccacccccagtgccacctcctggagccctcccacctgggatacccccagccatgcccccaccacctatgcctcctggggctgcaggacatggccccccatcggcaggaaccccaggggcaggacatcctggtcatggacactcacatcctcacccattcccaccgggtgggatgccccatccagggatgtctcagatgcagcttgcacaccatggccctcatggcttaggacatccccacgctggacccccaggctctgggggccagccaccgccccgaccaccacctggaatgcctcatcctggacctcctccaatgggcatgcccccccgagggcctccattcggatctcccatgggtcacccaggtcctatgcctccgcatggtatgcgtggacctcctccactgatgcccccccatggatacactggccctccacgacccccaccctatggctaccagcgggggcctctccctccacccagacccactccccggccaccagttccccctcgaggcccacttcgaggccctctccctcagtaaattcacattttccttcctcctgttacattttcccaatatcttttctattccttggaccaatcagagatgctgtagctccttggggcaaaggtactaatccctttcagcacccccactccattcccctttttaatgtaactttttccacaggaggtatttcttttttatgttggtcctgagtattttgcaaatgcacagagaaaataaaactaaactccttgttta

SEQ ID NO: 441619 - DNA, 1116 bp, Homo sapiens
  misc_feature (997)..(997): n is a, c, g, or t
  misc_feature (1005)..(1005): n is a, c, g, or t
  misc_feature (1015)..(1015): n is a, c, g, or t
  misc_feature (1022)..(1022): n is a, c, g, or t
  misc_feature (1084)..(1084): n is a, c, g, or t
tggaagtcgtgcggaggtcagaaggcggaaccgctgctgggagacggcgggatctctttcgccatggctgccgggccgatctccgagcggaatcaggatgccactgtgtacgtggggggcctggatgagaaggttagtgaaccgctgctgtgggaactgtttctccaggctggaccagtagtcaacacccacatgccaaaggatagagtcactggccagcaccaaggctatggctttgtggaattcttgagtgaggaagatgctgactatgccattaagatcatgaacatgatcaaactctatgggaagccaatacgggtgaacaaagcatcagctcacaacaaaaacctggatgtaggggccaacattttcattgggaacctggaccctgagattgatgagaagttgctttatgatactttcagcgcctttggggtcatcttacaaacccccaaaattatgcgggaccctgacacaggcaactccaaaggttatgcctttattaattttgcttcatttgatgcttcggatgcagcaattgaagccatgaatgggcagtacctctgtaaccgtcctatcaccgtatcttatgccttcaagaaggactccaagggtgagcgccatggctcagcagccgaacgacttctggcagctcagaacccgctctcccaggctgatcgccctcatcagctgtttgcagatgcacctcctccaccctctgctcccaatcctgtggtatcatcattggggtctgggcttcctccaccaggcatgcctcctcctggctccttcccacccccagtgccacctcctggagccctcccacctgggatacccccagccatgcccccaccacctatgcctcctggggctgcaggacatggccccccatcggcaggaaccccaggggcaggacatcctggtcatggacactcacatcctcacccattcccaccgggtgggatgccccatccagatcaggattttagatgagctnacacatgnctatgctagnaatccanctgacccagctctgggcagcacgccgacacactgatgctatctgactctcatggatccccgnggctattgattcatggtacagtcttctcgatg

SEQ ID NO: 441620 - DNA, 1788 bp, Homo sapiens
tggaagtcgtgcggaggtcagaaggcggaaccgctgctgggagacggcgggatctctttcgccatggctgccgggccgatctccgagcggaatcaggatgccactgtgtacgtggggggcctggatgagaaggttagtgaaccgctgctgtgggaactgtttctccaggctggaccagtagtcaacacccacatgccaaaggatagagtcactggccagcaccaaggctatggctttgtggaattcttgagtgaggaagatgctgactatgccattaagatcatgaacatgatcaaactctatgggaagccaatacgggtgaacaaagcatcagctcacaacaaaaacctggatgtaggggccaacattttcattgggaacctggaccctgagattgatgagaagttgctttatgatactttcagcgcctttggggtcatcttacaaacccccaaaattatgcgggaccctgacacaggcaactccaaaggttatgcctttattaattttgcttcatttgatgcttcggatgcagcaattgaagccatgaatgggcagtacctctgtaaccgtcctatcaccgtatcttatgccttcaagaaggactccaagggtgagcgccatggctcagcagccgaacgacttctggcagctcagaacccgctctcccaggctgatcgccctcatcagctgtttgcagatgcacctcctccaccctctgctcccaatcctgtggtatcatcattggggtctgggcttcctccaccaggcatgcctcctcctggctccttcccacccccagtgccacctcctggagccctcccacctgggatacccccagccatgcccccaccacctatgcctcctggggctgcaggacatggccccccatcggcaggaaccccaggggcaggacatcctggtcatggacactcacatcctcacccattcccaccgggtgggatgccccatccagcccgaccaccacctggaatgcctcatcctggacctcctccaatgggcatgcccccccgagggcctccattcggatctcccatgggtcacccaggtcctatgcctccgcatggtatgcgtggacctcctccactgatgcccccccatggatacactggccctccacgagcctctgaccactactggtttaacaacgggggtctgattccatccaccgagacacccacgtcccccggttggacacagcttttgacgtcctacggacccccattctcgagaccccgtcgtagcgtcacatactagttctatgtaggctcatctctacgctcccttgtgtaccattttgccctccagtcactctctagtcgtactttccctgtgggcaagcgcctcgagacgaaatgggcttgctagggcctccccattgggagggccataaaggatacccaaatggtcgctcatttatcagggcatcctccggttctccaagtctctgcccgtgtgtgtgacaactgagtacatgcatttctgtccctacaaggaaaagtgatactaatgcgatagcttacatatccgtgacgagggccctgagggtaagttttgagggcacaggattcgcgcacgagaaaaaactagcaagctttagcatttccctattgtgtgtagagccaacaacggccaaacctctagaccatacatcgtacgagttggccaccaccttacgttacgctgtaccataagcttagtcccacgcagacgaagtcccaacacgtctctacgagtgacccattcttcccaatgtgatgatcccgg

SEQ ID NO: 441621 - DNA, 997 bp, Homo sapiens
atggtagtggtgaagaagaaagttgttgggtttctttaggagggtgaagttggttgacttttctaacattgcttttgattttagagcactgggaggagggggaaagagctcaccctgcctggagaggccagatcaggacaggctctttaaagacattttctcctcactaccattaactcttcctttttccatttcctctataggcatgcctcctcctggctccttcccacccccagtgccacctcctggagccctcccacctgggatacccccagccatgcccccaccacctatgcctcctggggctgcaggacatggccccccatcggcaggaaccccaggggcaggacatcctggtcatggacactcacatcctcacccattcccaccgggtgggatgccccatccagggatgtctcagatgcagcttgcacaccatggccctcatggcttaggacatccccacgctggacccccaggctctgggggccagccaccgccccgaccaccacctggaatgcctcatcctggacctcctccaatgggcatgcccccccgagggcctccattcggatctcccatgggtcacccaggtcctatgcctccgcatggtatgcgtggacctcctccactgatgcccccccatggatacactggccctccacgacccccaccctatggctaccagcgggggcctctccctccacccagacccactccccggccaccagttccccctcgaggcccacttcgaggccctctccctcagtaaattcacattttccttcctcctgttacattttcccaatatcttttctattccttggaccaatcagagatgctgtagctccttggggcaaaggtactaatccctttcagcacccccactccattcccctttttaatgtaactttttccacaggaggtatttcttttttatgttggtcctgagtattttgcaaatgcacagagaaaataaaactaaactccttgttta

SEQ ID NO: 441622 - DNA, 1563 bp, Homo sapiens
tggaagtcgtgcggaggtcagaaggcggaaccgctgctgggagacggcgggatctctttcgccatggctgccgggccgatctccgagcggaatcaggatgccactgtgtacgtggggggcctggatgagaaggttagtgaaccgctgctgtgggaactgtttctccaggctggaccagtagtcaacacccacatgccaaaggatagagtcactggccagcaccaaggctatggctttgtggaattcttgagtgaggaagatgctgactatgccattaagatcatgaacatgatcaaactctatgggaagccaatacgggtgaacaaagcatcagctcacaacaaaaacctggatgtaggggccaacattttcattgggaacctggaccctgagattgatgagaagttgctttatgatactttcagcgcctttggggtcatcttacaaacccccaaaattatgcgggaccctgacacaggcaactccaaaggttatgcctttattaattttgcttcatttgatgcttcggatgcagcaattgaagccatgaatgggcagtacctctgtaaccgtcctatcaccgtatcttatgccttcaagaaggactccaagggtgagcgccatggctcagcagccgaacgacttctggcagctcagaacccgctctcccaggctgatcgccctcatcagctgtttgcagatgcacctcctccaccctctgctcccaatcctgtggtatcatcattggggtctgggcttcctccaccaggcatgcctcctcctggctccttcccacccccagtgccacctcctggagccctcccacctgggatacccccagccatgcccccaccacctatgcctcctggggctgcaggacatggccccccatcggcaggaaccccaggggcaggacatcctggtcatggacactcacatcctcacccattcccaccgggtgggatgccccatccagggatgtctcagatgcagcttgcacaccatggccctcatggcttaggacatccccacgctggacccccaggctctgggggccagccaccgccccgaccaccacctggaatgcctcatcctggacctcctccaatgggcatgcccccccgagggcctccattcggatctcccatgggtcacccaggtcctatgcctccgcatggtatgcgtggacctcctccactgatgcccccccatggatacactggccctccacgacccccaccctatggctaccagcgggggcctctccctccacccagacccactccccggccaccagttccccctcgaggcccacttcgaggccctctccctcagtaaattcacattttccttcctcctgttacattttcccaatatcttttctattccttggaccaatcagagatgctgtagctccttggggcaaaggtactaatccctttcagcacccccactccattcccctttttaatgtaactttttccacaggaggtatttcttttttatgttggtcctgagtattttgcaaatgcacagagaaaataaaactaaactccttgttta

SEQ ID NO: 441623 - DNA, 1557 bp, Homo sapiens
  misc_feature (25)..(26): n is a, c, g, or t
  misc_feature (34)..(34): n is a, c, g, or t
  misc_feature (68)..(68): n is a, c, g, or t
  misc_feature (73)..(73): n is a, c, g, or t
  misc_feature (78)..(78): n is a, c, g, or t
  misc_feature (89)..(89): n is a, c, g, or t
  misc_feature (91)..(91): n is a, c, g, or t
agaactatttacggaggcgatcacnngtttgtantttcatcacgaggcttgcgtatggttgtacgttncctgntctcngggcgtcatcngnatgccactgtgtacgtggggggcctggatgagaaggttagtgaaccgctgctgtgggaactgtttctccaggctggaccagtagtcaacacccacatgccaaaggatagagtcactggccagcaccaaggctatggctttgtggaattcttgagtgaggaagatgctgactatgccattaagatcatgaacatgatcaaactctatgggaagccaatacgggtgaacaaagcatcagctcacaacaaaaacctggatgtaggggccaacattttcattgggaacctggaccctgagattgatgagaagttgctttatgatactttcagcgcctttggggtcatcttacaaacccccaaaattatgcgggaccctgacacaggcaactccaaaggttatgcctttattaattttgcttcatttgatgcttcggatgcagcaattgaagccatgaatgggcagtacctctgtaaccgtcctatcaccgtatcttatgccttcaagaaggactccaagggtgagcgccatggctcagcagccgaacgacttctggcagctcagaacccgctctcccaggctgatcgccctcatcagctgtttgcagatgcacctcctccaccctctgctcccaatcctgtggtatcatcattggggtctgggcttcctccaccaggcatgcctcctcctggctccttcccacccccagtgccacctcctggagccctcccacctgggatacccccagccatgcccccaccacctatgcctcctggggctgcaggacatggccccccatcggcaggaaccccaggggcaggacatcctggtcatggacactcacatcctcacccattcccaccgggtgggatgccccatccagggatgtctcagatgcagcttgcacaccatggccctcatggcttaggacatccccacgctggacccccaggctctgggggccagccaccgccccgaccaccacctggaatgcctcatcctggacctcctccaatgggcatgcccccccgagggcctccattcggatctcccatgggtcacccaggtcctatgcctccgcatggtatgcgtggacctcctccactgatgcccccccatggatacactggccctccacgacccccaccctatggctaccagcgggggcctctccctccacccagacccactccccggccaccagttccccctcgaggcccacttcgaggccctctccctcagtaaattcacattttccttcctcctgttacattttcccaatatcttttctattccttggaccaatcagagatgctgtagctccttggggcaaaggtactaatccctttcagcacccccactccattcccctttttaatgtaactttttccacaggaggtatttcttttttatgttggtcctgagtattttgcaaatgcacagagaaaataaaactaaactccttgttta

SEQ ID NO: 441624 - DNA, 1646 bp, Homo sapiens
aaaaaaatggagcatgtgtattatgtggccaatgtcttcagtctaacttggttatgagactaaaaccattcctcactgctctaacatgctgaagaaatcatctgagggggagggagatggatgctcagttgtcacatcaatggatgctgctagaatggccgatctccgagcggaatcaggatgccactgtgtacgtggggggcctggatgagaaggttagtgaaccgctgctgtgggaactgtttctccaggctggaccagtagtcaacacccacatgccaaaggatagagtcactggccagcaccaaggctatggctttgtggaattcttgagtgaggaagatgctgactatgccattaagatcatgaacatgatcaaactctatgggaagccaatacgggtgaacaaagcatcagctcacaacaaaaacctggatgtaggggccaacattttcattgggaacctggaccctgagattgatgagaagttgctttatgatactttcagcgcctttggggtcatcttacaaacccccaaaattatgcgggaccctgacacaggcaactccaaaggttatgcctttattaattttgcttcatttgatgcttcggatgcagcaattgaagccatgaatgggcagtacctctgtaaccgtcctatcaccgtatcttatgccttcaagaaggactccaagggtgagcgccatggctcagcagccgaacgacttctggcagctcagaacccgctctcccaggctgatcgccctcatcagctgtttgcagatgcacctcctccaccctctgctcccaatcctgtggtatcatcattggggtctgggcttcctccaccaggcatgcctcctcctggctccttcccacccccagtgccacctcctggagccctcccacctgggatacccccagccatgcccccaccacctatgcctcctggggctgcaggacatggccccccatcggcaggaaccccaggggcaggacatcctggtcatggacactcacatcctcacccattcccaccgggtgggatgccccatccagggatgtctcagatgcagcttgcacaccatggccctcatggcttaggacatccccacgctggacccccaggctctgggggccagccaccgccccgaccaccacctggaatgcctcatcctggacctcctccaatgggcatgcccccccgagggcctccattcggatctcccatgggtcacccaggtcctatgcctccgcatggtatgcgtggacctcctccactgatgcccccccatggatacactggccctccacgacccccaccctatggctaccagcgggggcctctccctccacccagacccactccccggccaccagttccccctcgaggcccacttcgaggccctctccctcagtaaattcacattttccttcctcctgttacattttcccaatatcttttctattccttggaccaatcagagatgctgtagctccttggggcaaaggtactaatccctttcagcacccccactccattcccctttttaatgtaactttttccacaggaggtatttcttttttatgttggtcctgagtattttgcaaatgcacagagaaaataaaactaaactccttgttta

SEQ ID NO: 441625 - DNA, 1219 bp, Homo sapiens
tctggatactcggcccctcccgggaatgttttaccgcggcaagtaatcaggttcgcacggcgggatctctttcgccatggctgccgggccgatctccgagcggaatcaggatgccactgtgtacgtggggggcctggatgagaaggttagtgaaccgctgctgtgggaactgtttctccaggctggaccagtagtcaacacccacatgccaaaggatagagtcactggccagcaccaaggctatggctttgtggaattcttgagtgaggaagatgctgactatgccattaagatcatgaacatgatcaaactctatgggaagccaatacgggtgaacaaagcatcactgtttgcagatgcacctcctccaccctctgctcccaatcctgtggtatcatcattggggtctgggcttcctccaccaggcatgcctcctcctggctccttcccacccccagtgccacctcctggagccctcccacctgggatacccccagccatgcccccaccacctatgcctcctggggctgcaggacatggccccccatcggcaggaaccccaggggcaggacatcctggtcatggacactcacatcctcacccattcccaccgggtgggatgccccatccagggatgtctcagatgcagcttgcacaccatggccctcatggcttaggacatccccacgctggacccccaggctctgggggccagccaccgccccgaccaccacctggaatgcctcatcctggacctcctccaatgggcatgcccccccgagggcctccattcggatctcccatgggtcacccaggtcctatgcctccgcatggtatgcgtggacctcctccactgatgcccccccatggatacactggccctccacgacccccaccctatggctaccagcgggggcctctccctccacccagacccactccccggccaccagttccccctcgaggcccacttcgaggccctctccctcagtaaattcacattttccttcctcctgttacattttcccaatatcttttctattccttggaccaatcagagatgctgtagctccttggggcaaaggtactaatccctttcagcacccccactccattcccctttttaatgtaactttttccacaggaggtatttcttttttatgttggtcctgagtattttgcaaatgcacagagaaaataaaactaaactccttgttta

SEQ ID NO: 441626 - DNA, 422 bp, Homo sapiens
gacggagaggcgtccgagccccgggccctggggcaggagcacgacatcaccctcttcgtcaaggtaaagctcgcttccctcaattcttaggacgacccccttccattcgaggtcttggtcatctcagatcccagagggacgcgcagggaggaacccttggtggtatcctgattgtcatcaggcgcttccatgcgcgggcggtaggcgggacagccgggatttcccggagaagagtttccagggcatttgcgggaggactcaatggtttggaagcaaagactttgggggtgggggcgacggggagtgcgatgggggccaatgaggatgtggggttgtgggttcagcatcccactgtcctttgacctgaacatcctaaccagccctcctagtcaggaggttattaacgaattaactaaaaagtt

SEQ ID NO: 441627 - DNA, 2981 bp, Homo sapiens
agcggagtatggacgccgagggtccggcaggaagggcgcgccgggtctcgggtgagccgcagcaatcgggggacggcagcctctcgccccaggccgaggcaattgaggtcgcagccggggagagtgcggggcgcagccccggtgagctcgcctgggacgcagcggaggaggcggaggtcccgggggtaaaggggtccgaagaagcggcccccggggacgcaagggcagacgctggcgaggacagggtaggggatgggccacagcaggagccgggggaggacgaagagagacgagagcggagcccggaggggccaagggaggaggaagcagcggggggcgaagaggaatcccccgacagcagcccacatggggaggcctccaggggcgccgcggagcctgaggcccagctcagcaaccacctggccgaggagggccccgccgagggtagcggcgaggccgcgcgcgtgaacggccgcgggaggacggagaggcgtccgagccccgggccctggggcaggagcacgacatcaccctcttcgtcaaggctggttatgatggtgagagtatcggaaattgcccgttttctcagcgtctctttatgattctctggctgaaaggcgttatatttaatgtgaccacagtggacctgaaaaggaaacccgcagacctgcagaacctggctcccggaacaaaccctcctttcatgacttttgatggtgaagtcaagacggatgtgaataagatcgaggagttcttagaggagaaattagctcccccgaggtatcccaagctggggacccaacatcccgaatctaattccgcaggaaatgacgtgtttgccaaattctcagcgtttataaaaaacacgaagaaggatgcaaatgagattcatgaaaagaacctgctgaaggccctgaggaagctggataattacttaaatagccctctgcctgatgaaatagatgcctacagcaccgaggatgtcactgtttctggaaggaagtttctggatggggacgagctgacgctggctgactgcaacctcttacccaagctccatattattaagattgtggccaagaagtacagagattttgaatttccttctgaaatgactggcatctggagatacttgaataatgcttatgctagagatgagttcacaaatacgtgtccagctgatcaagagattgaacacgcatattcagatgttgcaaaaagaatgaaatgaagctgggctgttttctgtcttatttctcagttgagtgagcaaggatacgaaaacagtgtgtttgaaaacaaattaggtttgggttcaattccttcaatttttaaaaaactggtctctgagagttttttaaatcattgagagcctgtttttcttctctaaaacattagtttaattttcttcaaaatgaaaatactgctttgtaattacaaaatgagacacacctatcttgatattttaaagcaatatcagagggtgtaaagaaggacattttaacaatcgccttcaattttactccacttaattaccgaaaacttactggagaacatgttccaaatcttcagtatcttgttctctctctctctctctctctctctctctatcacacacacacacacacacacacacacacacacacacaatttcattcatatatggtattgcattattttattttaaagcactggtgaggggacctcttggtgattcctggatgatcatacacagaggacttacaccatacaaaaatattgggcaccgcagtgccagagaagatgcttgaggttagattttaaggagtggggaattgtgaagcccacagatgcgcacgcaatgaccagcaggaaccggaagccctgggtcacccccactctgcctcatttctgcctccaggatgccactgcctctgcttccaggaaaggcaagggggagggtgcttatccgtgtctctggttccagcttcctgtctttgctccctcccctctcttagagactgtgccttcagcaggactcttaatatctgctgcaacttggagaacctccctgccctgaaatgtgaaccaagcacactttggttccttctccgggcggctctctctgagacccaaggctgcagtccctcagtgctggtggtatcgtgtggggatagcaatactctctgcccttcattgtctcatctagacatcaagcagggaaaatccagggagattaaattcatggtgacaagtcctgggcagttctggtaaacggtccagttagggagggagtagaaactattgactcaaaagagtttctggctgatctgtggctttgcctccaccatccctaaccaacctctcatcacagctttgtgtgtgggctgagtgctggccttaaccctaggcgtggaagagaaaatgtgaggttgtttagatactcatcaggacctcacaggagctgagacttatcagccagaatgtgttcttcggacagtcgtacacatcttacagaaaaccctccttgtagagttggttgtggtatgtgtttgatgctataaagctcatttttaatgtgtacacctgctctagggacgattcgtttgaaagagagtaagatgcattaacagaaactatcctgggattaggtgaaaaatgtctagcaaaagaaacaaagtctttaatagagtggcctctttcgctcttcgattatgactgctgcagttttaccccagcagtcagctgtctttgtcaaccatacgtttttggagattgggtctagcacatgtcacccttgtccacgttgtttcacatctggttagggggcagattttaaaatgtagttttgtaatgttacatttaagcatgataaatgattagactaccagatgttactagtgctaactttgtattcttagacattaaaatgattgacataaactctttgtgccttgaaaatgaaacaaattataaaaatgtttaaatggaaccaaaaaaaa

SEQ ID NO: 441628 - DNA, 2030 bp, Homo sapiens
  misc_feature (1372)..(1372): n is a, c, g, or t
  misc_feature (1377)..(1377): n is a, c, g, or t
  misc_feature (1410)..(1410): n is a, c, g, or t
  misc_feature (1415)..(1416): n is a, c, g, or t
  misc_feature (1423)..(1423): n is a, c, g, or t
atccctacaaataaagttcaggaaggactctgaattctggactccaggaaaacccatggccatgaggttgatcctgttttttggtgccctttttgggcatatctactgtctagaaacatttgtgggagaccaagttcttgagattgtaccaagcaatgaagaacaaattaaaaatctgctacaattggaggctcaagaacatctccagcttgatttttggaaatcacccaccaccccaggggagacagcccacgtccgagttcccttcgtcaacgtccaggcagtcaaagtgttcttggagtcccagggaattgcctattccatcatgattgaagacgtgcaggtcctgttggacaaagagaatgaagaaatgctttttaataggagaagagaacggagtggtaacttcaattttggggcctaccataccctggaagagatttcccaagaaatggataacctcgtggctgagcaccctggtctagtgagcaaagtgaatattggctcttcttttgagaaccggcctatgaacgtgctcaagttcagcaccggaggagacaagccagctatctggctggatgctgggatccatgctcgagagtgggttacacaagctacggcactttggacagcaaataagattgtttctgattatggaaaggacccatccatcacttccattctggacgccctggatatcttcctcctgccagtcacaaaccctgatggatacgtgttctctcaaaccaaaaatcgtatgtggcggaagacccggtccaaggtatctggaagcctctgtgttggtgtggatcctaaccggaactgggatgcaggttttggaggacctggagccagcagcaacccttgctctgattcataccacggacccagtgccaactctgaagttgaagtgaaatccatagtggacttcatcaagagtcatggaaaagtcaaggccttcattaccctccacagctattcccagctgctgatgttcccctatgggtacaaatgtaccaagttagatgactttgatgagctgagtgaagtggcccaaaaggctgcccaatctctgagaagcctgcatggcaccaagtacaaagtgggaccaatctgctctgtcatctaccaagccagtggaggaagcattgactggtcctatgattatggcatcaagtactcatttgcctttgaactgagagacacagggcgctacggcttcctcttgccagcccgtcagatcctgcccacagccgaggagacctggcttggcttgaaggcaatcatggagcatgtgcgagaccacccctattagggccctggggaagaaacaagagccattaaaatctctttggtttgaagcaaaaaaaanaaaanaaaaaaaaaaaaaaaaaaaaaaaaaaaaaaaanaaaannaaaaaanaaaaaaaaaaaaaaaaaaaaaaccgccgggggcggggcgcccgcgccgagccaagaccaaaacaaccaaaacaagaggggcggggcgggccaaaagagaagagaagaacaacccgagaaaaaacaagacaaccaagaaaccagcagcggagaaaaacaacagagagaggaccaccacacacaaaaaacccgcgcacgaaaaaaacacaaggacgagaagccaccagagcggactaggacgcggcaccatcggcgtccacaacaaacggaggacatgaagagagaacaaaaaaaaaaaccccacagtggtggtaagaaccaaagggcgaggcacagacgaggggaggaaggcacagagacacagaagggagcgaccaagaagaaggggcaaggcaagacgggaggagacgaacagagacacagcacgggagaagagcgaacgccgcaccagacacgacagcgaagacaaagacgcgccagacgacgagaggatacacaggaaacacgagagacagcagcactgcgaccagcgacgcacacgcacgcacgggagccagagagaaaagacaagcagcgagcgacgagacgatgacgagaccgagagcacg

SEQ ID NO: 441629 - DNA, 1291 bp, Homo sapiens
atccctacaaataaagttcaggaaggactctgaattctggactccaggaaaacccatggccatgaggttgatcctgttttttggtgccctttttgggcatatctactgtctagaaacatttgtgggagaccaagttcttgagattgtaccaagcaatgaagaacaaattaaaaatctgctacaattggaggctcaagaacatctccagcttgatttttggaaatcacccaccaccccaggggagacagcccacgtccgagttcccttcgtcaacgtccaggcagtcaaagtgttcttggagtcccagggaattgcctattccatcatgattgaagacgtgcaggtcctgttggacaaagagaatgaagaaatgctttttaataggagaagagaacggagtggtaacttcaattttggggcctaccataccctggaagagatttcccaagaaatggataacctcgtggctgagcaccctggtctagtgagcaaagtgaatattggctcttcttttgagaaccggcctatgaacgtgctcaagttcagcaccggaggagacaagccagctatctggctggatgctgggatccatgctcgagagtgggttacacaagctacggcactttggacagcaaataagattgtttctgattatggaaaggacccatccatcacttccattctggacgccctggatatcttcctcctgccagtcacaaaccctgatggatacgtgttctctcaaaccaaaaatcgtatgtggcggaagacccggtccaaggtatctggaagcctctgtgttggtgtggatcctaaccggaactgggatgcaggttttggaggacctggagccagcagcaacccttgctctgattcataccacggacccagtgccaactctgaagttgaagtgaaatccatagtggacttcatcaagagtcatggaaaagtcaaggccttcattaccctccacagctattcccagctgctgatgttcccctatgggtacaaatgcaccaagtacaaagtgggaccaatctgctctgtcatctaccaagccagtggaggaagcattgactggtcctatgattatggcatcaagtactcatttgcctttgaactgagagacacagggcgctacggcttcctcttgccagcccgtcagatcctgcccacagccgaggagacctggcttggcttgaaggcaatcatggagcatgtgcgagaccacccctattagggccctggggaagaaacaagagccattaaaatctctttggtttgaagcaaa

SEQ ID NO: 441630 - DNA, 953 bp, Homo sapiens
ctatttattcacttgaaacatttcagatttcccaagaaatggataacctcgtggctgagcaccctggtctagtgagcaaagtgaatattggctcttcttttgagaaccggcctatgaacgtgctcaagttcagcaccggaggagacaagccagctatctggctggatgctgggatccatgctcgagagtgggttacacaagctacggcactttggacagcaaataagattgtttctgattatggaaaggacccatccatcacttccattctggacgccctggatatcttcctcctgccagtcacaaaccctgatggatacgtgttctctcaaaccaaaaatcgtatgtggcggaagacccggtccaaggtatctggaagcctctgtgttggtgtggatcctaaccggaactgggatgcaggttttggaggacctggagccagcagcaacccttgctctgattcataccacggacccagtgccaactctgaagttgaagtgaaatccatagtggacttcatcaagagtcatggaaaagtcaaggccttcattaccctccacagctattcccagctgctgatgttcccctatgggtacaaatgtaccaagttagatgactttgatgagctgagtgaagtggcccaaaaggctgcccaatctctgagaagcctgcatggcaccaagtacaaagtgggaccaatctgctctgtcatctaccaagccagtggaggaagcattgactggtcctatgattatggcatcaagtactcatttgcctttgaactgagagacacagggcgctacggcttcctcttgccagcccgtcagatcctgcccacagccgaggagacctggcttggcttgaaggcaatcatggagcatgtgcgagaccacccctattagggccctggggaagaaacaagagccattaaaatctctttggtttgaagcaaa

SEQ ID NO: 441631 - DNA, 829 bp, Homo sapiens
atccctacaaataaagttcaggaaggactctgaattctggactccaggaaaacccatggccatgaggttgatcctgttttttggtgccctttttgggcatatctactgtctagaaacatttgtgggagaccaagttcttgagattgtaccaagcaatgaagaacaaattaaaaatctgctacaattggaggctcaagaacatctccagcttgatttttggaaatcacccaccaccccaggggagacagcccacgtccgagttcccttcgtcaacgtccaggcagtcaaagtgttcttggagtcccagggaattgcctattccatcatgattgaagacgtgcaggtcctgttggacaaagagaatgaagaaatgctttttaataggagaagagaacggagtggtaacttcaattttggggcctaccataccctggaagagatttcccaagaaatggataacctcgtggctgagcaccctggtctagtgagcaaagtgaatattggctcttcttttgagaaccggcctatgaacgtgctcaagttcagcaccggaggagacaagccagctatctggctggatgctgggatccatgctcgagagtgggttacacaagctacggcactttggacagcaaataagattgtttctgattatggaaaggacccatccatcacttccattctggacgccctggatatcttcctcctgccagtcacaaaccctgatggatacgtgttctctcaaaccaaacctggattttgttcccttcttcaacaaggacctaaggagatgtgtaggaacttcaaaagcaaaataaaaatactcatt

SEQ ID NO: 441632 - DNA, 1366 bp, Homo sapiens
atccctacaaataaagttcaggaaggactctgaattctggactccaggaaaacccatggccatgaggttgatcctgttttttggtgccctttttgggcatatctactgtctagaaacatttgtgggagaccaagttcttgagattgtaccaagcaatgaagaacaaattaaaaatctgctacaattggaggctcaagaacatctccagcttgatttttggaaatcacccaccaccccaggggagacagcccacgtccgagttcccttcgtcaacgtccaggcagtcaaagtgttcttggagtcccagggaattgcctattccatcatgattgaagacgtgcaggtcctgttggacaaagagaatgaagaaatgctttttaataggagaagagaacggagtggtaacttcaattttggggcctaccataccctggaagagatttcccaagaaatggataacctcgtggctgagcaccctggtctagtgagcaaagtgaatattggctcttcttttgagaaccggcctatgaacgtgctcaagttcagcaccggaggagacaagccagctatctggctggatgctgggatccatgctcgagagtgggttacacaagctacggcactttggacagcaaataagattgtttctgattatggaaaggacccatccatcacttccattctggacgccctggatatcttcctcctgccagtcacaaaccctgatggatacgtgttctctcaaaccaaaaatcgtatgtggcggaagacccggtccaaggtatctggaagcctctgtgttggtgtggatcctaaccggaactgggatgcaggttttggaggacctggagccagcagcaacccttgctctgattcataccacggacccagtgccaactctgaagttgaagtgaaatccatagtggacttcatcaagagtcatggaaaagtcaaggccttcattaccctccacagctattcccagctgctgatgttcccctatgggtacaaatgtaccaagttagatgactttgatgagctgagtgaagtggcccaaaaggctgcccaatctctgagaagcctgcatggcaccaagtacaaagtgggaccaatctgctctgtcatctaccaagccagtggaggaagcattgactggtcctatgattatggcatcaagtactcatttgcctttgaactgagagacacagggcgctacggcttcctcttgccagcccgtcagatcctgcccacagccgaggagacctggcttggcttgaaggcaatcatggagcatgtgcgagaccacccctattagggccctggggaagaaacaagagccattaaaatctctttggtttgaagcaaa

SEQ ID NO: 441633 - DNA, 1769 bp, Homo sapiens
  misc_feature (1372)..(1372): n is a, c, g, or t
  misc_feature (1377)..(1377): n is a, c, g, or t
  misc_feature (1410)..(1410): n is a, c, g, or t
  misc_feature (1415)..(1416): n is a, c, g, or t
  misc_feature (1423)..(1423): n is a, c, g, or t
atccctacaaataaagttcaggaaggactctgaattctggactccaggaaaacccatggccatgaggttgatcctgttttttggtgccctttttgggcatatctactgtctagaaacatttgtgggagaccaagttcttgagattgtaccaagcaatgaagaacaaattaaaaatctgctacaattggaggctcaagaacatctccagcttgatttttggaaatcacccaccaccccaggggagacagcccacgtccgagttcccttcgtcaacgtccaggcagtcaaagtgttcttggagtcccagggaattgcctattccatcatgattgaagacgtgcaggtcctgttggacaaagagaatgaagaaatgctttttaataggagaagagaacggagtggtaacttcaattttggggcctaccataccctggaagagatttcccaagaaatggataacctcgtggctgagcaccctggtctagtgagcaaagtgaatattggctcttcttttgagaaccggcctatgaacgtgctcaagttcagcaccggaggagacaagccagctatctggctggatgctgggatccatgctcgagagtgggttacacaagctacggcactttggacagcaaataagattgtttctgattatggaaaggacccatccatcacttccattctggacgccctggatatcttcctcctgccagtcacaaaccctgatggatacgtgttctctcaaaccaaaaatcgtatgtggcggaagacccggtccaaggtatctggaagcctctgtgttggtgtggatcctaaccggaactgggatgcaggttttggaggacctggagccagcagcaacccttgctctgattcataccacggacccagtgccaactctgaagttgaagtgaaatccatagtggacttcatcaagagtcatggaaaagtcaaggccttcattaccctccacagctattcccagctgctgatgttcccctatgggtacaaatgtaccaagttagatgactttgatgagctgagtgaagtggcccaaaaggctgcccaatctctgagaagcctgcatggcaccaagtacaaagtgggaccaatctgctctgtcatctaccaagccagtggaggaagcattgactggtcctatgattatggcatcaagtactcatttgcctttgaactgagagacacagggcgctacggcttcctcttgccagcccgtcagatcctgcccacagccgaggagacctggcttggcttgaaggcaatcatggagcatgtgcgagaccacccctattagggccctggggaagaaacaagagccattaaaatctctttggtttgaagcaaaaaaaanaaaanaaaaaaaaaaaaaaaaaaaaaaaaaaaaaaaanaaaannaaaaaanaaaaaaaaaaaaaagagggggggcggcgcccaaaaatctcccccgcggggggcccccaatgcccccccccctttttttgtaaaaggggggcccccatagagggggagcgtattaaaaacacacgaccgaggagcagcgcggcgcccgtctctaaccaacagccgtgcgtcgaggaggcgaacaacacccgccccgcgcgcggaaatctgttgaaagaagcacgacacacctcgcagccggggggggcacacccaagctggcggcgcaacacacaacccccagacgagattttaaccccgccccgcgggggcgaaatttaaacatttccgacgctcctccagggcgc

SEQ ID NO: 441634 - DNA, 1141 bp, Homo sapiens
atccctacaaataaagttcaggaaggactctgaattctggactccaggaaaacccatggccatgaggttgatcctgttttttggtgccctttttgggcatatctactgtctagaaacatttgtgggagaccaagttcttgagattgtaccaagcaatgaagaacaaattaaaaatctgctacaattggaggctcaagaacatctccagcttgatttttggaaatcacccaccaccccaggggagacagcccacgtccgagttcccttcgtcaacgtccaggcagtcaaagtgttcttggagtcccagggaattgcctattccatcatgattgaagacgtgcagatttcccaagaaatggataacctcgtggctgagcaccctggtctagtgagcaaagtgaatattggctcttcttttgagaaccggcctatgaacgtgctcaagttcagcaccggaggagacaagccagctatctggctggatgctgggatccatgctcgagagtgggttacacaagctacggcactttggacagcaaataagattgtttctgattatggaaaggacccatccatcacttccattctggacgccctggatatcttcctcctgccagtcacaaaccctgatggatacgtgttctctcaaaccaaacacggacccagtgccaactctgaagttgaagtgaaatccatagtggacttcatcaagagtcatggaaaagtcaaggccttcattaccctccacagctattcccagctgctgatgttcccctatgggtacaaatgtaccaagttagatgactttgatgagctgagtgaagtggcccaaaaggctgcccaatctctgagaagcctgcatggcaccaagtacaaagtgggaccaatctgctctgtcatctaccaagccagtggaggaagcattgactggtcctatgattatggcatcaagtactcatttgcctttgaactgagagacacagggcgctacggcttcctcttgccagcccgtcagatcctgcccacagccgaggagacctggcttggcttgaaggcaatcatggagcatgtgcgagaccacccctattagggccctggggaagaaacaagagccattaaaatctctttggtttgaagcaaa

SEQ ID NO: 441635 - DNA, 619 bp, Homo sapiens
aattgaaaagcatcctgtacatgaaaaaagttattgcaaatgactcactttttgtgtggttccttctctccctttttccctcctatcgtcactttagaagtctggccttcattttcgacacacagataataccgtccagtggttaagagcgatggagtctattggtctacccaaggtaagccttcacgcactggaatctgaactagaaaggcaaaggggtagtacacaaacatctctttatgagcaatgactttggagactgggttatgttaatgtagaaatgagaaatgtgaggactaaaaaacatggaaagacctatccaaagtaacatatggcaagaactcagaatgagggatgtgcccagattgagagcagccaggtaaaattgtgcacaaaataaaggcagaacaagctatagctggtagataggtgagctatctaaaatagccaactccctttcttgtgttgctatttgtacataaagattctaagtctcagccacttttggtggctcatgcctataatcccagcactttgggaggctaaggtgagagaatcacttgaggccaggagtttgagaccagcctgggcaacatggcaagaccctgtctctattaaa

SEQ ID NO: 441636 - DNA, 563 bp, Homo sapiens
gagatcaggccactgcactccagcctgggtgacagagcaagactatgtctaaaaaaaaaagtctgaagaaattgcatttctgctactttgtgccccttttaaaacgcaatttttccttaaactaaatgtgtggttattctaaaataacttcttgcctttccatccagagcaaaattaatgttaacaagtctcttaaagtgaaatatgtacactttccagttctgaagtaaaaagggatgggaaccctgtggtgttgagagtaaaataaggtgcctgagataagctacaagtcaagttacaaatagcgacttactactgcttgatattcttcttgtcccaaactggcaatatcataaagcaaacttctgcttaaatatgataccccttacttggttgttttaggatattcgaaatcaaagaatctatcgtaagcttcgaaaagctgaattggcaaaacttcagcagaccctgaatgcacttaacaagaaggcagcattttatgaagagcaaatcaattattatgacacctacataaagacttgtttagacaacttaaaaagaaa

SEQ ID NO: 441637 - DNA, 2279 bp, Homo sapiens
aggtccactgttgactgaaacattatgttgtttgtggttatatatgttcatgacactttggtctagctaagttcatttggaatctaagataagtttttatcgtttttattataaattagtggttcttcgtctgtaaaattttaagcccgcccatttataacattttgtaaggcttctttatcattctgaaatgaaatctatatgataaaatgtactgatgtatatacctcagaataagactagggcctttatatgaatacaaaagagatatttaaagagtaattaataataaaagcacacattttattgagaaaatgtatatgcctgatgacactgggaagacatgatacagttaccagaggtgtagacctcttcacagaacagctaccagattatgagggcttcagtggcaaatgaggcaggaactcattttccaaaatggagaacaactatttgtaaagttcaacattagccaagtgtagtctccacccaatttacatagcagttgcaattctagaaaatcctagcttttgtgtggggaaaatgtattatgcatctacataaaacaattagattctaggctcagataattacaaacagaatcttgacccacgtaaatgaccagtaagacattcaaaagttctgtcatgcaaggtgagggcaattatttacacaagaccatcccacaaattgccagatcacagagcacctctcatccccaatccctgctcactagaaaccaagagtgcccttcaattgttaagatattaaaaaacacccctacgtatttccaaaatgtgactccctacaaagacacactgcccccgttatgcccccattgataacttctaaataaattacggtgtggtttcacatctgtgtgaaacctgccaacatcagggctcaaaaaaaaaaaagtataaaaagtgtcatttttacccaagaacagatgcctaagaccactctccctgtccctgttcccttcctatgtgccacatcagttttcagaaaactgataggtcaaagagggaaactgatcttctggaagctctgagaaggctacagtggctcataggtggagcgccagcggccagcaaccaagcgaacgttctggacaacggggagatgagcagccacaggaggctgccagttacatgggcatgtgaatgccccaggctggtcctccagacctcataaagacaccagggcaattgtggaggagaaaataagaaaaacagcattttataaacagaaataatcatctcttctaaatattcaggaataaaactacagtttaaatgttctacatttaactctacttttattattttatccagaaaaacaacagtactttttaaaaaacaatgttatttgtattgtttgacatccatgagaacttttaaagtgtaatatattccagaaggattttcagagaatgctttttatagccttaaactgctgtttcacgctatccccataaaatcataaacaggaaatgtcttgccttttaaaataaaggcttagttgcaaatcagtacatagtttaaataatatgtatcttttggaaacacaatcatggcaagttatcagatttttatgaatgcttgaggttttgtgggggttttttaaagccacttatcactaatagataacattgtgaagtttttcaacatatttgcaaacaccagatatgtatccagcattttttagcggttaaattaatgattattaaatatgtagctgttagccttgtcattgacagaatattagtagtgatacaagaacagagcaattgaagctttatttatagtagtgaaaaagtgggaaacgacctgaagcccaaagcaatatgcagagggcgatagaattagtttaatatggatgttgtatagccactaaaaatgatggtttttagactattttaaagcaggaggaaaggtttgcgatatagtagaggagaaaatagtgcctaaggtagtatgatttcttttattatcaaaaaataataatccagaagaagaaagaagttaagtgatttttctttgggtgatagttaagtttatcttctccccctcctccccacacctttttatttttaacaatgagtgtgtgtttagtgaggaaaagagagattgtaaagggaaatggctttgttcttatagaacaatgctagctcttgctagtaaccttaacattttttatagttcttttaaatcagcattcctcctaaaatcctcaaaatctgtaggtcagtgaagtggctaacattggttttaggc

SEQ ID NO: 441638 - DNA, 507 bp, Homo sapiens
  misc_feature (453)..(453): n is a, c, g, or t
  misc_feature (467)..(467): n is a, c, g, or t
aggtccactgttgactgaaacattatgttgtttgtggttatatatgttcatgacactttggtctagctaagttcatttggaatctaagataagtttttatcgtttttattataaattagtggttcttcgtctgtaaaattttaagcccgcccatttataacattttgtaaggcttctttatcattctgaaatgaaatctatatgataaaatgtactgatgtatatacctcagaataagactagggcctttatatgaatacaaaagagatatttaaagagtaattaataataaaagcacacattttattgagaaaatgtatatgcctgatgacactgggaagacatgatacagttaccagaggtgtagacctcttcacagaacagctaccagattatgagggcttcagtggaccaaattgagggccagggaacctccatttttcccaatggggnggaaccaacctaantttggtaggtttccaaccattaagccccagtggtgttcct

SEQ ID NO: 441639 - DNA, 4270 bp, Homo sapiens
agcagcttgtattcttagaaacgcagcagacagcaactttagcaggtgatttcaatcaagtcagctgaaatgcactcacttccaggagttgtagctgtagggtacatcaatgaagctattgatgaagggaatcctttgaggactttagaaactttgctcctacctactgcgaatattagtgatgtggacccagcccatgcccagcactaccaggatgttttataccatgctaaatcacagaaactcggagactctgagagtgtttccaaagtgctttggctggatgagatacagcaagccgtcgatgaggccaacgtggacgaggacagagcaaaacaatgggttactctggtggttgatgttaatcagtgtttggaaggaaaaaaatcaagtgatattttgtctgtattgaagtcttccacttctaatgcaaatgacataatcccggagtgtgctgacaaatactatgatgcccttgtgaaggcaaaagagctcaaatctgaaagagtgtctagtgacggttcatggctcaaactcaacctgcacaaaaaatatgactactattacaacactgattcaaaagagagttcctgggtcacacctgaatcatgcttgtataaagaatcatggctcacaggaaaagaaatcgaggacattattgaggaagtcacagtaggttacattcgtgagaatatatggtctgcttcagaagagttgcttcttcgctttcaagccacaagctcaggacccatccttagggaagagtttgaagctagaaaatcatttttgcatgaacaagaagagaatgtggtcaaaatacaggctttttggaaaggatataaacaacggaaggagtatatgcacaggcggcaaacgttcattgataatactgattctattgtgaagattcagtcctggttccgaatggcaactgcaagaaagagctatctttcaagactacagtatttcagagatcataataatgaaattgtgaaaatacagtcactgttgagagcgaacaaagctagagatgactacaaaacattggttggctctgaaaacccaccattaacagtaattcgcaaatttgtatacctgctggaccaaagtgatttggatttccaggaggaactagaggttgcacgattaagggaagaagtagtgaccaagatcagggccaatcaacagctggaaaaagacctgaacctgatggacatcaagattggactgctggtgaagaacaggatcacactagaggatgtaatttcacacagtaaaaagctgaacaagaaaaaaggaggagaaatggaaatactgaataacaccgacaaccaaggaataaaaagtttgagtaaggagaggagaaaaacactagaaacatatcagcagctgttttaccttttacagaccaaccctttatacttggctaagctgattttccagatgccacagaacaagtccactaaatttatggatactgttattttcacactatataattatgcctctaatcagcgagaagaatatctacttctcaagctttttaaaactgctctggaggaagaaataaaatcaaaagtggaccaggtacaggacatagttactggtaaccctacagtcatcaagatggtcgtcagcttcaatagaggtgcccggggacagaacaccctgcgccaactcctggctccagtggtaaaagagatcatcgacgacaagtcgctgattatcaacacaaaccctgtagaggtgtacaaggcttgggtgaaccaactagaaacacagactggagaggccagcaagttgccttatgatgtgaccacagaacaagctctaacatacccagaagtgaaaaataaactggaggcttccattgagaacctgagaagggtcaccgacaaagtcctgaattctatcatttcttcccttgatctactgccttatggattgaggtatatagccaaagtactgaagaattcgatccatgagaaattccccgatgcaacagaagatgagctattaaagattgttggaaacctcctgtactatcggtacatgaatccagccattgtagctccagatggctttgatatcatcgacatgacagctggaggtcagataaattctgaccaaaggagaaacttaggatcagtggccaaggttcttcagcacgcagcctccaacaagctgtttgaaggagaaaatgagcatctctcatctatgaacaattatttatcagagacgtatcaggaattcaggaaatatttcaaagaagcatgtaatgtccctgagccagaagagaagtttaatatggacaaatacacagacctggtgacagtcagcaaaccagtcatttatatttcaattgaagaaatcatcagcacacactcactcctgttggaacaccaggatgcaattgcccctgagaaaaatgacttactgagtgaattgctggggtcgctgggagaggtgccaaccgtggaatcttttcttggggaaggagcagttgaccccaatgaccctaacaaggcaaatacactaagtcagctttcaaagaccgagatttctcttgtcttgacaagcaaatatgacatagaggacggtgaagctatagatagccgaagcctcatgataaagaccaagaagctgataattgatgtgatccggaaccagccagggaacacattgacagaaatcttagagacaccagcaactgcgcaacaggaggtagaccatgccacggacatggtgagccgtgcaatgatagattccaggactccagaagaaatgaagcatagccaatctatgattgaagatgcacagctgcctcttgagcagaagaagaggaaaatccagaggaatcttcggacgttggaacagactggacacgtgtcatccgaaaataaataccaagacattctcaatgagattgccaaggatattcgaaatcaaagaatctatcgtaagcttcgaaaagctgaattggcaaaacttcagcagaccctgaatgcacttaacaagaaggcagcattttatgaagagcaaatcaattattatgacacctacataaagacttgtttagacaacttaaaaagaaaaaatactcggagatcaattaaactagatggaaaaggagaacccaaaggggcgaagagagcgaagccagtgaagtacactgcagcaaagctgcatgagaaaggtgtcctgctagatatagatgatcttcaaacaaaccagtttaagaatgttacatttgatatcatagctactgaagatgtaggcattttcgatgtaagatcaaaattccttggtgttgagatggaaaaggtgcaactcaatattcaggatttacttcagatgcaatatgaaggagtagctgtaatgaaaatgtttgataaggttaaagtgaatgtaaaccttctcatatacctgctgaacaagaagttctatggaaagtgaagtgcctacagaaatttcttggattctgtatcatctggattaggaaatgaatttgtttaatatttttgtttttaaacatgattgaaatcactgcttataaatgtgtgattttttttaaacgaccaaaactgttctgaagaatgtacccaggtgcctttttgctaatttgatactataatagaatgagacataaaatgaattaatggaaacatatccacactgtactgtgatataggtactctgatttaaaactttggacatcctgtgatctgttttaaagttggggggtgggaaatttagctgactagggacaaacatgtaaacctattttcctatgaaaaaaattttaaatgtcccacttgaataacgtaattcttcatagtttttttaatctatggataaatggaaacctaattatttgtaatgaattatttagacagttctaagccctgtcttctgggagttatcaattttaaagagaacttttgtgcaattcaaatgaagtttttataagtaattgaaaatgacaacacaataacactttctgtataaaagtatatattttatgtgatttattcctactaaatgaaagtgcactactgcctcatgtaaagactcttgcacgcagagcctttaagtgactaaggaacaacatagatagtgagcatagtccccacctccacccctcacaatttatttgaatacttcaattgtgcctctcaattttttgtaatgctaaaaaatcagtatctagatggtttttaaatgtattctctggaaattgttttatgtaaaataaatgttacttaattcc

SEQ ID NO: 441640 - DNA, 4215 bp, Homo sapiens
agcagcttgtattcttagaaacgcagcagacagcaactttagcaggtgatttcaatcaagtcagctgaaatgcactcacttccaggagttgtagctgtagggtacatcaatgaagctattgatgaagggaatcctttgaggactttagaaactttgctcctacctactgcgaatattagtgatgtggacccagcccatgcccagcactaccaggatgttttataccatgctaaatcacagaaactcggagactctgagagtgtttccaaagtgctttggctggatgagatacagcaagccgtcgatgaggccaacgtggacgaggacagagcaaaacaatgggttactctggtggttgatgttaatcagtgtttggaaggaaaaaaatcaagtgatattttgtctgtattgaagtcttccacttctaatgcaaatgacataatcccggagtgtgctgacaaatactatgatgcccttgtgaaggcaaaagagctcaaatctgaaagagtgtctagtgacggttcatggctcaaactcaacctgcacaaaaaatatgactactattacaacactgattcaaaagagagttcctgggtcacacctgaatcatgcttgtataaagaatcatggctcacaggaaaagaaatcgaggacattattgaggaagtcacagtaggttacattcgtgagaatatatggtctgcttcagaagagttgcttcttcgctttcaagccacaagctcaggacccatccttagggaagagtttgaagctagaaaatcatttttgcatgaacaagaagagaatgtggtcaaaatacaggctttttggaaaggatataaacaacggaaggagtatatgcacaggcggcaaacgttcattgataatactgattctattgtgaagattcagtcctggttccgaatggcaactgcaagaaagagctatctttcaagactacagtatttcagagatcataataatgaaattgtgaaaatacagtcactgttgagagcgaacaaagctagagatgactacaaaacattggttggctctgaaaacccaccattaacagtaattcgcaaatttgtatacctgctggaccaaagtgatttggatttccaggaggaactagaggttgcacgattaagggaagaagtagtgaccaagatcagggccaatcaacagctggaaaaagacctgaacctgatggacatcaagattggactgctggtgaagaacaggatcacactagaggatgtaatttcacacagtaaaaagctgaacaagaaaaaaggaggagaaatggaaatactgaataacaccgacaaccaaggaataaaaagtttgagtaaggagaggagaaaaacactagaaacatatcagcagctgttttaccttttacagaccaaccctttatacttggctaagctgattttccagatgccacagaacaagtccactaaatttatggatactgttattttcacactatataattatgcctctaatcagcgagaagaatatctacttctcaagctttttaaaactgctctggaggaagaaataaaatcaaaagtggaccaggtacaggacatagttactggtaaccctacagtcatcaagatggtcgtcagcttcaatagaggtgcccggggacagaacaccctgcgccaactcctggctccagtggtaaaagagatcatcgacgacaagtcgctgattatcaacacaaaccctgtagaggtgtacaaggcttgggtgaaccaactagaaacacagactggagaggccagcaagttgccttatgatgtgaccacagaacaagctctaacatacccagaagtgaaaaataaactggaggcttccattgagaacctgagaagggtcaccgacaaagtcctgaattctatcatttcttcccttgatctactgccttatggattgaggtatatagccaaagtactgaagaattcgatccatgagaaattccccgatgcaacagaagatgagctattaaagattgttggaaacctcctgtactatcggtacatgaatccagccattgtagctccagatggctttgatatcatcgacatgacagctggaggtcagataaattctgaccaaaggagaaacttaggatcagtggccaaggttcttcagcacgcagcctccaacaagctgtttgaaggagaaaatgagcatctctcatctatgaacaattatttatcagagacgtatcaggaattcaggaaatatttcaaagaagcatgtaatgtccctgagccagaagagaagtttaatatggacaaatacacagacctggtgacagtcagcaaaccagtcatttatatttcaattgaagaaatcatcagcacacactcactcctgttggaacaccaggatgcaattgcccctgagaaaaatgacttagggaaggagcagttgaccccaatgaccctaacaaggcaaatacactaagtcagctttcaaagaccgagatttctcttgtcttgacaagcaaatatgacatagaggacggtgaagctatagatagccgaagcctcatgataaagaccaagaagctgataattgatgtgatccggaaccagccagggaacacattgacagaaatcttagagacaccagcaactgcgcaacaggaggtagaccatgccacggacatggtgagccgtgcaatgatagattccaggactccagaagaaatgaagcatagccaatctatgattgaagatgcacagctgcctcttgagcagaagaagaggaaaatccagaggaatcttcggacgttggaacagactggacacgtgtcatccgaaaataaataccaagacattctcaatgagattgccaaggatattcgaaatcaaagaatctatcgtaagcttcgaaaagctgaattggcaaaacttcagcagaccctgaatgcacttaacaagaaggcagcattttatgaagagcaaatcaattattatgacacctacataaagacttgtttagacaacttaaaaagaaaaaatactcggagatcaattaaactagatggaaaaggagaacccaaaggggcgaagagagcgaagccagtgaagtacactgcagcaaagctgcatgagaaaggtgtcctgctagatatagatgatcttcaaacaaaccagtttaagaatgttacatttgatatcatagctactgaagatgtaggcattttcgatgtaagatcaaaattccttggtgttgagatggaaaaggtgcaactcaatattcaggatttacttcagatgcaatatgaaggagtagctgtaatgaaaatgtttgataaggttaaagtgaatgtaaaccttctcatatacctgctgaacaagaagttctatggaaagtgaagtgcctacagaaatttcttggattctgtatcatctggattaggaaatgaatttgtttaatatttttgtttttaaacatgattgaaatcactgcttataaatgtgtgattttttttaaacgaccaaaactgttctgaagaatgtacccaggtgcctttttgctaatttgatactataatagaatgagacataaaatgaattaatggaaacatatccacactgtactgtgatataggtactctgatttaaaactttggacatcctgtgatctgttttaaagttggggggtgggaaatttagctgactagggacaaacatgtaaacctattttcctatgaaaaaaattttaaatgtcccacttgaataacgtaattcttcatagtttttttaatctatggataaatggaaacctaattatttgtaatgaattatttagacagttctaagccctgtcttctgggagttatcaattttaaagagaacttttgtgcaattcaaatgaagtttttataagtaattgaaaatgacaacacaataacactttctgtataaaagtatatattttatgtgatttattcctactaaatgaaagtgcactactgcctcatgtaaagactcttgcacgcagagcctttaagtgactaaggaacaacatagatagtgagcatagtccccacctccacccctcacaatttatttgaatacttcaattgtgcctctcaattttttgtaatgctaaaaaatcagtatctagatggtttttaaatgtattctctggaaattgttttatgtaaaataaatgttacttaattcc

SEQ ID NO: 441641 - DNA, 3279 bp, Homo sapiens
cagcgaaacgcgtgacagaagtggatggctcaggctgtctgcaaaataacagttggtttggctctgaaaacccaccattaacagtaattcgcaaatttgtatacctgctggaccaaagtgatttggatttccaggaggaactagaggttgcacgattaagggaagaagtagtgaccaagatcagggccaatcaacagctggaaaaagacctgaacctgatggacatcaagattggactgctggtgaagaacaggatcacactagaggatgtaatttcacacagtaaaaagctgaacaagaaaaaaggaggagaaatggaaatactgaataacaccgacaaccaaggaataaaaagtttgagtaaggagaggagaaaaacactagaaacatatcagcagctgttttaccttttacagaccaaccctttatacttggctaagctgattttccagatgccacagaacaagtccactaaatttatggatactgttattttcacactatataattatgcctctaatcagcgagaagaatatctacttctcaagctttttaaaactgctctggaggaagaaataaaatcaaaagtggaccaggtacaggacatagttactggtaaccctacagtcatcaagatggtcgtcagcttcaatagaggtgcccggggacagaacaccctgcgccaactcctggctccagtggtaaaagagatcatcgacgacaagtcgctgattatcaacacaaaccctgtagaggtgtacaaggcttgggtgaaccaactagaaacacagactggagaggccagcaagttgccttatgatgtgaccacagaacaagctctaacatacccagaagtgaaaaataaactggaggcttccattgagaacctgagaagggtcaccgacaaagtcctgaattctatcatttcttcccttgatctactgccttatggattgaggtatatagccaaagtactgaagaattcgatccatgagaaattccccgatgcaacagaagatgagctattaaagattgttggaaacctcctgtactatcggtacatgaatccagccattgtagctccagatggctttgatatcatcgacatgacagctggaggtcagataaattctgaccaaaggagaaacttaggatcagtggccaaggttcttcagcacgcagcctccaacaagctgtttgaaggagaaaatgagcatctctcatctatgaacaattatttatcagagacgtatcaggaattcaggaaatatttcaaagaagcatgtaatgtccctgagccagaagagaagtttaatatggacaaatacacagacctggtgacagtcagcaaaccagtcatttatatttcaattgaagaaatcatcagcacacactcactcctgttggaacaccaggatgcaattgcccctgagaaaaatgacttactgagtgaattgctggggtcgctgggagaggtgccaaccgtggaatcttttcttggggaaggagcagttgaccccaatgaccctaacaaggcaaatacactaagtcagctttcaaagaccgagatttctcttgtcttgacaagcaaatatgacatagaggacggtgaagctatagatagccgaagcctcatgataaagaccaagaagctgataattgatgtgatccggaaccagccagggaacacattgacagaaatcttagagacaccagcaactgcgcaacaggaggtagaccatgccacggacatggtgagccgtgcaatgatagattccaggactccagaagaaatgaagcatagccaatctatgattgaagatgcacagctgcctcttgagcagaagaagaggaaaatccagaggaatcttcggacgttggaacagactggacacgtgtcatccgaaaataaataccaagacattctcaatgagattgccaaggatattcgaaatcaaagaatctatcgtaagcttcgaaaagctgaattggcaaaacttcagcagaccctgaatgcacttaacaagaaggcagcattttatgaagagcaaatcaattattatgacacctacataaagacttgtttagacaacttaaaaagaaaaaatactcggagatcaattaaactagatggaaaaggagaacccaaaggggcgaagagagcgaagccagtgaagtacactgcagcaaagctgcatgagaaaggtgtcctgctagatatagatgatcttcaaacaaaccagtttaagaatgttacatttgatatcatagctactgaagatgtaggcattttcgatgtaagatcaaaattccttggtgttgagatggaaaaggtgcaactcaatattcaggatttacttcagatgcaatatgaaggagtagctgtaatgaaaatgtttgataaggttaaagtgaatgtaaaccttctcatatacctgctgaacaagaagttctatggaaagtgaagtgcctacagaaatttcttggattctgtatcatctggattaggaaatgaatttgtttaatatttttgtttttaaacatgattgaaatcactgcttataaatgtgtgattttttttaaacgaccaaaactgttctgaagaatgtacccaggtgcctttttgctaatttgatactataatagaatgagacataaaatgaattaatggaaacatatccacactgtactgtgatataggtactctgatttaaaactttggacatcctgtgatctgttttaaagttggggggtgggaaatttagctgactagggacaaacatgtaaacctattttcctatgaaaaaaattttaaatgtcccacttgaataacgtaattcttcatagtttttttaatctatggataaatggaaacctaattatttgtaatgaattatttagacagttctaagccctgtcttctgggagttatcaattttaaagagaacttttgtgcaattcaaatgaagtttttataagtaattgaaaatgacaacacaataacactttctgtataaaagtatatattttatgtgatttattcctactaaatgaaagtgcactactgcctcatgtaaagactcttgcacgcagagcctttaagtgactaaggaacaacatagatagtgagcatagtccccacctccacccctcacaatttatttgaatacttcaattgtgcctctcaattttttgtaatgctaaaaaatcagtatctagatggtttttaaatgtattctctggaaattgttttatgtaaaataaatgttacttaattcc

SEQ ID NO: 441642 - DNA, 4477 bp, Homo sapiens
agcagcttgtattcttagaaacgcagcagacagcaactttagcaggtgatttcaatcaagtcagctgaaatgcactcacttccaggagttgtagctgtagggtacatcaatgaagctattgatgaagggaatcctttgaggactttagaaactttgctcctacctactgcgaatattagtgatgtggacccagcccatgcccagcactaccaggatgttttataccatgctaaatcacagaaactcggagactctgagagtgtttccaaagtgctttggctggatgagatacagcaagccgtcgatgaggccaacgtggacgaggacagagcaaaacaatgggttactctggtggttgatgttaatcagtgtttggaaggaaaaaaatcaagtgatattttgtctgtattgaagtcttccacttctaatgcaaatgacataatcccggagtgtgctgacaaatactatgatgcccttgtgaaggcaaaagagctcaaatctgaaagagtgtctagtgacggttcatggctcaaactcaacctgcacaaaaaatatgactactattacaacactgattcaaaagagagttcctgggtcacacctgaatcatgcttgtataaagaatcatggctcacaggaaaagaaatcgaggacattattgaggaagtcacagtaggttacattcgtgagaatatatggtctgcttcagaagagttgcttcttcgctttcaagccacaagctcaggacccatccttagggaagagtttgaagctagaaaatcatttttgcatgaacaagaagagaatgtggtcaaaatacaggctttttggaaaggatataaacaacggaaggagtatatgcacaggcggcaaacgttcattgataatactgattctattgtgaagattcagtcctggttccgaatggcaactgcaagaaagagctatctttcaagactacagtatttcagagatcataataatgaaattgtgaaaatacagtcactgttgagagcgaacaaagctagagatgactacaaaacattggttggctctgaaaacccaccattaacagtaattcgcaaatttgtatacctgctggaccaaagtgatttggatttccaggaggaactagaggttgcacgattaagggaagaagtagtgaccaagatcagggccaatcaacagctggaaaaagacctgaacctgatggacatcaagattggactgctggtgaagaacaggatcacactagaggatgtaatttcacacagtaaaaagctgaacaagaaaaaaggaggagaaatggaaatactgaataacaccgacaaccaaggaataaaaagtttgagtaaggagaggagaaaaacactagaaacatatcagcagctgttttaccttttacagaccaaccctttatacttggctaagctgattttccagatgccacagaacaagtccactaaatttatggatactgttattttcacactatataattatgcctctaatcagcgagaagaatatctacttctcaagctttttaaaactgctctggaggaagaaataaaatcaaaagtggaccaggtacaggacatagttactggtaaccctacagtcatcaagatggtcgtcagcttcaatagaggtgcccggggacagaacaccctgcgccaactcctggctccagtggtaaaagagatcatcgacgacaagtcgctgattatcaacacaaaccctgtagaggtgtacaaggcttgggtgaaccaactagaaacacagactggagaggccagcaagttgccttatgatgtgaccacagaacaagctctaacatacccagaagtgaaaaataaactggaggcttccattgagaacctgagaagggtcaccgacaaagtcctgaattctatcatttcttcccttgatctactgccttatggattgaggtatatagccaaagtactgaagaattcgatccatgagaaattccccgatgcaacagaagatgagctattaaagattgttggaaacctcctgtactatcggtacatgaatccagccattgtagctccagatggctttgatatcatcgacatgacagctggaggtcagataaattctgaccaaaggagaaacttaggatcagtggccaaggttcttcagcacgcagcctccaacaagctgtttgaaggagaaaatgagcatctctcatctatgaacaattatttatcagagacgtatcaggaattcaggaaatatttcaaagaagcatgtaatgtccctgagccagaagagaagtttaatatggacaaatacacagacctggtgacagtcagcaaaccagtcatttatatttcaattgaagaaatcatcagcacacactcactcctgttggaacaccaggatgcaattgcccctgagaaaaatgacttactgagtgaattgctggggtcgctgggagaggtgccaaccgtggaatcttttcttggggaaggagcagttgaccccaatgaccctaacaaggcaaatacactaagtcagctttcaaagaccgagatttctcttgtcttgacaagcaaatatgacatagaggacggtgaagctatagatagccgaagcctcatgataaagaccaagaagctgataattgatgtgatccggaaccagccagggaacacattgacagaaatcttagagacaccagcaactgcgcaacaggaggtagaccatgccacggacatggtgagccgtgcaatgatagattccaggactccagaagaaatgaagcatagccaatctatgattgaagatgcacagctgcctcttgagcagaagaagaggaaaatccagaggaatcttcggacgttggaacagactggacacgtgtcatccgaaaataaataccaagacattctcaatgagattgccaaggatattcgaaatcaaagaatctatcgtaagcttcgaaaagctgaattggcaaaacttcagcagaccctgaatgcacttaacaagaaggcagcattttatgaagagcaaatcaattattatgacacctacataaagacttgtttagacaacttaaaaagaaaaaatactcggagatcaattaaactagatggaaaaggagaacccaaaggggcgaagagagcgaagccagtgaagtacactgcagcaaagctgcatgagaaaggtgtcctgctagatatagatgatcttcaaacaaaccagtttaagaatgttacatttgatatcatagctactgaagatgtaggcattttcgatgtaagatcaaaattccttggtgttgagatggaaaaggtgcaactcaatattcaggatttacttcagatgcaatatgaaggagtagctgtaatgaaaatgtttgataaggttaaagtgaatgtaaaccttctcatatacctgctgaacaagaagttctatggaaagtgaagtgcctacagaaatttcttggattctgtatcatctggattaggaaatgaatttgtttaatatttttgtttttaaacatgattgaaatcactgcttataaatgtgtgattttttttaaacgaccaaaactgttctgaagaatgtacccaggtgcctttttgctaatttgatactataatagaatgagacataaaatgaattaatggaaacatatccacactgtactgtgatataggtactctgatttaaaactttggacatcctgtgatctgttttaaagttggggggtgggaaatttagctgactagggacaaacatgtaaacctattttcctatgaaaaaaattttaaatgtcccacttgaataacgtaattcttcatagtttttttaatctatggataaatggaaacctaattatttgtaatgaattatttagacagttctaagccctgtcttctgggagttatcaattttaaagagaacttttgtgcaattcaaatgaagtttttataagtaattgaaaatgacaacacaataacactttctgtataaaagtatatattttatgtgatttattcctactaaatgaaagtgcactactgcctcatgtaaagactcttgcacgcagagcctttaagtgactaaggaacaacatagatagtgagcatagtccccacctccacccctcacaatttatttgaatacttcaattgtgcctctcaattttttgtaatgctaaaaaatcagtatctagatggtttttaaatgtattctctggaaattgttttatgtaaaataaatgttacttaattccattaatttggcttttaagttgtcttaataaatcaaagtcatttagtgggtaggggaagattcttggtcgggtttgttaggagagaatacatttcttgctgtactggttaaagtagagagcaagctgctgtaaggaaaagatacaaaaccctggtgtctaaaacaaggggtagaagtttgtttttctcaaattcagctcaacggtgag

SEQ ID NO: 441643 - DNA, 4216 bp, Homo sapiens
agcagcttgtattcttagaaacgcagcagacagcaactttagcaggtgatttcaatcaagtcagctgaaatgcactcacttccaggagttgtagctgtagggtacatcaatgaagctattgatgaagggaatcctttgaggactttagaaactttgctcctacctactgcgaatattagtgatgtggacccagcccatgcccagcactaccaggatgttttataccatgctaaatcacagaaactcggagactctgagagtgtttccaaagtgctttggctggatgagatacagcaagccgtcgatgaggccaacgtggacgaggacagagcaaaacaatgggttactctggtggttgatgttaatcagtgtttggaaggaaaaaaatcaagtgatattttgtctgtattgaagtcttccacttctaatgcaaatgacataatcccggagtgtgctgacaaatactatgatgcccttgtgaaggcaaaagagctcaaatctgaaagagtgtctagtgacggttcatggctcaaactcaacctgcacaaaaaatatgactactattacaacactgattcaaaagagagttcctgggtcacacctgaatcatgcttgtataaagaatcatggctcacaggaaaagaaatcgaggacattattgaggaagtcacagtaggttacattcgtgagaatatatggtctgcttcagaagagttgcttcttcgctttcaagccacaagctcaggacccatccttagggaagagtttgaagctagaaaatcatttttgcatgaacaagaagagaatgtggtcaaaatacaggctttttggaaaggatataaacaacggaaggagtatatgcacaggcggcaaacgttcattgataatactgattctattgtgaagattcagtcctggttccgaatggcaactgcaagaaagagctatctttcaagactacagtatttcagagatcataataatgaaattgtgaaaatacagtcactgttgagagcgaacaaagctagagatgactacaaaacattggttggctctgaaaacccaccattaacagtaattcgcaaatttgtatacctgctggaccaaagtgatttggatttccaggaggaactagaggttgcacgattaagggaagaagtagtgaccaagatcagggccaatcaacagctggaaaaagacctgaacctgatggacatcaagattggactgctggtgaagaacaggatcacactagaggatgtaatttcacacagtaaaaagctgaacaagaaaaaaggaggagaaatggaaatactgaataacaccgacaaccaaggaataaaaagtttgagtaaggagaggagaaaaacactagaaacatatcagcagctgttttaccttttacagaccaaccctttatacttggctaagctgattttccagatgccacagaacaagtccactaaatttatggatactgttattttcacactatataattatgcctctaatcagcgagaagaatatctacttctcaagctttttaaaactgctctggaggaagaaataaaatcaaaagtggaccaggtacaggacatagttactggtaaccctacagtcatcaagatggtcgtcagcttcaatagaggtgcccggggacagaacaccctgcgccaactcctggctccagtggtaaaagagatcatcgacgacaagtcgctgattatcaacacaaaccctgtagaggtgtacaaggcttgggtgaaccaactagaaacacagactggagaggccagcaagttgccttatgatgtgaccacagaacaagctctaacatacccagaagtgaaaaataaactggaggcttccattgagaacctgagaagggtcaccgacaaagtcctgaattctatcatttcttcccttgatctactgccttatggattgaggtatatagccaaagtactgaagaattcgatccatgagaaattccccgatgcaacagaagatgagctattaaagattgttggaaacctcctgtactatcggtacatgaatccagccattgtagctccagatggctttgatatcatcgacatgacagctggaggtcagataaattctgaccaaaggagaaacttaggatcagtggccaaggttcttcagcacgcagcctccaacaagctgtttgaaggagaaaatgagcatctctcatctatgaacaattatttatcagagacgtatcaggaattcaggaaatatttcaaagaagcatgtaatgtccctgagccagaagagaagtttaatatggacaaatacacagacctggtgacagtcagcaaaccagtcatttatatttcaattgaagaaatcatcagcacacactcactcctgttggaacaccaggatgcaattgcccctgagaaaaatgacttactgagtgaattgctggggtcgctgggagaggtgccaaccgtggaatcttttcttggggaaggagcagttgaccccaatgaccctaacaaggcaaatacactaagtcagctttcaaagaccgagatttctcttgtcttgacaagcaaatatgacatagaggacggtgaagctatagatagccgaagcctcatgataaagaccaagaagctgataattgatgtgatccggaaccagccagggaacacattgacagaaatcttagagacaccagcaactgcgcaacaggaggtagaccatgccacggacatggtgagccgtgcaatgatagattccaggactccagaagaaatgaagcatagccaatctatgattgaagatgcacagctgcctcttgagcagaagaagaggaaaatccagaggaatcttcggacgttggaacagactggacacgtgtcatccgaaaataaataccaagacattctcaatgagattgccaaggatattcgaaatcaaagaatctatcgtaagcttcgaaaagctgaattggcaaaacttcagcagaccctgaatgcacttaacaagaaggcagcattttatgaagagcaaatcaattattatgacacctacataaagacttgtttagacaacttaaaaagaaaaaatactcggagatcaattaaactagatggaaaaggagaacccaaaggggcgaagagagcgaagccagtgaagtacactgcagcaaagctgcatgagaaaggtgtcctgctagatatagatgatcttcaaacaaaccagtttaagaatgttacatttgatatcatagctactgaagatgtaggcattttcgatgtaagatcaaaattccttggtgttgagatggaaaaggtgcaactcaatattcaggatttacttcagatgcaatatgaaggagtagctgtaatgaaaatgtttgataaggttaaagtgaatgtaaaccttctcatatacctgctgaacaagaagttctatggaaagtgaagtgcctacagaaatttcttggattctgtatcatctggattaggaaatgaatttgtttaatatttttgtttttaaacatgattgaaatcactgcttataaatgtgtgattttttttaaacgaccaaaactgttctgaagaatgtacccaggtgcctttttgctaatttgatactataatagaatgagacataaaatgaattaatggaaacatatccacactgtactgtgatataggtactctgatttaaaactttggacatcctgtgatctgttttaaagttggggggtgggaaatttagctgactagggacaaacatgtaaacctattttcctatgaaaatggataaatggaaacctaattatttgtaatgaattatttagacagttctaagccctgtcttctgggagttatcaattttaaagagaacttttgtgcaattcaaatgaagtttttataagtaattgaaaatgacaacacaataacactttctgtataaaagtatatattttatgtgatttattcctactaaatgaaagtgcactactgcctcatgtaaagactcttgcacgcagagcctttaagtgactaaggaacaacatagatagtgagcatagtccccacctccacccctcacaatttatttgaatacttcaattgtgcctctcaattttttgtaatgctaaaaaatcagtatctagatggtttttaaatgtattctctggaaattgttttatgtaaaataaatgttacttaattcc

SEQ ID NO: 441644 - DNA, 1738 bp, Homo sapiens
gagatcaggccactgcactccagcctgggtgacagagcaagactatgtctaaaaaaaaaagtctgaagaaattgcatttctgctactttgtgccccttttaaaacgcaatttttccttaaactaaatgtgtggttattctaaaataacttcttgcctttccatccagagcaaaattaatgttaacaagtctcttaaagtgaaatatgtacactttccagttctgaagtaaaaagggatgggaaccctgtggtgttgagagtaaaataaggtgcctgagataagctacaagtcaagttacaaatagcgacttactactgcttgatattcttcttgtcccaaactggcaatatcataaagcaaacttctgcttaaatatgataccccttacttggttgttttaggatattcgaaatcaaagaatctatcgtaagcttcgaaaagctgaattggcaaaacttcagcagaccctgaatgcacttaacaagaaggcagcattttatgaagagcaaatcaattattatgacacctacataaagacttgtttagacaacttaaaaagaaaaaatactcggagatcaattaaactagatggaaaaggagaacccaaaggggcgaagagagcgaagccagtgaagtacactgcagcaaagctgcatgagaaaggtgtcctgctagatatagatgatcttcaaacaaaccagtttaagaatgttacatttgatatcatagctactgaagatgtaggcattttcgatgtaagatcaaaattccttggtgttgagatggaaaaggtgcaactcaatattcaggatttacttcagatgcaatatgaaggagtagctgtaatgaaaatgtttgataaggttaaagtgaatgtaaaccttctcatatacctgctgaacaagaagttctatggaaagtgaagtgcctacagaaatttcttggattctgtatcatctggattaggaaatgaatttgtttaatatttttgtttttaaacatgattgaaatcactgcttataaatgtgtgattttttttaaacgaccaaaactgttctgaagaatgtacccaggtgcctttttgctaatttgatactataatagaatgagacataaaatgaattaatggaaacatatccacactgtactgtgatataggtactctgatttaaaactttggacatcctgtgatctgttttaaagttggggggtgggaaatttagctgactagggacaaacatgtaaacctattttcctatgaaaaaaattttaaatgtcccacttgaataacgtaattcttcatagtttttttaatctatggataaatggaaacctaattatttgtaatgaattatttagacagttctaagccctgtcttctgggagttatcaattttaaagagaacttttgtgcaattcaaatgaagtttttataagtaattgaaaatgacaacacaataacactttctgtataaaagtatatattttatgtgatttattcctactaaatgaaagtgcactactgcctcatgtaaagactcttgcacgcagagcctttaagtgactaaggaacaacatagatagtgagcatagtccccacctccacccctcacaatttatttgaatacttcaattgtgcctctcaattttttgtaatgctaaaaaatcagtatctagatggtttttaaatgtattctctggaaattgttttatgtaaaataaatgttacttaattcc

SEQ ID NO: 441645 - DNA, 1164 bp, Homo sapiens
acccccatctatggcctggtgccatggcatgcgcctgtagtcctggctactcgggaggctgaggtgggaagatagcttaagccaggagtttgagaccaacctgggcaacatagttagaccccacccaggtgattaggtcaattgaatctgacttttgtcaacaaattcttctaatatgttttttaaatgcacaaaatgtcaaagttgagatttaatgatgctttttacaatttcaggatttacttcagatgcaatatgaaggagtagctgtaatgaaaatgtttgataaggttaaagtgaatgtaaaccttctcatatacctgctgaacaagaagttctatggaaagtgaagtgcctacagaaatttcttggattctgtatcatctggattaggaaatgaatttgtttaatatttttgtttttaaacatgattgaaatcactgcttataaatgtgtgattttttttaaacgaccaaaactgttctgaagaatgtacccaggtgcctttttgctaatttgatactataatagaatgagacataaaatgaattaatggaaacatatccacactgtactgtgatataggtactctgatttaaaactttggacatcctgtgatctgttttaaagttggggggtgggaaatttagctgactagggacaaacatgtaaacctattttcctatgaaaaaaattttaaatgtcccacttgaataacgtaattcttcatagtttttttaatctatggataaatggaaacctaattatttgtaatgaattatttagacagttctaagccctgtcttctgggagttatcaattttaaagagaacttttgtgcaattcaaatgaagtttttataagtaattgaaaatgacaacacaataacactttctgtataaaagtatatattttatgtgatttattcctactaaatgaaagtgcactactgcctcatgtaaagactcttgcacgcagagcctttaagtgactaaggaacaacatagatagtgagcatagtccccacctccacccctcacaatttatttgaatacttcaattgtgcctctcaattttttgtaatgctaaaaaatcagtatctagatggtttttaaatgtattctctggaaattgttttatgtaaaataaatgttacttaattcc

SEQ ID NO: 441646 - DNA, 3095 bp, Homo sapiens
agcagcttgtattcttagaaacgcagcagacagcaactttagcaggtgatttcaatcaagtcagctgaaatgcactcacttccaggagttgtagctgtagggtacatcaatgaagctattgatgaagggaatcctttgaggactttagaaactttgctcctacctactgcgaatattagtgatgtggacccagcccatgcccagcactaccaggatgttttataccatgctaaatcacagaaactcggagactctgagagtgtttccaaagtgctttggctggatgagatacagcaagccgtcgatgaggccaacgtggacgaggacagagcaaaacaatgggttactctggtggttgatgttaatcagtgtttggaaggaaaaaaatcaagtgatattttgtctgtattgaagtcttccacttctaatgcaaatgacataatcccggagtgtgctgacaaatactatgatgcccttgtgaaggcaaaagagctcaaatctgaaagagtgtctagtgacggttcatggctcaaactcaacctgcacaaaaaatatgactactattacaacactgattcaaaagagagttcctgggtcacacctgaatcatgcttgtataaagaatcatggctcacaggaaaagaaatcgaggacattattgaggaagtcacagtaggttacattcgtgagaatatatggtctgcttcagaagagttgcttcttcgctttcaagccacaagctcaggacccatccttagggaagagtttgaagctagaaaatcatttttgcatgaacaagaagagaatgtggtcaaaatacaggctttttggaaaggatataaacaacggaaggagtatatgcacaggcggcaaacgttcattgataatactgattctattgtgaagattcagtcctggttccgaatggcaactgcaagaaagagctatctttcaagactacagtatttcagagatcataataatgaaattgtgaaaatacagtcactgttgagagcgaacaaagctagagatgactacaaaacattggttggctctgaaaacccaccattaacagtaattcgcaaatttgtatacctgctggaccaaagtgatttggatttccaggaggaactagaggttgcacgattaagggaagaagtagtgaccaagatcagggccaatcaacagctggaaaaagacctgaacctgatggacatcaagattggactgctggtgaagaacaggatcacactagaggatgtaatttcacacagtaaaaagctgaacaagaaaaaaggaggagaaatggaaatactgaataacaccgacaaccaaggaataaaaagtttgagtaaggagaggagaaaaacactagaaacatatcagcagctgttttaccttttacagaccaaccctttatacttggctaagctgattttccagatgccacagaacaagtccactaaatttatggatactgttattttcacactatataattatgcctctaatcagcgagaagaatatctacttctcaagctttttaaaactgctctggaggaagaaataaaatcaaaagtggaccaggtacaggacatagttactggtaaccctacagtcatcaagatggtcgtcagcttcaatagaggtgcccggggacagaacaccctgcgccaactcctggctccagtggtaaaagagatcatcgacgacaagtcgctgattatcaacacaaaccctgtagaggtgtacaaggcttgggtgaaccaactagaaacacagactggagaggccagcaagttgccttatgatgtgaccacagaacaagctctaacatacccagaagtgaaaaataaactggaggcttccattgagaacctgagaagggtcaccgacaaagtcctgaattctatcatttcttcccttgatctactgccttatggattgaggtatatagccaaagtactgaagaattcgatccatgagaaattccccgatgcaacagaagatgagctattaaagattgttggaaacctcctgtactatcggtacatgaatccagccattgtagctccagatggctttgatatcatcgacatgacagctggaggtcagataaattctgaccaaaggagaaacttaggatcagtggccaaggttcttcagcacgcagcctccaacaagctgtttgaaggagaaaatgagcatctctcatctatgaacaattatttatcagagacgtatcaggaattcaggaaatatttcaaagaagcatgtaatgtccctgagccagaagagaagtttaatatggacaaatacacagacctggtgacagtcagcaaaccagtcatttatatttcaattgaagaaatcatcagcacacactcactcctgttggaacaccaggatgcaattgcccctgagaaaaatgacttactgagtgaattgctggggtcgctgggagaggtgccaaccgtggaatcttttcttggggaaggagcagttgaccccaatgaccctaacaaggcaaatacactaagtcagctttcaaagaccgagatttctcttgtcttgacaagcaaatatgacatagaggacggtgaagctatagatagccgaagcctcatgataaagaccaagaagctgataattgatgtgatccggaaccagccagggaacacattgacagaaatcttagagacaccagcaactgcgcaacaggaggtagaccatgccacggacatggtgagccgtgcaatgatagattccaggactccagaagaaatgaagcatagccaatctatgattgaagatgcacagctgcctcttgagcagaagaagaggaaaatccagaggaatcttcggacgttggaacagactggacacgtgtcatccgaaaataaataccaagacattctcaatgagattgccaaggatattcgaaatcaaagaatctatcgtaagcttcgaaaagctgaattggcaaaacttcagcagaccctgaatgcacttaacaagaaggcagcattttatgaagagcaaatcaattattatgacacctacataaagacttgtttagacaacttaaaaagaaa

SEQ ID NO: 441647 - DNA, 2535 bp, Homo sapiens
agcagcttgtattcttagaaacgcagcagacagcaactttagcaggtgatttcaatcaagtcagctgaaatgcactcacttccaggagttgtagctgtagggtacatcaatgaagctattgatgaagggaatcctttgaggactttagaaactttgctcctacctactgcgaatattagtgatgtggacccagcccatgcccagcactaccaggatgttttataccatgctaaatcacagaaactcggagactctgagagtgtttccaaagtgctttggctggatgagatacagcaagccgtcgatgaggccaacgtggacgaggacagagcaaaacaatgggttactctggtggttgatgttaatcagtgtttggaaggaaaaaaatcaagtgatattttgtctgtattgaagtcttccacttctaatgcaaatgacataatcccggagtgtgctgacaaatactatgatgcccttgtgaaggcaaaagagctcaaatctgaaagagtgtctagtgacggttcatggctcaaactcaacctgcacaaaaaatatgactactattacaacactgattcaaaagagagttcctgggtcacacctgaatcatgcttgtataaagaatcatggctcacaggaaaagaaatcgaggacattattgaggaagtcacagtaggttacattcgtgagaatatatggtctgcttcagaagagttgcttcttcgctttcaagccacaagctcaggacccatccttagggaagagtttgaagctagaaaatcatttttgcatgaacaagaagagaatgtggtcaaaatacaggctttttggaaaggatataaacaacggaaggagtatatgcacaggcggcaaacgttcattgataatactgattctattgtgaagattcagtcctggttccgaatggcaactgcaagaaagagctatctttcaagactacagtatttcagagatcataataatgaaattgtgaaaatacagtcactgttgagagcgaacaaagctagagatgactacaaaacattggttggctctgaaaacccaccattaacagtaattcgcaaatttgtatacctgctggaccaaagtgatttggatttccaggaggaactagaggttgcacgattaagggaagaagtagtgaccaagatcagggccaatcaacagctggaaaaagacctgaacctgatggacatcaagattggactgctggtgaagaacaggatcacactagagttttcagaaaactgataggtcaaagagggaaactgatcttctggaagctctgagaaggctacagtggctcataggtggagcgccagcggccagcaaccaagcgaacgttctggacaacggggagatgagcagccacaggaggctgccagttacatgggcatgtgaatgccccaggctggtcctccagacctcataaagacaccagggcaattgtggaggagaaaataagaaaaacagcattttataaacagaaataatcatctcttctaaatattcaggaataaaactacagtttaaatgttctacatttaactctacttttattattttatccagaaaaacaacagtactttttaaaaaacaatgttatttgtattgtttgacatccatgagaacttttaaagtgtaatatattccagaaggattttcagagaatgctttttatagccttaaactgctgtttcacgctatccccataaaatcataaacaggaaatgtcttgccttttaaaataaaggcttagttgcaaatcagtacatagtttaaataatatgtatcttttggaaacacaatcatggcaagttatcagatttttatgaatgcttgaggttttgtgggggttttttaaagccacttatcactaatagataacattgtgaagtttttcaacatatttgcaaacaccagatatgtatccagcattttttagcggttaaattaatgattattaaatatgtagctgttagccttgtcattgacagaatattagtagtgatacaagaacagagcaattgaagctttatttatagtagtgaaaaagtgggaaacgacctgaagcccaaagcaatatgcagagggcgatagaattagtttaatatggatgttgtatagccactaaaaatgatggtttttagactattttaaagcaggaggaaaggtttgcgatatagtagaggagaaaatagtgcctaaggtagtatgatttcttttattatcaaaaaataataatccagaagaagaaagaagttaagtgatttttctttgggtgatagttaagtttatcttctccccctcctccccacacctttttatttttaacaatgagtgtgtgtttagtgaggaaaagagagattgtaaagggaaatggctttgttcttatagaacaatgctagctcttgctagtaaccttaacattttttatagttcttttaaatcagcattcctcctaaaatcctcaaaatctgtaggtcagtgaagtggctaacattggttttaggc

SEQ ID NO: 441648 - DNA, 547 bp, Homo sapiens
caaacgttcattgataatactgattctattgtgaaggtaaataccctttcctaccataccaagtgcttggcttaaacgtttcccctcatttcatgtttaatctgaaagacagctatagaaagggagggtacatgtgagccttgaagtcagaaggcagtactggatttgaatcccagttctgctgctcatttacctaatcatttttcaagcaggttggttaaaccggtataaaacctcaagtcctttatgagtggttatgagaatcacaagtgaaagtgttctataaccaataaatgttctttgtctagaaagttcaagttgattatttagactttaggtagaacccagctttttttcatgtttctctttccacatttgcttaagcatatttagaatgctcagacataacagaacaaaacccatgataagaggaagtagagctaatttagggcctatatttgggagctgaattagtcgaacccaggtgaatagctctgggtgagaaagaaagggtactgtgatgtccactctcatggatctgaaagcc

SEQ ID NO: 441649 - DNA, 417 bp, Homo sapiens
aagcatgtaatgtccctgagccagaagagaagtttaatatggacaaatacacagacctggtgacagtcagcaaaccagtcatttatatttcaattgaagaaatcatcagcacacactcagtaagtggggatggggagccatcttagcaatggacccatgatttaggcatctgttatcttgaaaatgcttaatctctacaggacttattgtacacatgtgctaatactcatattcttaaccctaaaaatctcgcaattatttattccatgactcttatacattaataaaactccttctcccaaacaacaaaattctatttttacataattattccctgactcctagacattaataaaacttctccccaaaaaagaaagtgtacttttggcataatccatttacaaagccagattgtga

SEQ ID NO: 441650 - DNA, 526 bp, Homo sapiens
caattgctgtgtgttttttcctcactccgccttttttccattattttcttttgtcatctgttttatatgtagttatggattgaggtatatagccaaagtactgaagaattcgatccatgagaaattccccgatgcaacagaagatgagctattaaaggtagattttcaagggtaatctcaccatagcttctcctgggggtatgaatcaaaattaccaacatataactttgtaagattattccccatgtatgattatttataataagctgcaggtcttctgtttctaatgactctcaagataattgattaagctgaggttaatttggagatcctagacattattgaaattctttgcattagagcattttgggggcaatgagcattttttcatcaaaaataactttgcaaattatgctattaataatgtgtgattatattcattgcctttattaaactccttgttaggatttacatcagaaaatgatctgctttctcttgggaaatgtaggagaatatatatctttaa

SEQ ID NO: 441651 - DNA, 5764 bp, Homo sapiens
gagggaggagagttcacttttacttcagtgtcagcgcgcggcggccgtggctggctctggcgagagagcaccgagggagtgggtcgcagatcttcgggcggctaggggaaatcggcgagaggcgggatccgagcgcgccggcggggcgcagagcccgcgagcctggccagcgagggtagccgcggggggcgcgccccgggcgggcccccggagacgcgcaggatgccacacgaagagctgccgtcgctgcagagaccccgctatggctctattgtggacgatgaaaggctctctgcagaggagatggatgagaggaggcggcagaacattgcttatgaatatctgtgccacttagaggaagccaaaaggtggatggaagtttgcttagttgaagaattgccaccaaccactgaattggaagaagggctccggaatggagtttaccttgcaaagttagccaagttctttgccccgaaaatggtatcagagaaaaagatctatgatgtggaacaaacacgttataagaagtctggccttcattttcgacacacagataataccgtccagtggttaagagcgatggagtctattggtctacccaagatattttatccagaaacaacagatgtctatgatcggaaaaacataccaagaatgatatattgcattcacgcactgagtttgtatctgttcaaactaggaatagcaccccagatccaggatttgttgggcaaagtagacttcacagaggaggaaatcagtaatatgagaaaagaacttgagaaatatggaatacagatgccatctttcagcaaaataggtggtattctggccaatgaactgtccgtggatgaagctgcattacatgctgcagttatagccattaatgaagcagttgaaaaaggaatagcagagcaaaccgttgtaacactaagaaacccaaatgcggttttaactttagtggatgacaaccttgcaccagaatatcagaaagaactctgggatgccaaaaagaaaaaagaggaaaatgcaagactgaagaatagctgtatttcagaagaagaaagagatgcttatgaagaactgctgacacaagcagaaatccaaggcaatattaataaagtcaacaggcaggctgcagtggaccatatcaatgctgtcattccggaaggtgaccccgagaatacgctgcttgcactgaagaaaccagaggcccagctgcctgctgtttatccctttgctgctgccatgtatcagaacgaacttttcaacctccagaaacagaacaccatgaactacttggcccacgaggagcttttgattgctgtggaaatgttgtctgctgttgctttactaaaccaggccttggaaagcaacgatcttgtgtctgtgcagaatcaactcagaagccccgcaataggcttaaacaatctggacaaggcatatgtggaacgttatgcaaacacactactctctgttaaactagaagttttatcccaagggcaagataacttaagctggaatgaaattcagaattgtattgatatggttaatgctcaaattcaagaagaaaatgaccgagttgtagctgtagggtacatcaatgaagctattgatgaagggaatcctttgaggactttagaaactttgctcctacctactgcgaatattagtgatgtggacccagcccatgcccagcactaccaggatgttttataccatgctaaatcacagaaactcggagactctgagagtgtttccaaagtgctttggctggatgagatacagcaagccgtcgatgaggccaacgtggacgaggacagagcaaaacaatgggttactctggtggttgatgttaatcagtgtttggaaggaaaaaaatcaagtgatattttgtctgtattgaagtcttccacttctaatgcaaatgacataatcccggagtgtgctgacaaatactatgatgcccttgtgaaggcaaaagagctcaaatctgaaagagtgtctagtgacggttcatggctcaaactcaacctgcacaaaaaatatgactactattacaacactgattcaaaagagagttcctgggtcacacctgaatcatgcttgtataaagaatcatggctcacaggaaaagaaatcgaggacattattgaggaagtcacagtaggttacattcgtgagaatatatggtctgcttcagaagagttgcttcttcgctttcaagccacaagctcaggacccatccttagggaagagtttgaagctagaaaatcatttttgcatgaacaagaagagaatgtggtcaaaatacaggctttttggaaaggatataaacaacggaaggagtatatgcacaggcggcaaacgttcattgataatactgattctattgtgaagattcagtcctggttccgaatggcaactgcaagaaagagctatctttcaagactacagtatttcagagatcataataatgaaattgtgaaaatacagtcactgttgagagcgaacaaagctagagatgactacaaaacattggttggctctgaaaacccaccattaacagtaattcgcaaatttgtatacctgctggaccaaagtgatttggatttccaggaggaactagaggttgcacgattaagggaagaagtagtgaccaagatcagggccaatcaacagctggaaaaagacctgaacctgatggacatcaagattggactgctggtgaagaacaggatcacactagaggatgtaatttcacacagtaaaaagctgaacaagaaaaaaggaggagaaatggaaatactgaataacaccgacaaccaaggaataaaaagtttgagtaaggagaggagaaaaacactagaaacatatcagcagctgttttaccttttacagaccaaccctttatacttggctaagctgattttccagatgccacagaacaagtccactaaatttatggatactgttattttcacactatataattatgcctctaatcagcgagaagaatatctacttctcaagctttttaaaactgctctggaggaagaaataaaatcaaaagtggaccaggtacaggacatagttactggtaaccctacagtcatcaagatggtcgtcagcttcaatagaggtgcccggggacagaacaccctgcgccaactcctggctccagtggtaaaagagatcatcgacgacaagtcgctgattatcaacacaaaccctgtagaggtgtacaaggcttgggtgaaccaactagaaacacagactggagaggccagcaagttgccttatgatgtgaccacagaacaagctctaacatacccagaagtgaaaaataaactggaggcttccattgagaacctgagaagggtcaccgacaaagtcctgaattctatcatttcttcccttgatctactgccttatggattgaggtatatagccaaagtactgaagaattcgatccatgagaaattccccgatgcaacagaagatgagctattaaagattgttggaaacctcctgtactatcggtacatgaatccagccattgtagctccagatggctttgatatcatcgacatgacagctggaggtcagataaattctgaccaaaggagaaacttaggatcagtggccaaggttcttcagcacgcagcctccaacaagctgtttgaaggagaaaatgagcatctctcatctatgaacaattatttatcagagacgtatcaggaattcaggaaatatttcaaagaagcatgtaatgtccctgagccagaagagaagtttaatatggacaaatacacagacctggtgacagtcagcaaaccagtcatttatatttcaattgaagaaatcatcagcacacactcactcctgttggaacaccaggatgcaattgcccctgagaaaaatgacttactgagtgaattgctggggtcgctgggagaggtgccaaccgtggaatcttttcttggggaaggagcagttgaccccaatgaccctaacaaggcaaatacactaagtcagctttcaaagaccgagatttctcttgtcttgacaagcaaatatgacatagaggacggtgaagctatagatagccgaagcctcatgataaagaccaagaagctgataattgatgtgatccggaaccagccagggaacacattgacagaaatcttagagacaccagcaactgcgcaacaggaggtagaccatgccacggacatggtgagccgtgcaatgatagattccaggactccagaagaaatgaagcatagccaatctatgattgaagatgcacagctgcctcttgagcagaagaagaggaaaatccagaggaatcttcggacgttggaacagactggacacgtgtcatccgaaaataaataccaagacattctcaatgagattgccaaggatattcgaaatcaaagaatctatcgtaagcttcgaaaagctgaattggcaaaacttcagcagaccctgaatgcacttaacaagaaggcagcattttatgaagagcaaatcaattattatgacacctacataaagacttgtttagacaacttaaaaagaaaaaatactcggagatcaattaaactagatggaaaaggagaacccaaaggggcgaagagagcgaagccagtgaagtacactgcagcaaagctgcatgagaaaggtgtcctgctagatatagatgatcttcaaacaaaccagtttaagaatgttacatttgatatcatagctactgaagatgtaggcattttcgatgtaagatcaaaattccttggtgttgagatggaaaaggtgcaactcaatattcaggatttacttcagatgcaatatgaaggagtagctgtaatgaaaatgtttgataaggttaaagtgaatgtaaaccttctcatatacctgctgaacaagaagttctatggaaagtgaagtgcctacagaaatttcttggattctgtatcatctggattaggaaatgaatttgtttaatatttttgtttttaaacatgattgaaatcactgcttataaatgtgtgattttttttaaacgaccaaaactgttctgaagaatgtacccaggtgcctttttgctaatttgatactataatagaatgagacataaaatgaattaatggaaacatatccacactgtactgtgatataggtactctgatttaaaactttggacatcctgtgatctgttttaaagttggggggtgggaaatttagctgactagggacaaacatgtaaacctattttcctatgaaaaaaattttaaatgtcccacttgaataacgtaattcttcatagtttttttaatctatggataaatggaaacctaattatttgtaatgaattatttagacagttctaagccctgtcttctgggagttatcaattttaaagagaacttttgtgcaattcaaatgaagtttttataagtaattgaaaatgacaacacaataacactttctgtataaaagtatatattttatgtgatttattcctactaaatgaaagtgcactactgcctcatgtaaagactcttgcacgcagagcctttaagtgactaaggaacaacatagatagtgagcatagtccccacctccacccctcacaatttatttgaatacttcaattgtgcctctcaattttttgtaatgctaaaaaatcagtatctagatggtttttaaatgtattctctggaaattgttttatgtaaaataaatgttacttaattcc

SEQ ID NO: 441652 - DNA, 4321 bp, Homo sapiens
agcagcttgtattcttagaaacgcagcagacagcaactttagcaggtgatttcaatcaagtcagctgaaatgcactcacttccaggtgatcggccttggttctgttaagaccatttttggatggggtgttttaaaggagttgtagctgtagggtacatcaatgaagctattgatgaagggaatcctttgaggactttagaaactttgctcctacctactgcgaatattagtgatgtggacccagcccatgcccagcactaccaggatgttttataccatgctaaatcacagaaactcggagactctgagagtgtttccaaagtgctttggctggatgagatacagcaagccgtcgatgaggccaacgtggacgaggacagagcaaaacaatgggttactctggtggttgatgttaatcagtgtttggaaggaaaaaaatcaagtgatattttgtctgtattgaagtcttccacttctaatgcaaatgacataatcccggagtgtgctgacaaatactatgatgcccttgtgaaggcaaaagagctcaaatctgaaagagtgtctagtgacggttcatggctcaaactcaacctgcacaaaaaatatgactactattacaacactgattcaaaagagagttcctgggtcacacctgaatcatgcttgtataaagaatcatggctcacaggaaaagaaatcgaggacattattgaggaagtcacagtaggttacattcgtgagaatatatggtctgcttcagaagagttgcttcttcgctttcaagccacaagctcaggacccatccttagggaagagtttgaagctagaaaatcatttttgcatgaacaagaagagaatgtggtcaaaatacaggctttttggaaaggatataaacaacggaaggagtatatgcacaggcggcaaacgttcattgataatactgattctattgtgaagattcagtcctggttccgaatggcaactgcaagaaagagctatctttcaagactacagtatttcagagatcataataatgaaattgtgaaaatacagtcactgttgagagcgaacaaagctagagatgactacaaaacattggttggctctgaaaacccaccattaacagtaattcgcaaatttgtatacctgctggaccaaagtgatttggatttccaggaggaactagaggttgcacgattaagggaagaagtagtgaccaagatcagggccaatcaacagctggaaaaagacctgaacctgatggacatcaagattggactgctggtgaagaacaggatcacactagaggatgtaatttcacacagtaaaaagctgaacaagaaaaaaggaggagaaatggaaatactgaataacaccgacaaccaaggaataaaaagtttgagtaaggagaggagaaaaacactagaaacatatcagcagctgttttaccttttacagaccaaccctttatacttggctaagctgattttccagatgccacagaacaagtccactaaatttatggatactgttattttcacactatataattatgcctctaatcagcgagaagaatatctacttctcaagctttttaaaactgctctggaggaagaaataaaatcaaaagtggaccaggtacaggacatagttactggtaaccctacagtcatcaagatggtcgtcagcttcaatagaggtgcccggggacagaacaccctgcgccaactcctggctccagtggtaaaagagatcatcgacgacaagtcgctgattatcaacacaaaccctgtagaggtgtacaaggcttgggtgaaccaactagaaacacagactggagaggccagcaagttgccttatgatgtgaccacagaacaagctctaacatacccagaagtgaaaaataaactggaggcttccattgagaacctgagaagggtcaccgacaaagtcctgaattctatcatttcttcccttgatctactgccttatggattgaggtatatagccaaagtactgaagaattcgatccatgagaaattccccgatgcaacagaagatgagctattaaagattgttggaaacctcctgtactatcggtacatgaatccagccattgtagctccagatggctttgatatcatcgacatgacagctggaggtcagataaattctgaccaaaggagaaacttaggatcagtggccaaggttcttcagcacgcagcctccaacaagctgtttgaaggagaaaatgagcatctctcatctatgaacaattatttatcagagacgtatcaggaattcaggaaatatttcaaagaagcatgtaatgtccctgagccagaagagaagtttaatatggacaaatacacagacctggtgacagtcagcaaaccagtcatttatatttcaattgaagaaatcatcagcacacactcactcctgttggaacaccaggatgcaattgcccctgagaaaaatgacttactgagtgaattgctggggtcgctgggagaggtgccaaccgtggaatcttttcttggggaaggagcagttgaccccaatgaccctaacaaggcaaatacactaagtcagctttcaaagaccgagatttctcttgtcttgacaagcaaatatgacatagaggacggtgaagctatagatagccgaagcctcatgataaagaccaagaagctgataattgatgtgatccggaaccagccagggaacacattgacagaaatcttagagacaccagcaactgcgcaacaggaggtagaccatgccacggacatggtgagccgtgcaatgatagattccaggactccagaagaaatgaagcatagccaatctatgattgaagatgcacagctgcctcttgagcagaagaagaggaaaatccagaggaatcttcggacgttggaacagactggacacgtgtcatccgaaaataaataccaagacattctcaatgagattgccaaggatattcgaaatcaaagaatctatcgtaagcttcgaaaagctgaattggcaaaacttcagcagaccctgaatgcacttaacaagaaggcagcattttatgaagagcaaatcaattattatgacacctacataaagacttgtttagacaacttaaaaagaaaaaatactcggagatcaattaaactagatggaaaaggagaacccaaaggggcgaagagagcgaagccagtgaagtacactgcagcaaagctgcatgagaaaggtgtcctgctagatatagatgatcttcaaacaaaccagtttaagaatgttacatttgatatcatagctactgaagatgtaggcattttcgatgtaagatcaaaattccttggtgttgagatggaaaaggtgcaactcaatattcaggatttacttcagatgcaatatgaaggagtagctgtaatgaaaatgtttgataaggttaaagtgaatgtaaaccttctcatatacctgctgaacaagaagttctatggaaagtgaagtgcctacagaaatttcttggattctgtatcatctggattaggaaatgaatttgtttaatatttttgtttttaaacatgattgaaatcactgcttataaatgtgtgattttttttaaacgaccaaaactgttctgaagaatgtacccaggtgcctttttgctaatttgatactataatagaatgagacataaaatgaattaatggaaacatatccacactgtactgtgatataggtactctgatttaaaactttggacatcctgtgatctgttttaaagttggggggtgggaaatttagctgactagggacaaacatgtaaacctattttcctatgaaaaaaattttaaatgtcccacttgaataacgtaattcttcatagtttttttaatctatggataaatggaaacctaattatttgtaatgaattatttagacagttctaagccctgtcttctgggagttatcaattttaaagagaacttttgtgcaattcaaatgaagtttttataagtaattgaaaatgacaacacaataacactttctgtataaaagtatatattttatgtgatttattcctactaaatgaaagtgcactactgcctcatgtaaagactcttgcacgcagagcctttaagtgactaaggaacaacatagatagtgagcatagtccccacctccacccctcacaatttatttgaatacttcaattgtgcctctcaattttttgtaatgctaaaaaatcagtatctagatggtttttaaatgtattctctggaaattgttttatgtaaaataaatgttacttaattcc

SEQ ID NO: 441653 - DNA, 3077 bp, Homo sapiens
  misc_feature (28)..(28): n is a, c, g, or t
  misc_feature (31)..(31): n is a, c, g, or t
  misc_feature (37)..(37): n is a, c, g, or t
  misc_feature (53)..(53): n is a, c, g, or t
  misc_feature (58)..(58): n is a, c, g, or t
ggggaccgcccccgcccagaattgatangtnttcggngggggttccagttatnatttncacacagatgtaatttcacacagtaaaaagctgaacaagaaaaaaggaggagaaatggaaatactgaataacaccgacaaccaaggaataaaaagtttgagtaaggagaggagaaaaacactagaaacatatcagcagctgttttaccttttacagaccaaccctttatacttggctaagctgattttccagatgccacagaacaagtccactaaatttatggatactgttattttcacactatataattatgcctctaatcagcgagaagaatatctacttctcaagctttttaaaactgctctggaggaagaaataaaatcaaaagtggaccaggtacaggacatagttactggtaaccctacagtcatcaagatggtcgtcagcttcaatagaggtgcccggggacagaacaccctgcgccaactcctggctccagtggtaaaagagatcatcgacgacaagtcgctgattatcaacacaaaccctgtagaggtgtacaaggcttgggtgaaccaactagaaacacagactggagaggccagcaagttgccttatgatgtgaccacagaacaagctctaacatacccagaagtgaaaaataaactggaggcttccattgagaacctgagaagggtcaccgacaaagtcctgaattctatcatttcttcccttgatctactgccttatggattgaggtatatagccaaagtactgaagaattcgatccatgagaaattccccgatgcaacagaagatgagctattaaagattgttggaaacctcctgtactatcggtacatgaatccagccattgtagctccagatggctttgatatcatcgacatgacagctggaggtcagataaattctgaccaaaggagaaacttaggatcagtggccaaggttcttcagcacgcagcctccaacaagctgtttgaaggagaaaatgagcatctctcatctatgaacaattatttatcagagacgtatcaggaattcaggaaatatttcaaagaagcatgtaatgtccctgagccagaagagaagtttaatatggacaaatacacagacctggtgacagtcagcaaaccagtcatttatatttcaattgaagaaatcatcagcacacactcactcctgttggaacaccaggatgcaattgcccctgagaaaaatgacttactgagtgaattgctggggtcgctgggagaggtgccaaccgtggaatcttttcttggggaaggagcagttgaccccaatgaccctaacaaggcaaatacactaagtcagctttcaaagaccgagatttctcttgtcttgacaagcaaatatgacatagaggacggtgaagctatagatagccgaagcctcatgataaagaccaagaagctgataattgatgtgatccggaaccagccagggaacacattgacagaaatcttagagacaccagcaactgcgcaacaggaggtagaccatgccacggacatggtgagccgtgcaatgatagattccaggactccagaagaaatgaagcatagccaatctatgattgaagatgcacagctgcctcttgagcagaagaagaggaaaatccagaggaatcttcggacgttggaacagactggacacgtgtcatccgaaaataaataccaagacattctcaatgagattgccaaggatattcgaaatcaaagaatctatcgtaagcttcgaaaagctgaattggcaaaacttcagcagaccctgaatgcacttaacaagaaggcagcattttatgaagagcaaatcaattattatgacacctacataaagacttgtttagacaacttaaaaagaaaaaatactcggagatcaattaaactagatggaaaaggagaacccaaaggggcgaagagagcgaagccagtgaagtacactgcagcaaagctgcatgagaaaggtgtcctgctagatatagatgatcttcaaacaaaccagtttaagaatgttacatttgatatcatagctactgaagatgtaggcattttcgatgtaagatcaaaattccttggtgttgagatggaaaaggtgcaactcaatattcaggatttacttcagatgcaatatgaaggagtagctgtaatgaaaatgtttgataaggttaaagtgaatgtaaaccttctcatatacctgctgaacaagaagttctatggaaagtgaagtgcctacagaaatttcttggattctgtatcatctggattaggaaatgaatttgtttaatatttttgtttttaaacatgattgaaatcactgcttataaatgtgtgattttttttaaacgaccaaaactgttctgaagaatgtacccaggtgcctttttgctaatttgatactataatagaatgagacataaaatgaattaatggaaacatatccacactgtactgtgatataggtactctgatttaaaactttggacatcctgtgatctgttttaaagttggggggtgggaaatttagctgactagggacaaacatgtaaacctattttcctatgaaaaaaattttaaatgtcccacttgaataacgtaattcttcatagtttttttaatctatggataaatggaaacctaattatttgtaatgaattatttagacagttctaagccctgtcttctgggagttatcaattttaaagagaacttttgtgcaattcaaatgaagtttttataagtaattgaaaatgacaacacaataacactttctgtataaaagtatatattttatgtgatttattcctactaaatgaaagtgcactactgcctcatgtaaagactcttgcacgcagagcctttaagtgactaaggaacaacatagatagtgagcatagtccccacctccacccctcacaatttatttgaatacttcaattgtgcctctcaattttttgtaatgctaaaaaatcagtatctagatggtttttaaatgtattctctggaaattgttttatgtaaaataaatgttacttaattcc

SEQ ID NO: 441654 - DNA, 1262 bp, Homo sapiens
catcactttcttgtcctaaaatctcaagggaagccagactcactggcatttgccttttctttaactcctgccttccttcaaagcctgacttctgtttatcccatgaaacctcctgacaacaccaactcagaagaaaatgcttcttccagagatggagtctcactctgcggcccaggctggagtgcagtggtgggatcttggctcactgcaacctccacctcccaggtttaagaatgttacatttgatatcatagctactgaagatgtaggcattttcgatgtaagatcaaaattccttggtgttgagatggaaaaggtgcaactcaatattcaggatttacttcagatgcaatatgaaggagtagctgtaatgaaaatgtttgataaggttaaagtgaatgtaaaccttctcatatacctgctgaacaagaagttctatggaaagtgaagtgcctacagaaatttcttggattctgtatcatctggattaggaaatgaatttgtttaatatttttgtttttaaacatgattgaaatcactgcttataaatgtgtgattttttttaaacgaccaaaactgttctgaagaatgtacccaggtgcctttttgctaatttgatactataatagaatgagacataaaatgaattaatggaaacatatccacactgtactgtgatataggtactctgatttaaaactttggacatcctgtgatctgttttaaagttggggggtgggaaatttagctgactagggacaaacatgtaaacctattttcctatgaaaaaaattttaaatgtcccacttgaataacgtaattcttcatagtttttttaatctatggataaatggaaacctaattatttgtaatgaattatttagacagttctaagccctgtcttctgggagttatcaattttaaagagaacttttgtgcaattcaaatgaagtttttataagtaattgaaaatgacaacacaataacactttctgtataaaagtatatattttatgtgatttattcctactaaatgaaagtgcactactgcctcatgtaaagactcttgcacgcagagcctttaagtgactaaggaacaacatagatagtgagcatagtccccacctccacccctcacaatttatttgaatacttcaattgtgcctctcaattttttgtaatgctaaaaaatcagtatctagatggtttttaaatgtattctctggaaattgttttatgtaaaataaatgttacttaattcc

SEQ ID NO: 441655 - DNA, 3076 bp, Homo sapiens
agcagcttgtattcttagaaacgcagcagacagcaactttagcaggtgatttcaatcaagtcagctgaaatgcactcacttccaggagttgtagctgtagggtacatcaatgaagctattgatgaagggaatcctttgaggactttagaaactttgctcctacctactgcgaatattagtgatgtggacccagcccatgcccagcactaccaggatgttttataccatgctaaatcacagaaactcggagactctgagagtgtttccaaagtgctttggctggatgagatacagcaagccgtcgatgaggccaacgtggacgaggacagagcaaaacaatgggttactctggtggttgatgttaatcagtgtttggaaggaaaaaaatcaagtgatattttgtctgtattgaagtcttccacttctaatgcaaatgacataatcccggagtgtgctgacaaatactatgatgcccttgtgaaggcaaaagagctcaaatctgaaagagtgtctagtgacggttcatggctcaaactcaacctgcacaaaaaatatgactactattacaacactgattcaaaagagagttcctgggtcacacctgaatcatgcttgtataaagaatcatggctcacaggaaaagaaatcgaggacattattgaggaagtcacagtaggttacattcgtgagaatatatggtctgcttcagaagagttgcttcttcgctttcaagccacaagctcaggacccatccttagggaagagtttgaagctagaaaatcatttttgcatgaacaagaagagaatgtggtcaaaatacaggctttttggaaaggatataaacaacggaaggagtatatgcacaggcggcaaacgttcattgataatactgattctattgtgaagattcagtcctggttccgaatggcaactgcaagaaagagctatctttcaagactacagtatttcagagatcataataatgaaattgtgaaaatacagtcactgttgagagcgaacaaagctagagatgactacaaaacattggttggctctgaaaacccaccattaacagtaattcgcaaatttgtatacctgctggaccaaagtgatttggatttccaggaggaactagaggttgcacgattaagggaagaagtagtgaccaagatcagggccaatcaacagctggaaaaagacctgaacctgatggacatcaagattggactgctggtgaagaacaggatcacactagaggatgtaatttcacacagtaaaaagctgaacaagaaaaaaggaggagaaatggaaatactgaataacaccgacaaccaaggaataaaaagtttgagtaaggagaggagaaaaacactagaaacatatcagcagctgttttaccttttacagaccaaccctttatacttggctaagctgattttccagatgccacagaacaagtccactaaatttatggatactgttattttcacactatataattatgcctctaatcagcgagaagaatatctacttctcaagctttttaaaactgctctggaggaagaaataaaatcaaaagtggaccaggtacaggacatagttactggtaaccctacagtcatcaagatggtcgtcagcttcaatagaggtgcccggggacagaacaccctgcgccaactcctggctccagtggtaaaagagatcatcgacgacaagtcgctgattatcaacacaaaccctgtagaggtgtacaaggcttgggtgaaccaactagaaacacagactggagaggccagcaagttgccttatgatgtgaccacagaacaagctctaacatacccagaagtgaaaaataaactggaggcttccattgagaacctgagaagggtcaccgacaaagtcctgaattctatcatttcttcccttgatctactgccttatggattgaggtatatagccaaagtactgaagaattcgatccatgagaaattccccgatgcaacagaagatgagctattaaagattgttggaaacctcctgtactatcggtacatgaatccagccattgtagctccagatggctttgatatcatcgacatgacagctggaggtcagataaattctgaccaaaggagaaacttaggatcagtggccaaggttcttcagcacgcagcctccaacaagctgtttgaaggagaaaatgagcatctctcatctatgaacaattatttatcagagacgtatcaggaattcaggaaatatttcaaagaagcatgtaatgtccctgagccagaagagaagtttaatatggacaaatacacagacctggtgacagtcagcaaaccagtcatttatatttcaattgaagaaatcatcagcacacactcactcctgttggaacaccaggatgcaattgcccctgagaaaaatgacttactgagtgaattgctggggtcgctgggagaggtgccaaccgtggaatcttttcttggggaaggagcagttgaccccaatgaccctaacaaggcaaatacactaagtcagctttcaaagaccgagatttctcttgtcttgacaagcaaatatgacatagaggacggtgaagctatagatagaccaagaagctgataattgatgtgatccggaaccagccagggaacacattgacagaaatcttagagacaccagcaactgcgcaacaggaggtagaccatgccacggacatggtgagccgtgcaatgatagattccaggactccagaagaaatgaagcatagccaatctatgattgaagatgcacagctgcctcttgagcagaagaagaggaaaatccagaggaatcttcggacgttggaacagactggacacgtgtcatccgaaaataaataccaagacattctcaatgagattgccaaggatattcgaaatcaaagaatctatcgtaagcttcgaaaagctgaattggcaaaacttcagcagaccctgaatgcacttaacaagaaggcagcattttatgaagagcaaatcaattattatgacacctacataaagacttgtttagacaacttaaaaagaaa

SEQ ID NO: 441656 - DNA, 1707 bp, Homo sapiens
agccgccattgccgggcctgcctggccaccctgcgcagcggccttgcgtcctctccgggggcggagcgggtcggcgggcctgacagggaacctccctgaccgagcccacgtctccccacggccagagaaatctccggcccggcccgcatcgccagcccccaggcccggaggaacggcccgagcccaggagaaccacatcttcgtcccagccccggaggctcctgtgggcaagatcgtgagccaacgggttcctgaggcccctcctggccaggcagggtttccccgcgcgtttccgaggagccctgcctggccgggcggctggacaaacagtgcacttgccggcggtcccaacccagcaggagaagtggacatgaggttggcaggccctctccgcattgtggtcctagtcgtcagtgtgggtgtcacatggatcgtggtcagcatcctcctgggtgggcctggcagtggctttcctcgcatccagcaactcttcaccagtccagagagctcggtgactgcagcgccacgggccaggaagtacaagtgtggcctgccccagccgtgtcctgaggagcacctggccttccgcgtggtcagcggggccgccaacgtcattgggcccaagatctgcctcgaggacaagatgctgatgagcagcgtcaaggacaacgtgggccgcgggctgaacatcgccctggtgaacggggtcagcggcgagctcatcgaggcccgggcctttgacatgtgggccggagatgtcaacgacctgttgaagtttattcggccactgcacgaaggcaccctggtgttcgtggcatcctacgacgacccagccaccaagatgaatgaagagaccagaaagctcttcagtgagctgggcagcaggaacgccaaggagctggccttccgggacagctgggtgtttgtcggggccaagggtgtgcagaacaagagcccctttgagcagcacgtgaagaacagtaagcacagcaacaagtacgaaggctggcccgaggcgctggagatggaaggctgtatcccgcggagaagcacggccagctagcacggccagtgccaggaccgggccgagggaggccagaccaagggaggcacgcgcgctgccgggcggacagaggctgaggctcacaccccacacccgggcaggagcgctccctggccccaacacatcggggctccgaggcagtgaccagaacgtggtctcaaggtggtgggggctatgggggctgcagggggtagccctgccgcactttgtcacgggagcccagggtacccgcctccttttcgtaacactgttccccccggtcagcccatctagccctgtcctccattcctcacgccatctccatccccatcttgagtcctggaacggccctgggtgcctgcccctcactgtgcaactctgggagcagcccggcaggttggggcgtcttccagaacctctcccttctggagccactctgcactgcgggctaaacatgtttccagtgtgattccttccagtgagccaaacccggtggctgcttcatgagcctgactgcctctcgcctgctctcagcaggaagggacccctggagcaggctggcccggggtggtgaagtagctggagcccgatcacagtcccgcggtttgtcagggggcccaccttctagatgaccccttaataaagtgatggccccacagaaaaaa

SEQ ID NO: 441657 - DNA, 485 bp, Homo sapiens
tgtcctgaggagcacctggccttccgcgtggtcagcggggccgccaacgtcattgggcccaagatctgcctcgaggacaagatgctgatgagcagcgtcaaggacaacgtgggccgcgggctgaacatcgccctggtgaaccgggcaagcgacgagcacatcgaggcccgggcatttgacatctggaccggagatgtcaacgacgccctctccgcattgtggtcctagtcgtcagtgtgggtgtcacatggatcgtggtcagcatcctcctgggtgggcctggcagtggctttcctcgcatccagcaactcttcaccagtccagagagctcggtgactgcagcgccacgggccaggaagtacaagtgtggcctgccccagccgtgtcctgaggagcacctggccttccgcgtggtcagcggggccgccaacgtcattgggcccaagatctgcctcgaggacaagatgtgagctccctggggtgac

SEQ ID NO: 441658 - DNA, 423 bp, Homo sapiens
gcaagggagagtggagcagacgtgcccatgtgggatctccccgtcccccccacccccccccaactaggctgatgagcagcgtcaaggacaacgtgggccgcgggctgaacatcgccctggtgaacggtgaggcccctggctgagcgtggcctgccgccctccttccctgctccctccccaggaggcctctgggtgtttgccctcccttcccctcccattcaagatctcccagggaggcctgggaaggagtctgtgcaagcgcaaggctccacagaggagtgacccaatgaacaaaaaagcatgatggcaataaagaactagggaaggttctgggaggttgagggtgcttcatggagagcccccggagggcctcaaatgccagacagaggcaccacggcttggggtgggatgcagctgcctgaa

SEQ ID NO: 441659 - DNA, 1902 bp, Homo sapiens
agccgccattgccgggcctgcctggccaccctgcgcagcggccttgcgtcctctccgggggcggagcgggtcggcgggcctgacagggaacctccctgaccgagcccacgtctccccacggccagagaaatctccggcccggcccgcatcgccagcccccaggcccggaggaacggcccgagcccaggagaaccacatcttcgtcccagccccggaggctcctgtgggcaagatcgtgagccaacgggttcctgaggcccctcctggccaggcagggtttccccgcgcgtttccgaggagccctgcctggccgggcggctggacaaacaggtcgtagcaccgatcgcgcccgcccccagcaggggtcccgcacaggcttgcccctgacccccacccaaacctgtccttccgctttgcccccaaacagtgcacttgccggcggtcccaacccagcaggagaagtggacatgaggttggcaggccctctccgcattgtggtcctagtcgtcagtgtgggtgtcacatggatcgtggtcagcatcctcctgggtgggcctggcagtggctttcctcgcatccagcaactcttcaccagctggagtgcagtggtgcaatctcggttcactgcaacctctacctcctgggttcaagcgattctagtgccccagcctcccgagtagctgagactacaggtccagagagctcggtgactgcagcgccacgggccaggaagtacaagtgtggcctgccccagccgtgtcctgaggagcacctggccttccgcgtggtcagcggggccgccaacgtcattgggcccaagatctgcctcgaggacaagatgctgatgagcagcgtcaaggacaacgtgggccgcgggctgaacatcgccctggtgaacggggtcagcggcgagctcatcgaggcccgggcctttgacatgtgggccggagatgtcaacgacctgttgaagtttattcggccactgcacgaaggcaccctggtgttcgtggcatcctacgacgacccagccaccaagatgaatgaagagaccagaaagctcttcagtgagctgggcagcaggaacgccaaggagctggccttccgggacagctgggtgtttgtcggggccaagggtgtgcagaacaagagcccctttgagcagcacgtgaagaacagtaagcacagcaacaagtacgaaggctggcccgaggcgctggagatggaaggctgtatcccgcggagaagcacggccagctagcacggccagtgccaggaccgggccgagggaggccagaccaagggaggcacgcgcgctgccgggcggacagaggctgaggctcacaccccacacccgggcaggagcgctccctggccccaacacatcggggctccgaggcagtgaccagaacgtggtctcaaggtggtgggggctatgggggctgcagggggtagccctgccgcactttgtcacgggagcccagggtacccgcctccttttcgtaacactgttccccccggtcagcccatctagccctgtcctccattcctcacgccatctccatccccatcttgagtcctggaacggccctgggtgcctgcccctcactgtgcaactctgggagcagcccggcaggttggggcgtcttccagaacctctcccttctggagccactctgcactgcgggctaaacatgtttccagtgtgattccttccagtgagccaaacccggtggctgcttcatgagcctgactgcctctcgcctgctctcagcaggaagggacccctggagcaggctggcccggggtggtgaagtagctggagcccgatcacagtcccgcggtttgtcagggggcccaccttctagatgaccccttaataaagtgatggccccacagaaaaaa

SEQ ID NO: 441660 - DNA, 1633 bp, Homo sapiens
agccgccattgccgggcctgcctggccaccctgcgcagcggccttgcgtcctctccgggggcggagcgggtcggcgggcctgacagggaacctccctgaccgagcccacgtctccccacggccagagaaatctccggcccggcccgcatcgccagcccccaggcccggaggaacggcccgagcccaggagaaccacatcttcgtcccagcccctgacccccacccaaacctgtccttccgctttgcccccaaacagtgcacttgccggcggtcccaacccagcaggagaagtggacatgaggttggcaggccctctccgcattgtggtcctagtcgtcagtgtgggtgtcacatggatcgtggtcagcatcctcctgggtgggcctggcagtggctttcctcgcatccagcaactcttcaccagtccagagagctcggtgactgcagcgccacgggccaggaagtacaagtgtggcctgccccagccgtgtcctgaggagcacctggccttccgcgtggtcagcggggccgccaacgtcattgggcccaagatctgcctcgaggacaagatgctgatgagcagcgtcaaggacaacgtgggccgcgggctgaacatcgccctggtgaacggggtcagcggcgagctcatcgaggcccgggcctttgacatgtgggccggagatgtcaacgacctgttgaagtttattcggccactgcacgaaggcaccctggtgttcgtggcatcctacgacgacccagccaccaagatgaatgaagagaccagaaagctcttcagtgagctgggcagcaggaacgccaaggagctggccttccgggacagctgggtgtttgtcggggccaagggtgtgcagaacaagagcccctttgagcagcacgtgaagaacagtaagcacagcaacaagtacgaaggctggcccgaggcgctggagatggaaggctgtatcccgcggagaagcacggccagctagcacggccagtgccaggaccgggccgagggaggccagaccaagggaggcacgcgcgctgccgggcggacagaggctgaggctcacaccccacacccgggcaggagcgctccctggccccaacacatcggggctccgaggcagtgaccagaacgtggtctcaaggtggtgggggctatgggggctgcagggggtagccctgccgcactttgtcacgggagcccagggtacccgcctccttttcgtaacactgttccccccggtcagcccatctagccctgtcctccattcctcacgccatctccatccccatcttgagtcctggaacggccctgggtgcctgcccctcactgtgcaactctgggagcagcccggcaggttggggcgtcttccagaacctctcccttctggagccactctgcactgcgggctaaacatgtttccagtgtgattccttccagtgagccaaacccggtggctgcttcatgagcctgactgcctctcgcctgctctcagcaggaagggacccctggagcaggctggcccggggtggtgaagtagctggagcccgatcacagtcccgcggtttgtcagggggcccaccttctagatgaccccttaataaagtgatggccccacagaaaaaa

SEQ ID NO: 441661 - DNA, 1805 bp, Homo sapiens
agccgccattgccgggcctgcctggccaccctgcgcagcggccttgcgtcctctccgggggcggagcgggtcggcgggcctgacagggaacctccctgaccgagcccacgtctccccacggccagagaaatctccggcccggcccgcatcgccagcccccaggcccggaggaacggcccgagcccaggagaaccacatcttcgtcccagccccggaggctcctgtgggcaagatcgtgagccaacgggttcctgaggcccctcctggccaggcagggtttccccgcgcgtttccgaggagccctgcctggccgggcggctggacaaacagtgcacttgccggcggtcccaacccagcaggagaagtggacatgaggttggcaggccctctccgcattgtggtcctagtcgtcagtgtgggtgtcacatggatcgtggtcagcatcctcctgggtgggcctggcagtggctttcctcgcatccagcaactcttcaccagctggagtgcagtggtgcaatctcggttcactgcaacctctacctcctgggttcaagcgattctagtgccccagcctcccgagtagctgagactacaggtccagagagctcggtgactgcagcgccacgggccaggaagtacaagtgtggcctgccccagccgtgtcctgaggagcacctggccttccgcgtggtcagcggggccgccaacgtcattgggcccaagatctgcctcgaggacaagatgctgatgagcagcgtcaaggacaacgtgggccgcgggctgaacatcgccctggtgaacggggtcagcggcgagctcatcgaggcccgggcctttgacatgtgggccggagatgtcaacgacctgttgaagtttattcggccactgcacgaaggcaccctggtgttcgtggcatcctacgacgacccagccaccaagatgaatgaagagaccagaaagctcttcagtgagctgggcagcaggaacgccaaggagctggccttccgggacagctgggtgtttgtcggggccaagggtgtgcagaacaagagcccctttgagcagcacgtgaagaacagtaagcacagcaacaagtacgaaggctggcccgaggcgctggagatggaaggctgtatcccgcggagaagcacggccagctagcacggccagtgccaggaccgggccgagggaggccagaccaagggaggcacgcgcgctgccgggcggacagaggctgaggctcacaccccacacccgggcaggagcgctccctggccccaacacatcggggctccgaggcagtgaccagaacgtggtctcaaggtggtgggggctatgggggctgcagggggtagccctgccgcactttgtcacgggagcccagggtacccgcctccttttcgtaacactgttccccccggtcagcccatctagccctgtcctccattcctcacgccatctccatccccatcttgagtcctggaacggccctgggtgcctgcccctcactgtgcaactctgggagcagcccggcaggttggggcgtcttccagaacctctcccttctggagccactctgcactgcgggctaaacatgtttccagtgtgattccttccagtgagccaaacccggtggctgcttcatgagcctgactgcctctcgcctgctctcagcaggaagggacccctggagcaggctggcccggggtggtgaagtagctggagcccgatcacagtcccgcggtttgtcagggggcccaccttctagatgaccccttaataaagtgatggccccacagaaaaaa

SEQ ID NO: 441662 - DNA, 1731 bp, Homo sapiens
agccgccattgccgggcctgcctggccaccctgcgcagcggccttgcgtcctctccgggggcggagcgggtcggcgggcctgacagggaacctccctgaccgagcccacgtctccccacggccagagaaatctccggcccggcccgcatcgccagcccccaggcccggaggaacggcccgagcccaggagaaccacatcttcgtcccagcccctgacccccacccaaacctgtccttccgctttgcccccaaacagtgcacttgccggcggtcccaacccagcaggagaagtggacatgaggttggcaggccctctccgcattgtggtcctagtcgtcagtgtgggtgtcacatggatcgtggtcagcatcctcctgggtgggcctggcagtggctttcctcgcatccagcaactcttcaccagctggagtgcagtggtgcaatctcggttcactgcaacctctacctcctgggttcaagcgattctagtgccccagcctcccgagtagctgagactacaggtccagagagctcggtgactgcagcgccacgggccaggaagtacaagtgtggcctgccccagccgtgtcctgaggagcacctggccttccgcgtggtcagcggggccgccaacgtcattgggcccaagatctgcctcgaggacaagatgctgatgagcagcgtcaaggacaacgtgggccgcgggctgaacatcgccctggtgaacggggtcagcggcgagctcatcgaggcccgggcctttgacatgtgggccggagatgtcaacgacctgttgaagtttattcggccactgcacgaaggcaccctggtgttcgtggcatcctacgacgacccagccaccaagatgaatgaagagaccagaaagctcttcagtgagctgggcagcaggaacgccaaggagctggccttccgggacagctgggtgtttgtcggggccaagggtgtgcagaacaagagcccctttgagcagcacgtgaagaacagtaagcacagcaacaagtacgaaggctggcccgaggcgctggagatggaaggctgtatcccgcggagaagcacggccagctagcacggccagtgccaggaccgggccgagggaggccagaccaagggaggcacgcgcgctgccgggcggacagaggctgaggctcacaccccacacccgggcaggagcgctccctggccccaacacatcggggctccgaggcagtgaccagaacgtggtctcaaggtggtgggggctatgggggctgcagggggtagccctgccgcactttgtcacgggagcccagggtacccgcctccttttcgtaacactgttccccccggtcagcccatctagccctgtcctccattcctcacgccatctccatccccatcttgagtcctggaacggccctgggtgcctgcccctcactgtgcaactctgggagcagcccggcaggttggggcgtcttccagaacctctcccttctggagccactctgcactgcgggctaaacatgtttccagtgtgattccttccagtgagccaaacccggtggctgcttcatgagcctgactgcctctcgcctgctctcagcaggaagggacccctggagcaggctggcccggggtggtgaagtagctggagcccgatcacagtcccgcggtttgtcagggggcccaccttctagatgaccccttaataaagtgatggccccacagaaaaaa

SEQ ID NO: 441663 - DNA, 1593 bp, Homo sapiens
agccgccattgccgggcctgcctggccaccctgcgcagcggccttgcgtcctctccgggggcggagcgggtcggcgggcctgacagggaacctccctgaccgagcccacgtctccccacggccagagaaatctccggcccggcccgcatcgccagcccccaggcccggaggaacggcccgagcccaggagaaccacatcttcgtcccagccccggaggctcctgtgggcaagatcgtgagccaacgggttcctgaggcccctcctggccaggcagggtttccccgcgcgtttccgaggagccctgcctggccgggcggctggacaaacagtgcacttgccggcggtcccaacccagcaggagaagtggacatgaggttggcaggtccagagagctcggtgactgcagcgccacgggccaggaagtacaagtgtggcctgccccagccgtgtcctgaggagcacctggccttccgcgtggtcagcggggccgccaacgtcattgggcccaagatctgcctcgaggacaagatgctgatgagcagcgtcaaggacaacgtgggccgcgggctgaacatcgccctggtgaacggggtcagcggcgagctcatcgaggcccgggcctttgacatgtgggccggagatgtcaacgacctgttgaagtttattcggccactgcacgaaggcaccctggtgttcgtggcatcctacgacgacccagccaccaagatgaatgaagagaccagaaagctcttcagtgagctgggcagcaggaacgccaaggagctggccttccgggacagctgggtgtttgtcggggccaagggtgtgcagaacaagagcccctttgagcagcacgtgaagaacagtaagcacagcaacaagtacgaaggctggcccgaggcgctggagatggaaggctgtatcccgcggagaagcacggccagctagcacggccagtgccaggaccgggccgagggaggccagaccaagggaggcacgcgcgctgccgggcggacagaggctgaggctcacaccccacacccgggcaggagcgctccctggccccaacacatcggggctccgaggcagtgaccagaacgtggtctcaaggtggtgggggctatgggggctgcagggggtagccctgccgcactttgtcacgggagcccagggtacccgcctccttttcgtaacactgttccccccggtcagcccatctagccctgtcctccattcctcacgccatctccatccccatcttgagtcctggaacggccctgggtgcctgcccctcactgtgcaactctgggagcagcccggcaggttggggcgtcttccagaacctctcccttctggagccactctgcactgcgggctaaacatgtttccagtgtgattccttccagtgagccaaacccggtggctgcttcatgagcctgactgcctctcgcctgctctcagcaggaagggacccctggagcaggctggcccggggtggtgaagtagctggagcccgatcacagtcccgcggtttgtcagggggcccaccttctagatgaccccttaataaagtgatggccccacagaaaaaa

SEQ ID NO: 441664 - DNA, 2220 bp, Homo sapiens
agccgccattgccgggcctgcctggccaccctgcgcagcggccttgcgtcctctccgggggcggagcgggtcggcgggcctgacagggaacctccctgaccgagcccacgtctccccacggccagagaaatctccggcccggcccgcatcgccagcccccaggcccggaggaacggcccgagcccaggagaaccacatcttcgtcccagccccggaggctcctgtgggcaagatcgtgagccaacgggttcctgaggcccctcctggccaggcagggtttccccgcgcgtttccgaggagccctgcctggccgggcggctggacaaacaggtcgtagcaccgatcgcgcccgcccccagcaggggtcccgcacaggcttgcccctgacccccacccaaacctgtccttccgctttgcccccaaacagtgcacttgccggcggtcccaacccagcaggagaagtggacatgaggttggcaggccctctccgcattgtggtcctagtcgtcagtgtgggtgtcacatggatcgtggtcagcatcctcctgggtgggcctggcagtggctttcctcgcatccagcaactcttcaccagtccagagagctcggtgactgcagcgccacgggccaggaagtacaagtgtggcctgccccagccgtgtcctgaggagcacctggccttccgcgtggtcagcggggccgccaacgtcattgggcccaagatctgcctcgaggacaagatgctgatgagcagcgtcaaggacaacgtgggccgcgggctgaacatcgccctggtgaacggggtcagcggcgagctcatcgaggcccgggcctttgacatgtgggccggagatgtcaacgacctgttgaagtttattcggccactgcacgaaggcaccctggtgttcgtggcatcctacgacgacccagccaccaagatgaatgaagagaccagaaagctcttcagtgagctgggcagcaggaacgccaaggagctggccttccgggacagctgggtgtttgtcggggccaagggtgtgcagaacaagagcccctttgagcagcacgtgaagaacagtaagcacagcaacaagtacgaaggctggcccgaggcgctggagatggaaggctgtatcccgcggagaagcacggccagctagcacggccagtgccaggaccgggccgagggaggccagaccaagggaggcacgcgcgctgccgggcggacagaggctgaggctcacaccccacacccgggcaggagcgctccctggccccaacacatcggggctccgaggcagtgaccagaacgtggtctcaaggtggtgggggctatgggggctgcagggggtagccctgccgcactttgtcacgggagcccagggtacccgcctccttttcgtaacactgttccccccggtcagcccatctagccctgtcctccattcctcacgccatctccatccccatcttgagtcctggaacggccctgggtgcctgcccctcactgtgcaactctgggagcagcccggcaggttggggcgtcttccagaacctctcccttctggagccactctgcactgcgggctaaacatgtttccagtgtgattccttccagtgagccaaacccggtggctgcttcatgagcctgactgcctctcgcctgctctcagcaggaagggacccctggagcaggctggcccggggtggtgaagtagctggagcccgatcacagtcccgcggtttgtcagggggcccaccttctagatgaccccttaataaagtgatggccccacagaaaaaaaaaaaaaaaaaaaaaaaaaaaaaaaaaaaaaaaaacaaaaaaagggcggggcggcccaataaaatacacacaccgaaggaggccacacaatatcacagaagcaccgccggaatagatgagaacaacggggagcccaaaaaggccacaagaaaaaaacacgaaacacacgcccgagagcataaccagcacacgagcgacggcaacaccgcaagaccgagggacccaccgcggacacaaacccgcaccccgtcgcagggggacacaccaacgcggcacacacaacaccacaaagggcacgaagccccgaagcgcccacaccaacaaaaccaacgcccacacagaggagaacaacacagcacacacagagaggaaaagaaaaagcgacaaaagccacaaacgacgaacaaaccataacc

SEQ ID NO: 441665 - DNA, 1943 bp, Homo sapiens
agccgccattgccgggcctgcctggccaccctgcgcagcggccttgcgtcctctccgggggcggagcgggtcggcgggcctgacagggaacctccctgaccgagcccacgtctccccacggccagagaaatctccggcccggcccgcatcgccagcccccaggcccggaggaacggcccgagcccaggagaaccacatcttcgtcccagccccggaggctcctgtgggcaagatcgtgagccaacgggttcctgaggcccctcctggccaggcagggtttccccgcgcgtttccgaggagccctgcctggccgggcggctggacaaacaggtcgtagcaccgatcgcgcccgcccccagcaggggtcccgcacaggcttgcccctgacccccacccaaacctgtccttccgctttgcccccaaacagtgcacttgccggcggtcccaacccagcaggagaagtggacatgaggttggcaggccctctccgcattgtggtcctagtcgtcagtgtgggtgtcacatggatcgtggtcagcatcctcctgggtgggcctggcagtggctttcctcgcatccagcaactcttcaccagtccagagagctcggtgactgcagcgccacgggccaggaagtacaagtgtggcctgccccagccgtgtcctgaggagcacctggccttccgcgtggtcagcggggccgccaacgtcattgggcccaagatctgcctcgaggacaagatgctgatgagcagcgtcaaggacaacgtgggccgcgggctgaacatcgccctggtgaacggggtcagcggcgagctcatcgaggcccgggcctttgacatgtgggccggagatgtcaacgacctgttgaagtttattcggccactgcacgaaggcaccctggtgttcgtggcatcctacgacgacccagccaccaagatgaatgaagagaccagaaagctcttcagtgagctgggcagcaggaacgccaaggagctggccttccgggacagctgggtgtttgtcggggccaagggtgtgcagaacaagagcccctttgagcagcacgtgaagaacagtaagcacagcaacaagtacgaaggctggcccgaggcgctggagatggaaggctgtatcccgcggagaagcacggccagctagcacggccagtgccaggaccgggccgagggaggccagaccaagggaggcacgcgcgctgccgggcggacagaggctgaggctcacaccccacacccgggcaggagcgctccctggccccaacacatcggggctccgaggcagtgaccagaacgtggtctcaaggtggtgggggctatgggggctgcagggggtagccctgccgcactttgtcacgggagcccagggtacccgcctccttttcgtaacactgttccccccggtcagcccatctagccctgtcctccattcctcacgccatctccatccccatcttgagtcctggaacggccctgggtgcctgcccctcactgtgcaactctgggagcagcccggcaggttggggcgtcttccagaacctctcccttctggagccactctgcactgcgggctaaacatgtttccagtgtgattccttccagtgagccaaacccggtggctgcttcatgagcctgactgcctctcgcctgctctcagcaggaagggacccctggagcaggctggcccggggtggtgaagtagctggagcccgatcacagtcccgcggtttgtcagggggcccaccttctagatgaccccttaataaagtgatggccccacagaaaaaacagaagaaatgccttcagatgctgttgtcagtgcggagtcagaggtggcggtgtcctctggggtgcgggaggacagattccagagtcttaaccaacctgctcccacagcccgagcagacagccttttgtctccagggct

SEQ ID NO: 441666 - DNA, 1529 bp, Homo sapiens
agccgccattgccgggcctgcctggccaccctgcgcagcggccttgcgtcctctccgggggcggagcgggtcggcgggcctgacagggaacctccctgaccgagcccacgtctccccacggccagagaaatctccggcccggcccgcatcgccagcccccaggcccggaggaacggcccgagcccaggagaaccacatcttcgtcccagccccggaggctcctgtgggcaagatcgtgagccaacgggttcctgaggcccctcctggccaggcagggtttccccgcgcgtttccgaggagccctgcctggccgggcggctggacaaacaggtcgtagcaccgatcgcgcccgcccccagcaggggtcccgcacaggcttgcccctgacccccacccaaacctgtccttccgctttgcccccaaacagtgcacttgccggcggtcccaacccagcaggagaagtggacatgaggttggcaggccctctccgcattgtggtcctagtcgtcagtgtgggtgtcacatggatcgtggtcagcatcctcctgggtgggcctggcagtggctttcctcgcatccagcaactcttcaccagtccagagagctcggtgactgcagcgccacgggccaggaagtacaagtgtggcctgccccagccgtgtcctgaggagcacctggccttccgcgtggtcagcggggccgccaacgtcattgggcccaagatctgcctcgaggacaagatgctgatgagcagcgtcaaggacaacgtgggccgcgggctgaacatcgccctggtgaacggggtcagcggcgagctcatcgaggcccgggcctttgacatgtgggccggagatgtcaacgacctgttgaagtttattcggccactgcacgaaggcaccctggtgttcgtggcatcctacgacgacccagccaccaagatgaatgaagagaccagaaagctcttcagtgagctgggcagcaggaacgccaaggagctggccttccgggacagctgggtgtttgtcggggccaagggtgtgcagaacaagagcccctttgagcagggctgcagggggtagccctgccgcactttgtcacgggagcccagggtacccgcctccttttcgtaacactgttccccccggtcagcccatctagccctgtcctccattcctcacgccatctccatccccatcttgagtcctggaacggccctgggtgcctgcccctcactgtgcaactctgggagcagcccggcaggttggggcgtcttccagaacctctcccttctggagccactctgcactgcgggctaaacatgtttccagtgtgattccttccagtgagccaaacccggtggctgcttcatgagcctgactgcctctcgcctgctctcagcaggaagggacccctggagcaggctggcccggggtggtgaagtagctggagcccgatcacagtcccgcggtttgtcagggggcccaccttctagatgaccccttaataaagtgatggccccacagaaaaaa

SEQ ID NO: 441667 - DNA, 1770 bp, Homo sapiens
agccgccattgccgggcctgcctggccaccctgcgcagcggccttgcgtcctctccgggggcggagcgggtcggcgggcctgacagggaacctccctgaccgagcccacgtctccccacggccagagaaatctccggcccggcccgcatcgccagcccccaggcccggaggaacggcccgagcccaggagaaccacatcttcgtcccagccccggaggctcctgtgggcaagatcgtgagccaacgggttcctgaggcccctcctggccaggcagggtttccccgcgcgtttccgaggagccctgcctggccgggcggctggacaaacaggtcgtagcaccgatcgcgcccgcccccagcaggggtcccgcacaggcttgcccctgacccccacccaaacctgtccttccgctttgcccccaaacagtgcacttgccggcggtcccaacccagcaggagaagtggacatgaggttggcaggccctctccgcattgtggtcctagtcgtcagtgtgggtgtcacatggatcgtggtcagcatcctcctgggtgggcctggcagtggctttcctcgcatccagcaactcttcaccagtccagagagctcggtgactgcagcgccacgggccaggaagtacaagtgtggcctgccccagccgtgtcctgaggagcacctggccttccgcgtggtcagcggggccgccaacgtcattgggcccaagatctgcctcgaggacaagatgacgagaagaggcaacagacaaggaatcagacagagagaccacaaacggaagagcagacttgcgcaagagagacgggagcagggggatagcggcagacaaggacccgaggagcctttgacatgtgggccggagatgtcaacgaccttggttgaagtttattcggccactggcacgaaggcaccgctgtgtgttccggtggagcatatccgattgcggagcttaacctcaatggcatcgcaagatatagaaagaaagaaagtagctcaaaataacaccgactacgaagtcttgggtgcatactaagagatacatcccggaaggaatctgaacctatctctgttcaagcaaaattaataagacagggagccgaaagatgaatattcatgaagcgataatagtcctcctgagatatcgagagatcgaaaaaaaaccatgaaaggcaacagagcaaacaaaatatcaaattactgagattccagaaagcactaaaagatatgggaagcgaggaaggccggcaggaagaaatcatcggggccaggcgaatcggccaaccaaattttcggaggtcatgctatagctggaatgaactaaactcggaggaccctataataataattcttggaccacggctaactctaaatccaaaacgggagtaggggacaaaaggattactggcggaccgcctgaatgccgattgagcgaattgagcggcgtcgccaaaaccctccaaaacgatcattacatttttccactctatggggcgattataccgaaaaaaaccggaatttcttcctattgagaaagcagtttaggctggaaagaaaagccgaactattatagagaaattccccaagcacgggcgacggaaattacaccaaaaattcccaaaaagaacctctgccatccgattatcgggaggggctccaaagggcccgcccccaggggcgacctaacgaaaccgccctgaggaccgactcatggcccagcatcgggcgagcaacaaagctgccattacgaacgggcccag

SEQ ID NO: 441668 - DNA, 734 bp, Homo sapiens
  misc_feature (9)..(9): n is a, c, g, or t
  misc_feature (69)..(69): n is a, c, g, or t
  misc_feature (94)..(94): n is a, c, g, or t
  misc_feature (96)..(96): n is a, c, g, or t
  misc_feature (98)..(98): n is a, c, g, or t
  misc_feature (114)..(114): n is a, c, g, or t
  misc_feature (117)..(117): n is a, c, g, or t
  misc_feature (128)..(128): n is a, c, g, or t
  misc_feature (166)..(166): n is a, c, g, or t
  misc_feature (169)..(169): n is a, c, g, or t
  misc_feature (182)..(182): n is a, c, g, or t
  misc_feature (189)..(189): n is a, c, g, or t
  misc_feature (191)..(191): n is a, c, g, or t
  misc_feature (199)..(199): n is a, c, g, or t
  misc_feature (204)..(204): n is a, c, g, or t
  misc_feature (211)..(211): n is a, c, g, or t
  misc_feature (214)..(214): n is a, c, g, or t
  misc_feature (250)..(250): n is a, c, g, or t
  misc_feature (263)..(263): n is a, c, g, or t
  misc_feature (270)..(271): n is a, c, g, or t
  misc_feature (275)..(275): n is a, c, g, or t
  misc_feature (283)..(283): n is a, c, g, or t
  misc_feature (288)..(288): n is a, c, g, or t
  misc_feature (297)..(299): n is a, c, g, or t
  misc_feature (301)..(301): n is a, c, g, or t
  misc_feature (307)..(307): n is a, c, g, or t
  misc_feature (311)..(311): n is a, c, g, or t
  misc_feature (315)..(316): n is a, c, g, or t
  misc_feature (331)..(331): n is a, c, g, or t
  misc_feature (333)..(333): n is a, c, g, or t
  misc_feature (340)..(340): n is a, c, g, or t
  misc_feature (342)..(342): n is a, c, g, or t
  misc_feature (345)..(346): n is a, c, g, or t
  misc_feature (348)..(350): n is a, c, g, or t
taagcaacnggcccagatgcccaaggcacacggggcacgagggggaggccccaggacacaaaggggagngccacggcgcagcttgaccggagcngnancaggaggcctgtaggnctncacaacctccnacaaccccgggccaggaagcgcctcccctgcgcccccnaancacaatccggganctcccgnangccagtgnacacngaaacgntgnctctccacaggctgggtggggggctcatggggtttnttatggtggttanctctttnntctntatttttntttantgtgtgatnnntntatggnttanctcnntcttctttttttttnanatttttncnctnntnnntcagcccatctagccctgtcctccattcctcacgccatctccatccccatcttgagtcctggaacggccctgggtgcctgcccctcactgtgcaactctgggagcagcccggcaggttggggcgtcttccagaacctctcccttctggagccactctgcactgcgggctaaacatgtttccagtgtgattccttccagtgagccaaacccggtggctgcttcatgagcctgactgcctctcgcctgctctcagcaggaagggacccctggagcaggctggcccggggtggtgaagtagctggagcccgatcacagtcccgcggtttgtcagggggcccaccttctagatgaccccttaataaagtgatggccccacagaaaaaa

SEQ ID NO: 441669 - DNA, 624 bp, Homo sapiens
caacgtgggccgcgggctgaacatcgccctggtgaacggtgaggcccctggctgagcgtggcctgccgccctccttccctgctccctccccaggaggcctctgggtgtttgccctcccttcccctcccattcaagatctcccagggaggcctgggaaggagtctgtgcaagcgcaaggctccacagaggagtgacccaatgaacaaaaaagcatgatggcaataaagaactagggaaggttctgggaggttgagggtgcttcatggagagcccccggagggcctcaaatgccagacagaggcaccacggcttggggtgggatgcagctgcctgaacaaatggatgaatattgggggactgtttgaaagcgtccagaagggctgccccccacccccggtgctacccgcctgccgtgccctgaggctggcctggcttacccagcagggcccctccctcctgacacaggggtcagcggcgagctcatcgaggcccgggcctttgacatgtgggccggaggtgagttgcagcgcagcgtcttgcattttgactgcagcaaaatgacctgggcagcttcccctgagacactgctctctctgtctgtacttggagcttctcagtcacctc

SEQ ID NO: 441670 - DNA, 1804 bp, Homo sapiens
agccgccattgccgggcctgcctggccaccctgcgcagcggccttgcgtcctctccgggggcggagcgggtcggcgggcctgacagggaacctccctgaccgagcccacgtctccccacggccagagaaatctccggcccggcccgcatcgccagcccccaggcccggaggaacggcccgagcccaggagaaccacatcttcgtcccagccccggaggctcctgtgggcaagatcgtgagccaacgggttcctgaggcccctcctggccaggcagggtttccccgcgcgtttccgaggagccctgcctggccgggcggctggacaaacaggtcgtagcaccgatcgcgcccgcccccagcaggggtcccgcacaggcttgcccctgacccccacccaaacctgtccttccgctttgcccccaaacagtgcacttgccggcggtcccaacccagcaggagaagtggacatgaggttggcaggccctctccgcattgtggtcctagtcgtcagtgtgggtgtcacatggatcgtggtcagcatcctcctgggtgggcctggcagtggctttcctcgcatccagcaactcttcaccagtccagagagctcggtgactgcagcgccacgggccaggaagtacaagtgtggcctgccccagccgtgtcctgaggagcacctggccttccgcgtggtcagcggggccgccaacgtcattgggcccaagatctgcctcgaggacaagatgctgatgagcagcgtcaaggacaacgtgggccgcgggctgaacatcgccctggtgaacggggtcagcggcgagctcatcgaggcccgggcctttgacatgtgggccggagatgtcaacgacctgttgaagtttattcggccactgcacgaaggcaccctggtgttcgtggcatcctacgacgacccagccaccaagatgaatgaagagaccagaaagctcttcagtgagctgggcagcaggaacgccaaggagctggccttccgggacagctgggtgtttgtcggggccaagggtgtgcagaacaagagcccctttgagcagcacgtgaagaacagtaagcacagcaacaagtacgaaggctggcccgaggcgctggagatggaaggctgtatcccgcggagaagcacggccagctagcacggccagtgccaggaccgggccgagggaggccagaccaagggaggcacgcgcgctgccgggcggacagaggctgaggctcacaccccacacccgggcaggagcgctccctggccccaacacatcggggctccgaggcagtgaccagaacgtggtctcaaggtggtgggggctatgggggctgcagggggtagccctgccgcactttgtcacgggagcccagggtacccgcctccttttcgtaacactgttccccccggtcagcccatctagccctgtcctccattcctcacgccatctccatccccatcttgagtcctggaacggccctgggtgcctgcccctcactgtgcaactctgggagcagcccggcaggttggggcgtcttccagaacctctcccttctggagccactctgcactgcgggctaaacatgtttccagtgtgattccttccagtgagccaaacccggtggctgcttcatgagcctgactgcctctcgcctgctctcagcaggaagggacccctggagcaggctggcccggggtggtgaagtagctggagcccgatcacagtcccgcggtttgtcagggggcccaccttctagatgaccccttaataaagtgatggccccacagaaaaaa

SEQ ID NO: 441671 - DNA, 2041 bp, Homo sapiens
agccgccattgccgggcctgcctggccaccctgcgcagcggccttgcgtcctctccgggggcggagcgggtcggcgggcctgacagggaacctccctgaccgagcccacgtctccccacggccagagaaatctccggcccggcccgcatcgccagcccccaggcccggaggaacggcccgagcccaggagaaccacatcttcgtcccagccccggaggctcctgtgggcaagatcgtgagccaacgggttcctgaggcccctcctggccaggcagggtttccccgcgcgtttccgaggagccctgcctggccgggcggctggacaaacaggtcgtagcaccgatcgcgcccgcccccagcaggggtcccgcacaggcttgcccctgacccccacccaaacctgtccttccgctttgcccccaaacagtgcacttgccggcggtcccaacccagcaggagaagtggacatgaggttggcaggccctctccgcattgtggtcctagtcgtcagtgtgggtgtcacatggatcgtggtcagcatcctcctgggtgggcctggcagtggctttcctcgcatccagcaactcttcaccagctggagtgcagtggtgcaatctcggttcactgcaacctctacctcctgggttcaagcgattctagtgccccagcctcccgagtagctgagactacaggtccagagagctcggtgactgcagcgccacgggccaggaagtacaagtgtggcctgccccagccgtgtcctgaggagcacctggccttccgcgtggtcagcggggccgccaacgtcattgggcccaagatctgcctcgaggacaagatgctgatgagcagcgtcaaggacaacgtgggccgcgggctgaacatcgccctggtgaacggggtcagcggcgagctcatcgaggcccgggcctttgacatgtgggccggagatgtcaacgacctgttgaagtttattcggccactgcacgaaggcaccctggtgttcgtggcatcctacgacgacccagccaccaagatgaatgaagagaccagaaagctcttcagtgagctgggcagcaggaacgccaaggagctggccttccgggacagctgggtgtttgtcggggccaagggtgtgcagaacaagagcccctttgagcagcacgtgaagaacagtaagcacagcaacaagtacgaaggctggcccgaggcgctggagatggaaggctgtatcccgcggagaagcacggccagctagcacggccagtgccaggaccgggccgagggaggccagaccaagggaggcacgcgcgctgccgggcggacagaggctgaggctcacaccccacacccgggcaggagcgctccctggccccaacacatcggggctccgaggcagtgaccagaacgtggtctcaaggtggtgggggctatgggggctgcagggggtagccctgccgcactttgtcacgggagcccagggtacccgcctccttttcgtaacactgttccccccggtcagcccatctagccctgtcctccattcctcacgccatctccatccccatcttgagtcctggaacggccctgggtgcctgcccctcactgtgcaactctgggagcagcccggcaggttggggcgtcttccagaacctctcccttctggagccactctgcactgcgggctaaacatgtttccagtgtgattccttccagtgagccaaacccggtggctgcttcatgagcctgactgcctctcgcctgctctcagcaggaagggacccctggagcaggctggcccggggtggtgaagtagctggagcccgatcacagtcccgcggtttgtcagggggcccaccttctagatgaccccttaataaagtgatggccccacagaaaaaacagaagaaatgccttcagatgctgttgtcagtgcggagtcagaggtggcggtgtcctctggggtgcgggaggacagattccagagtcttaaccaacctgctcccacagcccgagcagacagccttttgtctccagggct

SEQ ID NO: 441672 - DNA, 2018 bp, Homo sapiens
agccgccattgccgggcctgcctggccaccctgcgcagcggccttgcgtcctctccgggggcggagcgggtcggcgggcctgacagggaacctccctgaccgagcccacgtctccccacggccagagaaatctccggcccggcccgcatcgccagcccccaggcccggaggaacggcccgagcccaggagaaccacatcttcgtcccagccccggaggctcctgtgggcaagatcgtgagccaacgggttcctgaggcccctcctggccaggcagggtttccccgcgcgtttccgaggagccctgcctggccgggcggctggacaaacaggtcgtagcaccgatcgcgcccgcccccagcaggggtcccgcacaggcttgcccctgacccccacccaaacctgtccttccgctttgcccccaaacagtgcacttgccggcggtcccaacccagcaggagaagtggacatgaggttggcaggccctctccgcattgtggtcctagtcgtcagtgtgggtgtcacatggatcgtggtcagcatcctcctgggtgggcctggcagtggctttcctcgcatccagcaactcttcaccagtccagagagctcggtgactgcagtaacagaaaatccttctgtcttgggtccctgtggcctcaccagtaggacacagagtatggaagtgtccccagcctcggcctgagccacatccccctacttgtgtcctgctctgcggtcacttgttctaccatgtgtgctggtcctgacctccccttcagatctcaggtgacctcagggccaggcccatggataacacctgctatccctgcccagcgccacgggccaggaagtacaagtgtggcctgccccagccgtgtcctgaggagcacctggccttccgcgtggtcagcggggccgccaacgtcattgggcccaagatctgcctcgaggacaagatgctgatgagcagcgtcaaggacaacgtgggccgcgggctgaacatcgccctggtgaacggggtcagcggcgagctcatcgaggcccgggcctttgacatgtgggccggagatgtcaacgacctgttgaagtttattcggccactgcacgaaggcaccctggtgttcgtggcatcctacgacgacccagccaccaagatgaatgaagagaccagaaagctcttcagtgagctgggcagcaggaacgccaaggagctggccttccgggacagctgggtgtttgtcggggccaagggtgtgcagaacaagagcccctttgagcagcacgtgaagaacagtaagcacagcaacaagtacgaaggctggcccgaggcgctggagatggaaggctgtatcccgcggagaagcacggccagctagcacggccagtgccaggaccgggccgagggaggccagaccaagggaggcacgcgcgctgccgggcggacagaggctgaggctcacaccccacacccgggcaggagcgctccctggccccaacacatcggggctccgaggcagtgaccagaacgtggtctcaaggtggtgggggctatgggggctgcagggggtagccctgccgcactttgtcacgggagcccagggtacccgcctccttttcgtaacactgttccccccggtcagcccatctagccctgtcctccattcctcacgccatctccatccccatcttgagtcctggaacggccctgggtgcctgcccctcactgtgcaactctgggagcagcccggcaggttggggcgtcttccagaacctctcccttctggagccactctgcactgcgggctaaacatgtttccagtgtgattccttccagtgagccaaacccggtggctgcttcatgagcctgactgcctctcgcctgctctcagcaggaagggacccctggagcaggctggcccggggtggtgaagtagctggagcccgatcacagtcccgcggtttgtcagggggcccaccttctagatgaccccttaataaagtgatggccccacagaaaaaa

SEQ ID NO: 441673 - DNA, 1825 bp, Homo sapiens
agccgccattgccgggcctgcctggccaccctgcgcagcggccttgcgtcctctccgggggcggagcgggtcggcgggcctgacagggaacctccctgaccgagcccacgtctccccacggccagagaaatctccggcccggcccgcatcgccagcccccaggcccggaggaacggcccgagcccaggagaaccacatcttcgtcccagccccggaggctcctgtgggcaagatcgtgagccaacgggttcctgaggcccctcctggccaggcagggtttccccgcgcgtttccgaggagccctgcctggccgggcggctggacaaacaggtcgtagcaccgatcgcgcccgcccccagcaggggtcccgcacaggcttgcccctgacccccacccaaacctgtccttccgctttgcccccaaacagtgcacttgccggcggtcccaacccagcaggagaagtggacatgaggttggcaggccctctccgcattgtggtcctagtcgtcagtgtgggtgtcacatggatcgtggtcagcatcctcctgggtgggcctggcagtggctttcctcgcatccagcaactcttcaccagtccagagagctcggtgactgcagcgccacgggccaggaagtacaagtgtggcctgccccagccgtgtcctgaggagcacctggccttccgcgtggtcagcggggccgccaacgtcattgggcccaagatctgcctcgaggacaagatgctgatgagcagcgtcaaggacaacgtgggccgcgggctgaacatcgccctggtgaacgggcccctccctcctgacacaggggtcagcggcgagctcatcgaggcccgggcctttgacatgtgggccggagatgtcaacgacctgttgaagtttattcggccactgcacgaaggcaccctggtgttcgtggcatcctacgacgacccagccaccaagatgaatgaagagaccagaaagctcttcagtgagctgggcagcaggaacgccaaggagctggccttccgggacagctgggtgtttgtcggggccaagggtgtgcagaacaagagcccctttgagcagcacgtgaagaacagtaagcacagcaacaagtacgaaggctggcccgaggcgctggagatggaaggctgtatcccgcggagaagcacggccagctagcacggccagtgccaggaccgggccgagggaggccagaccaagggaggcacgcgcgctgccgggcggacagaggctgaggctcacaccccacacccgggcaggagcgctccctggccccaacacatcggggctccgaggcagtgaccagaacgtggtctcaaggtggtgggggctatgggggctgcagggggtagccctgccgcactttgtcacgggagcccagggtacccgcctccttttcgtaacactgttccccccggtcagcccatctagccctgtcctccattcctcacgccatctccatccccatcttgagtcctggaacggccctgggtgcctgcccctcactgtgcaactctgggagcagcccggcaggttggggcgtcttccagaacctctcccttctggagccactctgcactgcgggctaaacatgtttccagtgtgattccttccagtgagccaaacccggtggctgcttcatgagcctgactgcctctcgcctgctctcagcaggaagggacccctggagcaggctggcccggggtggtgaagtagctggagcccgatcacagtcccgcggtttgtcagggggcccaccttctagatgaccccttaataaagtgatggccccacagaaaaaa

SEQ ID NO: 441674 - DNA, 1991 bp, Homo sapiens
caacagaaatggattctctccccattctgaaagccagaagtctgaaatcaaagtgtcagcagggcgttactcaccctgaaagttctacaggagggtccttcctgacctccccaggttccagtggccccaggcataccttggcctctggctgtgtcactcctgtctcttcctccactgtaccatggctgtcttccctctgtgtgtctttgtcacttctgttcttataaggacatcagtcatgttgcattaaggacccaacctactccagtatgaccccatctgaactgcaaaggccctatttgcaaacatcacattctgaagtaccacagattagaacttcagcataccttgaggggacagaattcaacccataatagaagccatcctgctccagtcctcccaaccaacccccatcaaaatcgggagacaggctgcaccccctgccacactaccccctgccacactgcctttgctcaggttggcctcatccatgcagctagacccccagcctgacttacttcacccctgctttgttcctggctgtgcagtggcccaggccagccctcagcatcctttcttttctcccaccagtaacagaaaatccttctgtcttgggtccctgtggcctcaccagtaggacacagagtatggaagtgtccccagcctcggcctgagccacatccccctacttgtgtcctgctctgcggtcacttgttctaccatgtgtgctggtcctgacctccccttcagatctcaggtgacctcagggccaggcccatggataacacctgctatccctgcccagcgccacgggccaggaagtacaagtgtggcctgccccagccgtgtcctgaggagcacctggccttccgcgtggtcagcggggccgccaacgtcattgggcccaagatctgcctcgaggacaagatgctgatgagcagcgtcaaggacaacgtgggccgcgggctgaacatcgccctggtgaacggggtcagcggcgagctcatcgaggcccgggcctttgacatgtgggccggagatgtcaacgacctgttgaagtttattcggccactgcacgaaggcaccctggtgttcgtggcatcctacgacgacccagccaccaagatgaatgaagagaccagaaagctcttcagtgagctgggcagcaggaacgccaaggagctggccttccgggacagctgggtgtttgtcggggccaagggtgtgcagaacaagagcccctttgagcagcacgtgaagaacagtaagcacagcaacaagtacgaaggctggcccgaggcgctggagatggaaggctgtatcccgcggagaagcacggccagctagcacggccagtgccaggaccgggccgagggaggccagaccaagggaggcacgcgcgctgccgggcggacagaggctgaggctcacaccccacacccgggcaggagcgctccctggccccaacacatcggggctccgaggcagtgaccagaacgtggtctcaaggtggtgggggctatgggggctgcagggggtagccctgccgcactttgtcacgggagcccagggtacccgcctccttttcgtaacactgttccccccggtcagcccatctagccctgtcctccattcctcacgccatctccatccccatcttgagtcctggaacggccctgggtgcctgcccctcactgtgcaactctgggagcagcccggcaggttggggcgtcttccagaacctctcccttctggagccactctgcactgcgggctaaacatgtttccagtgtgattccttccagtgagccaaacccggtggctgcttcatgagcctgactgcctctcgcctgctctcagcaggaagggacccctggagcaggctggcccggggtggtgaagtagctggagcccgatcacagtcccgcggtttgtcagggggcccaccttctagatgaccccttaataaagtgatggccccacagaaaaaa

SEQ ID NO: 441675 - DNA, 1753 bp, Homo sapiens
agccgccattgccgggcctgcctggccaccctgcgcagcggccttgcgtcctctccgggggcggagcgggtcggcgggcctgacagggaacctccctgaccgagcccacgtctccccacggccagagaaatctccggcccggcccgcatcgccagcccccaggcccggaggaacggcccgagcccaggagaaccacatcttcgtcccagccccggaggctcctgtgggcaagatcgtgagccaacgggttcctgaggcccctcctggccaggcagggtttccccgcgcgtttccgaggagccctgcctggccgggcggctggacaaacaggtcgtagcaccgatcgcgcccgcccccagcaggggtcccgcacaggcttgcccctgacccccacccaaacctgtccttccgctttgcccccaaacagtgcacttgccggcggtcccaacccagcaggagaagtggacatgaggttggcaggccctctccgcattgtggtcctagtcgtcagtgtgggtgtcacatggatcgtggtcagcatcctcctgggtgggcctggcagtggctttcctcgcatccagcaactcttcaccagtccagagagctcggtgactgcagcgccacgggccaggaagtacaagtgtggcctgccccagccgtgtcctgaggagcacctggccttccgcgtggtcagcggggccgccaacgtcattgggcccaagatctgcctcgaggacaagatgctgatgagcagcgtcaaggacaacgtgggccgcgggctgaacatcgccctggtgaacgatgtcaacgacctgttgaagtttattcggccactgcacgaaggcaccctggtgttcgtggcatcctacgacgacccagccaccaagatgaatgaagagaccagaaagctcttcagtgagctgggcagcaggaacgccaaggagctggccttccgggacagctgggtgtttgtcggggccaagggtgtgcagaacaagagcccctttgagcagcacgtgaagaacagtaagcacagcaacaagtacgaaggctggcccgaggcgctggagatggaaggctgtatcccgcggagaagcacggccagctagcacggccagtgccaggaccgggccgagggaggccagaccaagggaggcacgcgcgctgccgggcggacagaggctgaggctcacaccccacacccgggcaggagcgctccctggccccaacacatcggggctccgaggcagtgaccagaacgtggtctcaaggtggtgggggctatgggggctgcagggggtagccctgccgcactttgtcacgggagcccagggtacccgcctccttttcgtaacactgttccccccggtcagcccatctagccctgtcctccattcctcacgccatctccatccccatcttgagtcctggaacggccctgggtgcctgcccctcactgtgcaactctgggagcagcccggcaggttggggcgtcttccagaacctctcccttctggagccactctgcactgcgggctaaacatgtttccagtgtgattccttccagtgagccaaacccggtggctgcttcatgagcctgactgcctctcgcctgctctcagcaggaagggacccctggagcaggctggcccggggtggtgaagtagctggagcccgatcacagtcccgcggtttgtcagggggcccaccttctagatgaccccttaataaagtgatggccccacagaaaaaa

SEQ ID NO: 441676 - DNA, 1851 bp, Homo sapiens
agccgccattgccgggcctgcctggccaccctgcgcagcggccttgcgtcctctccgggggcggagcgggtcggcgggcctgacagggaacctccctgaccgagcccacgtctccccacggccagagaaatctccggcccggcccgcatcgccagcccccaggcccggaggaacggcccgagcccaggagaaccacatcttcgtcccagccccggaggctcctgtgggcaagatcgtgagccaacgggttcctgaggcccctcctggccaggcagggtttccccgcgcgtttccgaggagccctgcctggccgggcggctggacaaacaggtcgtagcaccgatcgcgcccgcccccagcaggggtcccgcacaggcttgcccctgacccccacccaaacctgtccttccgctttgcccccaaacagtgcacttgccggcggtcccaacccagcaggagaagtggacatgaggttggcaggccctctccgcattgtggtcctagtcgtcagtgtgggtgtcacatggatcgtggtcagcatcctcctgggtgggcctggcagtggctttcctcgcatccagcaactcttcaccagctggagtgcagtggtgcaatctcggttcactgcaacctctacctcctgggttcaagcgattctagtgccccagcctcccgagtagctgagactacaggtccagagagctcggtgactgcagcgccacgggccaggaagtacaagtgtggcctgccccagccgtgtcctgaggagcacctggccttccgcgtggtcagcggggccgccaacgtcattgggcccaagatctgcctcgaggacaagatgctgatgagcagcgtcaaggacaacgtgggccgcgggctgaacatcgccctggtgaacgatgtcaacgacctgttgaagtttattcggccactgcacgaaggcaccctggtgttcgtggcatcctacgacgacccagccaccaagatgaatgaagagaccagaaagctcttcagtgagctgggcagcaggaacgccaaggagctggccttccgggacagctgggtgtttgtcggggccaagggtgtgcagaacaagagcccctttgagcagcacgtgaagaacagtaagcacagcaacaagtacgaaggctggcccgaggcgctggagatggaaggctgtatcccgcggagaagcacggccagctagcacggccagtgccaggaccgggccgagggaggccagaccaagggaggcacgcgcgctgccgggcggacagaggctgaggctcacaccccacacccgggcaggagcgctccctggccccaacacatcggggctccgaggcagtgaccagaacgtggtctcaaggtggtgggggctatgggggctgcagggggtagccctgccgcactttgtcacgggagcccagggtacccgcctccttttcgtaacactgttccccccggtcagcccatctagccctgtcctccattcctcacgccatctccatccccatcttgagtcctggaacggccctgggtgcctgcccctcactgtgcaactctgggagcagcccggcaggttggggcgtcttccagaacctctcccttctggagccactctgcactgcgggctaaacatgtttccagtgtgattccttccagtgagccaaacccggtggctgcttcatgagcctgactgcctctcgcctgctctcagcaggaagggacccctggagcaggctggcccggggtggtgaagtagctggagcccgatcacagtcccgcggtttgtcagggggcccaccttctagatgaccccttaataaagtgatggccccacagaaaaaa

SEQ ID NO: 441677 - DNA, 1680 bp, Homo sapiens
agccgccattgccgggcctgcctggccaccctgcgcagcggccttgcgtcctctccgggggcggagcgggtcggcgggcctgacagggaacctccctgaccgagcccacgtctccccacggccagagaaatctccggcccggcccgcatcgccagcccccaggcccggaggaacggcccgagcccaggagaaccacatcttcgtcccagccccggaggctcctgtgggcaagatcgtgagccaacgggttcctgaggcccctcctggccaggcagggtttccccgcgcgtttccgaggagccctgcctggccgggcggctggacaaacaggtcgtagcaccgatcgcgcccgcccccagcaggggtcccgcacaggcttgcccctgacccccacccaaacctgtccttccgctttgcccccaaacagtgcacttgccggcggtcccaacccagcaggagaagtggacatgaggttggcaggccctctccgcattgtggtcctagtcgtcagtgtgggtgtcacatggatcgtggtcagcatcctcctgggtgggcctggcagtggctttcctcgcatccagcaactcttcaccagtccagagagctcggtgactgcagcgccacgggccaggaagtacaagtgtggcctgccccagccgtgtcctgaggagcacctggccttccgcgtggtcagcggggccgccaacgtcattgggcccaagatctgcctcgaggacaagatgctgatgagcagcgtcaaggacaacgtgggccgcgggctgaacatcgccctggtgaacggggtcagcggcgagctcatcgaggcccgggcctttgacatgtgggccggagatgtcaacgacctgttgaagtttattcggccactgcacgaaggcaccctggtgttcgtggcatcctacgacgacccagccaccaagatgaatgaagagaccagaaagctcttcagtgagctgggcagcaggaacgccaaggagctggccttccgggacagctgggtgtttgtcggggccaagggtgtgcagaacaagagcccctttgagcagcacgtgaagaacagtaagcacagcaacaagtacgaaggctggcccgaggcgctggagatggaaggctgtatcccgcggagaagcacggccaacacatcggggctccgaggcagtgaccagaacgtggtctcaaggtggtgggggctatgggggctgcagggggtagccctgccgcactttgtcacgggagcccagggtacccgcctccttttcgtaacactgttccccccggtcagcccatctagccctgtcctccattcctcacgccatctccatccccatcttgagtcctggaacggccctgggtgcctgcccctcactgtgcaactctgggagcagcccggcaggttggggcgtcttccagaacctctcccttctggagccactctgcactgcgggctaaacatgtttccagtgtgattccttccagtgagccaaacccggtggctgcttcatgagcctgactgcctctcgcctgctctcagcaggaagggacccctggagcaggctggcccggggtggtgaagtagctggagcccgatcacagtcccgcggtttgtcagggggcccaccttctagatgaccccttaataaagtgatggccccacagaaaaaa

SEQ ID NO: 441678 - DNA, 181 bp, Homo sapiens
tgggagggtgctcagtggtgcctgatgacccctgttccgtggcacctgcccccccagatgtcaacgacctgttgaagtttattcggccactgcacgaaggcaccctggtgttcgtggcatcctacgacgacccagccaccaagtaggtgcttggggaggccagcctcagccttgcccttct

SEQ ID NO: 441679 - DNA, 1955 bp, Homo sapiens
agcggggacctccaggattaccgctgctccagggactcagccccgagccccgtgccccatgagctggtgatcaccatcgaactgccgctgttgcgctcggccgagcaggcggcgctggaggtaacgagaaagctgctgtgcctcgactcgaggaaacctgactaccggctgcggctctcgctcccgtacccagtggacgatggccgcggcaaggcacaattcaacaaggcccggcggcagctggtggttacgctgccagtggtgctgccggccgcgcgccgggagcccgctgtcgccgtcgccgccgccgcgccggaagagtccgcggaccggtccggaactgacggccaggcctgcgcttccgctcgcgagggggaggcgggacccgcgaggagtcgcgcggaggacggaggccacgatacctgcgtggctggggctgcgggctccggggtcaccaccctgggcgacccggaggtggcgcctccgccggccgcagctggagaggagcgtgtccccaagccgggggagcaggacttgagcaggcacgcggggtcaccgccgggcagcgtggaggagccatctcctggaggagaaaactcacctggtggcggaggctccccttgtttgtcctcccggagcctggcgtggggttcttctgcgggaagagagagtgcgcgcggagatagcagtgtggaaacacgcgaggagtcggagggcacgggcggccagcgctcagcctgcgccatgggtggtcccgggaccaagagcggggagcctttgtgtcctccgttactgtgtaatcaggacaaagaaaccttgactctgctcattcaggtgcctcggatccagccgcaaagtcttcaaggagatttgaatcccctctggtacaaattacgcttctccgcacaagacttagtttattccttctttttgcaatttgctccagagaataaattgagtaccacagaacctgtgattagcatttcttcaaacaatgcagtgatagaactggcaaaatctccagagagccatggacattggagagagtggtattatggtgtaaacaacgattctttggagttgcaagaatgtagtaactctgatcagctacaaggaaaggaggaaagagtaaatgaagaaagtcatctaactgaaaaggaatatatagaacattgtaacacccctacaactgattctgattcatctatagcagttaaagcactacaaatagatagctttggtttagttacatgctttcaacaagagtctcttgatgtttctcaaatgatacttggaaaatctcagcaacctgagtcaaaaatgcaatctgaatttataaaagaaaaaagtgctacttgttcaaatgaggaaaaaggtaacttaaacgagtcagtaataactgaagagaaagaaacagatggagatcacctatcttcattactgaacaaaactacggttcacaatatacctggattcgacagcataaaagaaaccaatatgcaggatggtagtgtgcaggtcattaaagatcatgtgaccaattgtgcattcagttttcagaattctttgctatatgatttggattaattctatataattttggacttttaaatattaaggttaaaaaatacctgtatctaaaattgattctgttaactgttgtcttaaaactaaaggtattaaagtataaaattaaaatttgcaattttttttaaaaaattgcaattttgattctcatgggggaaattggagataatttttttttttttgcctctggagtttaaagtttccttatggagataagttttgtgattcctgtaatagatgtgtatgttttctatttgagagttaaaacatttgagagttaaaacatttagttttaatacaacctatgtatatatacttctgtgttaatttttgctttgtcattaataaaatttaaaaatattcaaaaa

SEQ ID NO: 441680 - DNA, 2330 bp, Homo sapiens
agcggggacctccaggattaccgctgctccagggactcagccccgagccccgtgccccatgagctggtgatcaccatcgaactgccgctgttgcgctcggccgagcaggcggcgctggaggtaacgagaaagctgctgtgcctcgactcgaggaaacctgactaccggctgcggctctcgctcccgtacccagtggacgatggccgcggcaaggcacaattcaacaaggcccggcggcagctggtggttacgctgccagtggtgctgccggccgcgcgccgggagcccgctgtcgccgtcgccgccgccgcgccggaagagtccgcggaccggtccggaactgacggccaggcctgcgcttccgctcgcgagggggaggcgggacccgcgaggagtcgcgcggaggacggaggccacgatacctgcgtggctggggctgcgggctccggggtcaccaccctgggcgacccggaggtggcgcctccgccggccgcagctggagaggagcgtgtccccaagccgggggagcaggacttgagcaggcacgcggggtcaccgccgggcagcgtggaggagccatctcctggaggagaaaactcacctggtggcggaggctccccttgtttgtcctcccggagcctggcgtggggttcttctgcgggaagagagagtgcgcgcggagatagcagtgtggaaacacgcgaggagtcggagggcacgggcggccagcgctcagcctgcgccatgggtggtcccgggaccaagagcggggagcctttgtgtcctccgttactgtgtaatcaggacaaagaaaccttgactctgctcattcaggtgcctcggatccagccgcaaagtcttcaaggagatttgaatcccctctggtacaaattacgcttctccgcacaagacttagtttattccttctttttgcaatttgctccagagaataaattgagtaccacagaacctgtgattagcatttcttcaaacaatgcagtgatagaactggcaaaatctccagagagccatggacattggagagagtggtattatggtgtaaacaacgattctttggaggaaaggttatttgtcaatgaagaaaatgttaatgagtttcttgaagaggtcctgagctctccattcaaacagtctatgtccttgaccccaccattaattgaagttcttcaagttactgataataagattcaaattaatgcaaagttgcaagaatgtagtaactctgatcagctacaaggaaaggaggaaagagtaaatgaagaaagtcatctaactgaaaaggaatatatagaacattgtaacacccctacaactgattctgattcatctatagcagttaaagcactacaaatagatagctttggtttagttacatgctttcaacaagagtctcttgatgtttctcaaatgatacttggaaaatctcagcaacctgagtcaaaaatgcaatctgaatttataaaagaaaaaagtgctacttgttcaaatgaggaaaaaggtaacttaaacgagtcagtaataactgaagagaaagaaacagatggagatcacctatcttcattactgaacaaaactacggttcacaatatacctggattcgacagcataaaagaaaccaatatgcaggatggtagtgtgcaggtcattaaagatcatgtgaccaattgtgcattcagttttcagaattctttgctatatgatttggattaattctatataattttggacttttaaatattaaggttaaaaaatacctgtatctaaaattgattctgttaactgttgtcttaaaactaaaggtattaaagtataaaattaaaatttgcaattttttttaaaaaattgcaattttgattctcatgggggaaattggagataatttttttttttttgcctctggagtttaaagtttccttatggagataagttttgtgattcctgtaatagatgtgtatgttttctatttgagagttaaaacatttgagagttaaaacatttagttttaatacaacctatgtatatatacttctgtgttaatttttgctttgtcattaataaaatttaaaaatattcaaaaaaaaaaaaaaagagatcagcaagaacaacaccaacaacactggtgttgtgggcgccgccctggggcccatgtagaaagaagttttttttaagcaaccacattctgcgttgtgggccgcagcgggggccccaagtggtgttatgtggaacacgtggtggtcccacagcgtcggttgccccaaggagaaacactccgcggccagaaacatatgggcgttggtgatttctcaccg

SEQ ID NO: 441681 - DNA, 1072 bp, Homo sapiens
taaactcttaacataacccacttactctttatatcaatacaacctcagtaagagaaaggttatttgtcaatgaagaaaatgttaatgagtttcttgaagaggtcctgagctctccattcaaacagtctatgtccttgaccccaccattaattgaagttcttcaagttactgataataagattcaaattaatgcaaagttgcaagaatgtagtaactctgatcagctacaaggaaaggaggaaagagtaaatgaagaaagtcatctaactgaaaaggaatatatagaacattgtaacacccctacaactgattctgattcatctatagcagttaaagcactacaaatagatagctttggtttagttacatgctttcaacaagagtctcttgatgtttctcaaatgatacttggaaaatctcagcaacctgagtcaaaaatgcaatctgaatttataaaagaaaaaagtgctacttgttcaaatgaggaaaaaggtaacttaaacgagtcagtaataactgaagagaaagaaacagatggagatcacctatcttcattactgaacaaaactacggttcacaatatacctggattcgacagcataaaagaaaccaatatgcaggatggtagtgtgcaggtcattaaagatcatgtgaccaattgtgcattcagttttcagaattctttgctatatgatttggattaattctatataattttggacttttaaatattaaggttaaaaaatacctgtatctaaaattgattctgttaactgttgtcttaaaactaaaggtattaaagtataaaattaaaatttgcaattttttttaaaaaattgcaattttgattctcatgggggaaattggagataatttttttttttttgcctctggagtttaaagtttccttatggagataagttttgtgattcctgtaatagatgtgtatgttttctatttgagagttaaaacatttgagagttaaaacatttagttttaatacaacctatgtatatatacttctgtgttaatttttgctttgtcattaataaaatttaaaaatattcaaaaa

SEQ ID NO: 441682 - DNA, 2099 bp, Homo sapiens
agcggggacctccaggattaccgctgctccagggactcagccccgagccccgtgccccatgagctggtgatcaccatcgaactgccgctgttgcgctcggccgagcaggcggcgctggaggtaacgagaaagctgctgtgcctcgactcgaggaaacctgactaccggctgcggctctcgctcccgtacccagtggacgatggccgcggcaaggcacaattcaacaaggcccggcggcagctggtggttacgctgccagtggtgctgccggccgcgcgccgggagcccgctgtcgccgtcgccgccgccgcgccggaagagtccgcggaccggtccggaactgacggccaggcctgcgcttccgctcgcgagggggaggcgggacccgcgaggagtcgcgcggaggacggaggccacgatacctgcgtggctggggctgcgggctccggggtcaccaccctgggcgacccggaggtggcgcctccgccggccgcagctggagaggagcgtgtccccaagccgggggagcaggacttgagcaggcacgcggggtcaccgccgggcagcgtggaggagccatctcctggaggagaaaactcacctggtggcggaggctccccttgtttgtcctcccggagcctggcgtggggttcttctgcgggaagagagagtgcgcgcggagatagcagtgtggaaacacgcgaggagtcggagggcacgggcggccagcgctcagcctgcgccatgggtggtcccgggaccaagagcggggagcctttgtgtcctccgttactgtgtaatcaggacaaagaaaccttgactctgctcattcaggtgcctcggatccagccgcaaagtcttcaaggagatttgaatcccctctggtacaaattacgcttctccgcacaagacttagtttattccttctttttgcaatttgctccagagaataaattgagtaccacagaacctgtgattagcatttcttcaaacaatgcagtgatagaactggcaaaatctccagagagccatggacattggagagagtggtattatggtgtaaacaacgattctttggaggaaaggttatttgtcaatgaagaaaatgttaatgagtttcttgaagaggtcctgagctctccattcaaacagtctatgtccttgaccccaccattaattgaagttcttcaagttactgataataagattcaaattaatgcaaagttgcaagaatgtagtaactctgatcagctacaaggaaaggaggaaagagtaaatgaagaaagtcatctaactgaaaaggaatatatagaacattgtaacacccctacaactgattctgattcatctatagcagttaaagcactacaaatagatagctttggtttagttacatgctttcaacaagagtctcttgatgtttctcaaatgatacttggaaaatctcagcaacctgagtcaaaaatgcaatctgaatttataaaagaaaaaagtgctacttgttcaaatgaggaaaaaggtaacttaaacgagtcagtaataactgaagagaaagaaacagatggagatcacctatcttcattactgaacaaaactacggttcacaatatacctggattcgacagcataaaagaaaccaatatgcaggatggtagtgtgcaggtcattaaagatcatgtgaccaattgtgcattcagttttcagaattctttgctatatgatttggattaattctatataattttggacttttaaatattaaggttaaaaaatacctgtatctaaaattgattctgttaactgttgtcttaaaactaaaggtattaaagtataaaattaaaatttgcaattttttttaaaaaattgcaattttgattctcatgggggaaattggagataatttttttttttttgcctctggagtttaaagtttccttatggagataagttttgtgattcctgtaatagatgtgtatgttttctatttgagagttaaaacatttgagagttaaaacatttagttttaatacaacctatgtatatatacttctgtgttaatttttgctttgtcattaataaaatttaaaaatattcaaaaa

SEQ ID NO: 441683 - DNA, 2301 bp, Homo sapiens
  misc_feature (2087)..(2087): n is a, c, g, or t
agcggggacctccaggattaccgctgctccagggactcagccccgagccccgtgccccatgagctggtgatcaccatcgaactgccgctgttgcgctcggccgagcaggcggcgctggaggtaacgagaaagctgctgtgcctcgactcgaggaaacctgactaccggctgcggctctcgctcccgtacccagtggacgatggccgcggcaaggcacaattcaacaaggcccggcggcagctggtggttacgctgccagtggtgctgccggccgcgcgccgggagcccgctgtcgccgtcgccgccgccgcgccggaagagtccgcggaccggtccggaactgacggccaggcctgcgcttccgctcgcgagggggaggcgggacccgcgaggagtcgcgcggaggacggaggccacgatacctgcgtggctggggctgcgggctccggggtcaccaccctgggcgacccggaggtggcgcctccgccggccgcagctggagaggagcgtgtccccaagccgggggagcaggacttgagcaggcacgcggggtcaccgccgggcagcgtggaggagccatctcctggaggagaaaactcacctggtggcggaggctccccttgtttgtcctcccggagcctggcgtggggttcttctgcgggaagagagagtgcgcgcggagatagcagtgtggaaacacgcgaggagtcggagggcacgggcggccagcgctcagcctgcgccatgggtggtcccgggaccaagagcggggagcctttgtgtcctccgttactgtgtaatcaggacaaagaaaccttgactctgctcattcaggtgcctcggatccagccgcaaagtcttcaaggagatttgaatcccctctggtacaaattacgcttctccgcacaagacttagtttattccttctttttgcaatttgctccagagaataaattgagtaccacagaacctgtgattagcatttcttcaaacaatgcagtgatagaactggcaaaatctccagagagccatggacattggagagagtggtattatggtgtaaacaacgattctttggaggaaaggttatttgtcaatgaagaaaatgttaatgagtttcttgaagaggtcctgagctctccattcaaacagtctatgtccttgaccccaccattaattgaagttcttcaagttactgataataagattcaaattaatgcaaagttgcaagaatgtagtaactctgatcagctacaaggaaaggaggaaagagtaaatgaagaaagtcatctaactgaaaaggaatatatagaacattgtaacacccctacaactgattctgattcatctatagcagttaaagcactacaaatagatagctttggtttagttacatgctttcaacaagagtctcttgatgtttctcaaatgatacttggaaaatctcagcaacctgagtcaaaaatgcaatctgaatttataaaagaaaaaagtgctacttgttcaaatgaggaaaaaggtaacttaaacgagtcagtaataactgaagagaaagaaacagatggagatcacctatcttcattactgaacaaaactacggttcacaatatacctggattcgacagcataaaagaaaccaatatgcaggatggtagtgtgcaggtcattaaagatcatgtgaccaattgtgcattcagttttcagaattctttgctatatgatttggattaattctatataattttggacttttaaatattaaggttaaaaaatacctgtatctaaaattgattctgttaactgttgtcttaaaactaaaggtattaagtcataacttaacttcgcatctttttcaaaattgcgcttcgatctcacggggaacatgggatactcttttattggccggggttaagttcctagagatagctggaacgcagaaagggtgttctatggaggaaccatgaagaaacatttatacccgcttatccgtgatgcggcatatatatctcgaaaaacagcccgtcgtggttatttatgattgtcttcatttttctcgcttacacctcatacactcgccacaacacaantgggaaagacaagatacagacgcgaccaatacaagcacagccacacaccgacacaagcactacaaaccacaacacagcaactacaagacacggatacgacactcaacacgcaaagaacgaggcagaagcaacagacaaagagaagactaccacaccgaagaacaaacgacagcacaaacaagcaagaacgagcagacataaagcagacacagcc

SEQ ID NO: 441684 - DNA, 333 bp, Homo sapiens
ttcaggtgcctcggatccagccgcaaagtcttcaaggagatttgaatcccctctggtacaaattacgcttctccgcacaagacttagtttattccttctttttgcaatttgctccagagaataaattgagtaccacagaacctgtgattagcatttcttcaaacaatgcagtgatagaactggcaaaatctccagagagccatggacattggagagagtggtattatggtgtaaacaacgattctttggaggtaacagttctttccagagtcctcatatttgaaatatcccatctcactttaaaaatttgctattaccggccgggcgcggtgg

SEQ ID NO: 441685 - DNA, 638 bp, Homo sapiens
cccaggccctgaagaatgctgaaaatgcttaccatattcaccaagctcggacaaggtcatttgatgaagatgcaaaagaaagtcgagcagctgccctacgggcagcaaacaagtctggcactgggtttggggagagttatagcctggctaacccatctatccgggctggtgaggatattccacagcccacaatttttaatggcaaattgaaaggttatcaactgaaaggcatgaattggttggccaatctatatgaacagggtattaatggcattcttgctgatgaaatgggccttggtaaaacagtacagagcattgcccttctggcccatctggctgagagagagaacatttggggacctttcttaataatttcacctgcgtctacacttaacaattggcaccaggagtttactagatttgttcctaaatttaaggtgctaccatattggggaaatcctcatgatagaaaagtcatcagaaggttctggagtcagaagaccctctacactcaggatgcccccttccatgtggttattaccagctatcagctggtggtgcaggatgtaaagtatttccagcgggtcaagtggcaatacatggtactggatgaggctcaggcgctcaagagtagttcc

SEQ ID NO: 441686 - DNA, 334 bp, Homo sapiens
accctctcaactagaacttttgtaatgccatgataccatcagtgataaagtataccacatactaggcttacctctctgggcttccgttgttttctgatttgggcctctgtaattgcccactgtctcagtagctgttttatgccttcagacaaatgaattgtgtgtgtgtctttctatttggacaacagggttggttaaaccatttattccaccattggcaggagaggaattcctatgctcattttattagtttctttttaaattgttccgaattatatatttgttctaatacttttaagatcatctatagaaagtaatgtatatattggccctt

SEQ ID NO: 441687 - DNA, 361 bp, Homo sapiens
tgttgactcgtagaggatccctactaaatggctgtgtactgttttacaaggccatctgtctgagagagagaacatttggggacctttcttaataatttcacctgcgtctacacttaacaattggcaccaggagtttactagatttgttcctaaatttaaggtgctaccatattggggaaatcctcatgatagaaaagtcatcagaaggttctggagtcagaagaccctctacactcaggatgcccccttccatgtggttattaccagctatcagctggtggtgcaggatgtaaagtatttccagcgggtcaagtggcaatacatggtactggatgaggctcaggcgctcaagagtagttcc

SEQ ID NO: 441688 - DNA, 345 bp, Homo sapiens
tatttgttctaatacttttaagatcatctatagaaagtaatgtatatattggccctttttctaggtgctaccatattggggaaatcctcatgatagaaaagtcatcagaaggttctggagtcaggtaacattctacttaaactgcatacatacgtaccgtacatgcagtcattatttctctaattgatgtggataatttcttttagacaaaaatcttcttatctattatatatttctggacactgatcaagtttccatttttctgatacaatacttttcctgttgtaggcaatcagctggacttgatttccaggattaattaagaatctttttttttgagacaag

SEQ ID NO: 441689 - DNA, 495 bp, Homo sapiens
cccaggccctgaagaatgctgaaaatgcttaccatattcaccaagctcggacaaggtcatttgatgaagatgcaaaagaaagtcgagcagctgccctacgggcagcaaacaagtctggcactgggtttggggagagttatagcctggctaacccatctatccgggctggtgaggatattccacagcccacaatttttaatggcaaattgaaaggttatcaactgaaaggcatgaattggttggccaatctatatgaacagggtattaatggcattcttgctgatgaaatgggccttggtaaaacagtacagagcattgcccttctggcccatctggctgagagagagaacatttggggacctttcttaataatttcacctgcgtctacacttaacaattggcaccaggagtttactagatttgttcctaaatttaaggtaaatatcagtccaaccaaaacatctattgctctttaaaataaactttttgactctc

SEQ ID NO: 441690 - DNA, 2072 bp, Homo sapiens
cacgaggcttgcggcaccgcccacccacaccccgtctgccccttgaccccaccacacgccgacgccatgcagtccagtggggagtcggaggcagcctccttcctgcctccgactccccactggactgcatggcgacggcgtgtggtggggcagtcagctaagccatttgcctaaggggctgtcgggcatctgcgtgctggggaccgacagtgtgggtgtgttaggaggatctgtatggagcacattgctgcctctggctaggacagggtggaaagggtggcgtggctacagcctgacccatgggcaccgtcctaccctttgttctgtgcttccgagtgtcagtcatgtgctggggtctgtgggcccatgactcagacggtgagctctgaccttcctgagccagggctttgctgtagttgtgcctggctcaggagctctaggacaaggggaccgctccaggtctgcatctacggtgtggcagggcccctcggcactcttgtgcactagtgtcatctttcccattgaaatgactgtgaggaccagaatgtgcacatgcagatgggcagctacttgtctgccttggccctttattacacaacttgctgggggtggagatgccaccccccggcagtcagagcccctttatgatgtcatggggctggttacatgactgccaaggggtgctgctggccacactgcactagcaagtttgccagatggaggacaagcgatcattgagtatggctcgctgtgaagaaagaaattcgagaggacaggatcatggcttggaaagggtgcctttccctccccagttgcagtcagagacctaccttcacccagcagatccttcccctgcctgggacgacccggggtccactgggagccctaacttgaggctgctgacagaagaaatcgctttccaacctctggccgaggaagcttcgttcagaaggccgcaccctgacggtgacgtcccgccccagggagaagataatctcctctccctcccctttccacagaaactgtggagactggtcagcagcaaccagttttcgtccatctggtgggatgacagtggggcttgtagagtgatcaatcaaaaactctttgaaaaggagattctcaaaagggacgtcgcacacaaagtgtttgccacaacttcgataaagagcttcttccgccagctaaacttgtatggcttccgaaaacggcgtcaatgcactttcaggaccttcacccgcattttctccgcaaaaaggctggtctccatcttgaataagttagagttctactgccatccttactttcaaagagactcccctcacctcctcgtgaggatgaagagaagagtgggtgtcaagtctgcaccaagacatcaggaggaggacaagccagaagctgctggatcctgtctggcaccagcagacactgagcaacaagatcacacgtctccgaatgagaatgaccaggtcacaccgcaacaccgggaaccggccggtcccaacacccaaatcaggagtggctctgctccaccagcaactcctgtgatggtgcctgattccgccgtggcgagtgacaacagtccagtgacccagccggccggcgagtggtcagagggcagccaggctcacgtcactccggtggccgctgtccctgggcctgcagcgctgcccttcctctatgtccctggatctcccactcagatgaattcttacgggcctgtggtggcccttcccacagcgtcccgtagtacccttgccatggacaccacaggacttcctgcacctggcatgctgcccttttgccatctctgggtaccggtgaccctagtggctgctggggctgcacagcctgctgcctccatggtcatgttcccccatctcccagctctgcaccaccattgcccccacagccaccgcacgtcacagtacatgccagctagcgatgggccccaggcgtacccagactacgcagaccagagcacatagagggcagcatttgggcagaatatgtgctggtcaataaatgtgtcagaaaatgagtaattttctgactgcacaaaaaagtcttca

SEQ ID NO: 441691 - DNA, 1593 bp, Homo sapiens
tgggctctggggcctggtcgggtggaagtcccaggactgcctcctgggaagtgggcgacctcaggcagggtgtggggccatcgctgtgggcctgtgtccccctctgggtggaggtgacatgaactaagagtgaatgtggggagagggctgaggatggtgcgggcccctctcgagtgtgtaaaatatcacaggtgccaagtagccgtatctgcgtgtcgtcctccccggggccagccatgtcatctggcgcttgctgtgtccccctgactccacagcacattaccctgtgaggtgagcaggccaggggagtctggtatttgtaccactgtcaccctagctggtgtctggagaggtgctcaagtggaagcactgaaaggcgcctggcgcaggaggtgcagatgctcctgctgcccttggtaggtgggcccctggtgtggaagagccagtacccagggcctccaacacagccggggtgcattctgttgccagctgacactgcatgggggaggcccagaatcttcttccctcctggtctgcaacttcaaagaccctttccgccggccatggacaccctaatctgccattttgaggctttttccaagacggaaaggcccgccacaacttggtaaaccttgacgatgtgaacgcgagtccccagcttcctttggggactgggaccttttccagaaaggcctcctgggccagtagagttctcttgcacaggggcgtagatggttggtagttgtagtccatccttgtgacttgcagtttccttttgtttatttaaactttgacttatagttagagttctactgccatccttactttcaaagagactcccctcacctcctcgtgaggatgaagagaagagtgggtgtcaagtctgcaccaagacatcaggaggaggacaagccagaagctgctggatcctgtctggcaccagcagacactgagcaacaagatcacacgtctccgaatgagaatgaccaggtcacaccgcaacaccgggaaccggccggtcccaacacccaaatcaggagtggctctgctccaccagcaactcctgtgatggtgcctgattccgccgtggcgagtgacaacagtccagtgacccagccggccggcgagtggtcagagggcagccaggctcacgtcactccggtggccgctgtccctgggcctgcagcgctgcccttcctctatgtccctggatctcccactcagatgaattcttacgggcctgtggtggcccttcccacagcgtcccgtagtacccttgccatggacaccacaggacttcctgcacctggcatgctgcccttttgccatctctgggtaccggtgaccctagtggctgctggggctgcacagcctgctgcctccatggtcatgttcccccatctcccagctctgcaccaccattgcccccacagccaccgcacgtcacagtacatgccagctagcgatgggccccaggcgtacccagactacgcagaccagagcacatagagggcagcatttgggcagaatatgtgctggtcaataaatgtgtcagaaaatgagtaattttctgactgcacaaaaaagtcttca

SEQ ID NO: 441692 - DNA, 1111 bp, Homo sapiens
gccacagagcccgggccgcaggcacctcctcgccagctcttccgctcctctcacagccgccagacccgcctgctgagccccatggcccgcgctgctctctccgccgcccccagcaatccccggctcctgcgagtggcactgctgctcctgctcctggtagccgctggccggcgcgcagcaggagcgtccgtggccactgaactgcgctgccagtgcttgcagaccctgcagggaattcaccccaagaacatccaaagtgtgaacgtgaagtcccccggaccccactgcgcccaaaccgaagtcatagccacactcaagaatgggcggaaagcttgcctcaatcctgcatcccccatagttaagaaaatcatcgaaaagatgctgaacagtgacaaatccaactgaccagaagggaggaggaagctcactggtggctgttcctgaaggaggccctgcccttataggaacagaagaggaaagagagacacagctgcagaggccacctggattgtgcctaatgtgtttgagcatcgcttaggagaagtcttctatttatttatttattcattagttttgaagattctatgttaatattttaggtgtaaaataattaagggtatgattaactctacctgcacactgtcctattatattcattctttttgaaatgtcaaccccaagttagttcaatctggattcatatttaatttgaaggtagaatgttttcaaatgttctccagtcattatgttaatatttctgaggagcctgcaacatgccagccactgtgatagaggctggcggatccaagcaaatggccaatgagatcattgtgaaggcaggggaatgtatgtgcacatctgttttgtaactgtttagatgaatgtcagttgttatttattgaaatgatttcacagtgtgtggtcaacatttctcatgttgaaactttaagaactaaaatgttctaaatatcccttggacattttatgtctttcttgtaaggcatactgccttgtttaatggtagttttacagtgtttctggcttagaacaaaggggcttaattattgatgttttcatagagaatataaaaataaagcacttatagaaaaaa

SEQ ID NO: 441693 - DNA, 1134 bp, Homo sapiens
gccacagagcccgggccgcaggcacctcctcgccagctcttccgctcctctcacagccgccagacccgcctgctgagccccatggcccgcgctgctctctccgccgcccccagcaatccccggctcctgcgagtggcactgctgctcctgctcctggtagccgctggccggcgcgcagcagtcagtgagtctcttcttccctaggagcgtccgtggccactgaactgcgctgccagtgcttgcagaccctgcagggaattcaccccaagaacatccaaagtgtgaacgtgaagtcccccggaccccactgcgcccaaaccgaagtcatagccacactcaagaatgggcggaaagcttgcctcaatcctgcatcccccatagttaagaaaatcatcgaaaagatgctgaacagtgacaaatccaactgaccagaagggaggaggaagctcactggtggctgttcctgaaggaggccctgcccttataggaacagaagaggaaagagagacacagctgcagaggccacctggattgtgcctaatgtgtttgagcatcgcttaggagaagtcttctatttatttatttattcattagttttgaagattctatgttaatattttaggtgtaaaataattaagggtatgattaactctacctgcacactgtcctattatattcattctttttgaaatgtcaaccccaagttagttcaatctggattcatatttaatttgaaggtagaatgttttcaaatgttctccagtcattatgttaatatttctgaggagcctgcaacatgccagccactgtgatagaggctggcggatccaagcaaatggccaatgagatcattgtgaaggcaggggaatgtatgtgcacatctgttttgtaactgtttagatgaatgtcagttgttatttattgaaatgatttcacagtgtgtggtcaacatttctcatgttgaaactttaagaactaaaatgttctaaatatcccttggacattttatgtctttcttgtaaggcatactgccttgtttaatggtagttttacagtgtttctggcttagaacaaaggggcttaattattgatgttttcatagagaatataaaaataaagcacttatagaaaaaa

SEQ ID NO: 441694 - DNA, 995 bp, Homo sapiens
gccacagagcccgggccgcaggcacctcctcgccagctcttccgctcctctcacagccgccagacccgcctgctgagccccatggcccgcgctgctctctccgccgcccccagcaatccccggctcctgcgagtggcactgctgctcctgctcctggtagccgctggccggcgcgcagcaggagcgtccgtggccactgaactgcgctgccagtgcttgcagaccctgcagggaattcaccccaagaacatccaaagtgtgaacgtgaagtcccccggaccccactgcgcccaaaccgaagtcatagccacactcaagaatgggcggaaagcttgcctcaatcctgcatcccccatagttaagaaaatcatcgaaaagatgctgaacagtgacaaatccaactgaccagaagggaggaggaagctcactgacaaatccaactgaccagaagggaggaggaagctcactggtggctgttcctgaaggaggccctgcccttataggaacagaagaggaaagagagacacagctgcagaggccacctggattgtgcctaatgtgtttgagcatcgcttaggagaagtcttctatttatttatttattcattagttttgaagattctatgttaatattttacacctaaaatatccctcccctaggacagtggtgactggtccttccaccacactcagtcttggagagcgagctgtccagccacagaaatgaggtgtggtgcgtggcttcctgtccccacagccagccctgtggggctcaagccgaagaacgggccctcagactctgggactacgttccagaagcccagaatcatgattgaccagggctggacccatacatgaacgctgcaactgccgcctaaactgccgcataaacggctcccacgcagcggaatgggacacactggaaaccggcctcacacacaccgtgcgcaaccccacccaaacaccacaatcaacacctccacacttgcttacaa

SEQ ID NO: 441695 - DNA, 1206 bp, Homo sapiens
agggaggttgagtggcagctctgtggtttgaggaaggtttggcttctcataagcatcactaaggataagtaggtaaatctggctggtaggatgagggtttttaaaatgctagaatgaagaggtcttgtcttggctaccgatttctaaattgactatcctagttttacccagactgttctttcacttactttataataaagatcccttcaatattttgcatggggcacttcctggatttaggcccttctatatttgaagatggggtagtgttcaaccagtttgtatacagacctttaattaattcctttctttttaattagtttagatttaactaatccctctactgtcttctatcatctatgaacttttgctgcctctgagctaaggcccagctgggccggttggctgcctctgatggaacttcctccacatgttttctaggtggtgacattctctagtgttttattagtcacttagctttttgtcttttagaatttggttgacgtctcttgtttattgattttttttccattccctttgttgtttgtgaatttacatacttcgacattttttctttaaaaaaattgtgaaatatttgagcatacagaaaagtagagagaatattttcaccaactcttgtttgagtgggcacttttcgtgctttttgggcagctagcactgtttgaacacctgctttttggcaacttcccactctgtggatctcgccttacccagtagaagacggcaatttaatctcctgcccttccttgcagctgtggctcagacaggtagcatgggctcaccaattagacataactgtgtgaaatctggaagcaagtactttgcagacaagagtagtatgagatacattttgttgaacggagcagtgatgtggttttcaaggcagcagtggcagaggtcccatgtaatggtgcaaggtgtggaggctttgcttagcagtttttcccccgcagctgctccaaggtataaaaatgggcatttttgggggctccgtagtcctgacctccacgcctgtgacttgtgagccattttattctgtttgtttaaactagctagtgtagatcctgttgtttgtaaccaagagtgttgacatacagccactatttaattgtaaccactgtcaacctttttccttatttacttcagatccttttgtgtttaaataaaggaaaagctgcacatcca

SEQ ID NO: 441696 - DNA, 510 bp, Homo sapiens
atagatttctggcagtggaattactgtcaggtgctaccagatgctggcttcccaaaggttttgccaagtgttactcccaataactgtctaagagtgcctgtttccccacaccttgagtaagccttggttatcagtcttacaaaaatattttgccaagagtagtatgagatacattttgttgaacggagcagtgatgtggttttcaaggcagcagtggcagaggtcccatgtaatggtgcaaggtgtggaggctttgcttagcagtttttcccccgcagctgctccaaggtataaaaatgggcatttttgggggctccgtagtcctgacctccacgcctgtgacttgtgagccattttattctgtttgtttaaactagctagtgtagatcctgttgtttgtaaccaagagtgttgacatacagccactatttaattgtaaccactgtcaacctttttccttatttacttcagatccttttgtgtttaaataaaggaaaagctgcacatcca

SEQ ID NO: 441697 - DNA, 1061 bp, Homo sapiens
cgtgtgtggctcttctctggagaaatgttcaagggccccttgtttaattggctctttcctcttcatggtggagttgtgggagttctgggcatattctgggccaccagcccctcgggttccaagatgcagctactggagacagagttctcacacaccgtgggcgagctcatcgaggtgcacctgcggcgccaggacagcatccctgccttcctcagctcgctcaccctcgagctcttcagccgccagaccgtggcgtagcctgcaggctcgggggcatagccggagccactctgcttggcctgacctgcaggtcccctgccccgccagccacaggctgggtgcacgtcctgcctctccagccccacagggcagcagcatgactgacagacacgctgggacctacgtcgggcttcctgctggggcggccagcaccctctccacgtgcagaccccatgcgtcccggagcctggtgtgtgggcgtcggccaccagcctgggttcctcaccttgtgaaataaaatcttctcccctagacactcccactcgccctgtgtatctgtggcctagccctagcagggtaggcgggaggaggggaaggagctccctcagcagccgccgccatctgcagaccggacaacgttagggtgagtcaggcatttccgctcagggagtgcacaggtggcagctgggaccaagggtggctggggtgcccccccaccaccatgggctgaggcccctccgcgtagcagcttccagctctgcctcaaggccgggccccagctctggggcttccctttgctgatggaacccggatggaggcacaggggctggggggactgtcctcacagataagggtgcatcgaggagagactgccctctgtgcccatctctccagggccatagaaatacattccatagacctaagcagtatttgaatttttataacaatagcatatgtgtttcttatgtgatttactagaaacaatttaatttctcgagttgtaaaaaggtgtattttaaacctgtgtaaaggtacctggagatcattgtcattcagaataa

SEQ ID NO: 441698 - DNA, 1212 bp, Homo sapiens
  misc_feature (133)..(133): n is a, c, g, or t
  misc_feature (136)..(137): n is a, c, g, or t
  misc_feature (141)..(143): n is a, c, g, or t
ggcccggggttaatcggacgaggatctggcggcctatgacagcgagctgaccccggccgagtactcaccccagctgacgcggcgcatgcgggaggctgaggagatggtgcagaaggtgcacagccacagcgcnganntggnnnctcagctgtcgcaggccctggaggagctgggaggccagaaacaaagagcagacatgctggagatggagctgaagatgctgaagtctcagtccagctctgccgaacagagcttcctgttctccaggaggaggcggacacgctcaggttgaaggtcgaggagctggaaggcgagcggagtcggctggaggaggaaaagaggatgctggaggcacagctggagcggcgagctctgcagggtgactatgaccagagcaggaccaaagtgctgcacatgagcctgaaccccaccagtgtggccaggcagcgcctgcacgaggaccacagccagctgcaggcggagtgcgagcgactgcgcgggctcctgcgcgccatggagagaggaggcaccgtcccagccgaccttgaggctgccgccgcgagtctgccatcgtccaaggaggtggcagagctgaagaagcaggtggagagtgccgagctgaagaaccagcggctcaaggaggttttccagaccaagatccaggagttccgcaaggcctgctacacgctcaccggctaccagatcgacatcaccacggagaaccagtaccggctgacctcgctgtacgccgagcacccaggcgactgcctcatcttcaaggccaccagcccctcgggttccaagatgcagctactggagacagagttctcacacaccgtgggcgagctcatcgaggtgcacctgcggcgccaggacagcatccctgccttcctcagctcgctcaccctcgagctcttcagccgccagaccgtggcgtagcctgcaggctcgggggcatagccggagccactctgcttggcctgacctgcaggtcccctgccccgccagccacaggctgggtgcacgtcctgcctctccagccccacagggcagcagcatgactgacagacacgctgggacctacgtcgggcttcctgctggggcggccagcaccctctccacgtgcagaccccatgcgtcccggagcctggtgtgtgggcgtcggccaccagcctgggttcctcaccttgtgaaataaaatcttctccccta

SEQ ID NO: 441699 - DNA, 754 bp, Homo sapiens
ccctccctcactccgtgcctcttgtccgtgcccgctgggacaccatggggctcggctcgggatggtgggaccagcgcttagtaagacccctcagccctaggcaccgtgtgagcactgctcacgtggcagagctggaatgggggccgggcacacactccctggcccacgtgttccacggacgtgctgcagaggtccccggccctccagggcaggccctctctgcttccagaggggcaggtgagccccaggccaggccaggccagccggggtctggactggagtgcagtggccacaatggacgccgcgagtgtcttcattaagagccaccagcccctcgggttccaagatgcagctactggagacagagttctcacacaccgtgggcgagctcatcgaggtgcacctgcggcgccaggacagcatccctgccttcctcagctcgctcaccctcgagctcttcagccgccagaccgtggcgtagcctgcaggctcgggggcatagccggagccactctgcttggcctgacctgcaggtcccctgccccgccagccacaggctgggtgcacgtcctgcctctccagccccacagggcagcagcatgactgacagacacgctgggacctacgtcgggcttcctgctggggcggccagcaccctctccacgtgcagaccccatgcgtcccggagcctggtgtgtgggcgtcggccaccagcctgggttcctcaccttgtgaaataaaatcttctccccta

SEQ ID NO: 441700 - DNA, 226 bp, Homo sapiens
  misc_feature (2)..(2): n is a, c, g, or t
  misc_feature (18)..(18): n is a, c, g, or t
  misc_feature (20)..(20): n is a, c, g, or t
  misc_feature (24)..(25): n is a, c, g, or t
gngagagagagagagagnanagannagagagagagagagagagagagagacagcccccacagggcagcagcatgactgacagacacgctgggacctacgtcgggcttcctgctggggcggccagcaccctctccacgtgcagaccccatgcgtcccggagcctggtgtgtgggcgtcggccaccagcctgggttcctcaccttgtgaaataaaatcttctccccta

SEQ ID NO: 441701 - DNA, 1337 bp, Homo sapiens
  misc_feature (133)..(133): n is a, c, g, or t
  misc_feature (136)..(137): n is a, c, g, or t
  misc_feature (141)..(143): n is a, c, g, or t
ggcccggggttaatcggacgaggatctggcggcctatgacagcgagctgaccccggccgagtactcaccccagctgacgcggcgcatgcgggaggctgaggagatggtgcagaaggtgcacagccacagcgcnganntggnnnctcagctgtcgcaggccctggaggagctgggaggccagaaacaaagagcagacatgctggagatggagctgaagatgctgaagtctcagtccagctctgccgaacagagcttcctgttctccaggaggaggcggacacgctcaggttgaaggtcgaggagctggaaggcgagcggagtcggctggaggaggaaaagaggatgctggaggcacagctggagcggcgagctctggccaccagcccctcgggttccaagatgcagctactggagacagagttctcacacaccgtgggcgagctcatcgaggtgcacctgcggcgccaggacagcatccctgccttcctcagctcgctcaccctcgagctcttcagccgccagaccgtggcgtagcctgcaggctcgggggcatagccggagccactctgcttggcctgacctgcaggtcccctgccccgccagccacaggctgggtgcacgtcctgcctctccagccccacagggcagcagcatgactgacagacacgctgggacctacgtcgggcttcctgctggggcggccagcaccctctccacgtgcagaccccatgcgtcccggagcctggtgtgtgggcgtcggccaccagcctgggttcctcaccttgtgaaataaaatcttctcccctagacactcccactcgccctgtgtatctgtggcctagccctagcagggtaggcgggaggaggggaaggagctccctcagcagccgccgccatctgcagaccggacaacgttagggtgagtcaggcatttccgctcagggagtgcacaggtggcagctgggaccaagggtggctggggtgcccccccaccaccatgggctgaggcccctccgcgtagcagcttccagctctgcctcaaggccgggccccagctctggggcttccctttgctgatggaacccggatggaggcacaggggctggggggactgtcctcacagataagggtgcatcgaggagagactgccctctgtgcccatctctccagggccatagaaatacattccatagacctaagcagtatttgaatttttataacaatagcatatgtgtttcttatgtgatttactagaaacaatttaatttctcgagttgtaaaaaggtgtattttaaacctgtgtaaaggtacctggagatcattgtcattcagaataa

SEQ ID NO: 441702 - DNA, 949 bp, Homo sapiens
  misc_feature (8)..(8): n is a, c, g, or t
  misc_feature (10)..(10): n is a, c, g, or t
  misc_feature (54)..(54): n is a, c, g, or t
agggacgncnaagcgacgtgtttgcaacccggcttccctctgcgcggctctgcnatcgtgtcatgggccggaggtcctggtccagggtgactatgaccagagcaggaccaaagtgctgcacatgagcctgaaccccaccagtgtggccaggcagcgcctgcacgaggaccacagccagctgcaggcggagtgcgagcgactgcgcgggctcctgcgcgccatggagagaggaggcaccgtcccagccgaccttgaggctgccgccgcgagtctgccatcgtccaaggaggtggcagagctgaagaagcaggtggagagtgccgagctgaagaaccagcggctcaaggaggttttccagaccaagatccaggagttccgcaaggcctgctacacgctcaccggctaccagatcgacatcaccacggagaaccagtaccggctgacctcgctgtacgccgagcacccaggcgactgcctcatcttcaaggccaccagcccctcgggttccaagatgcagctactggagacagagttctcacacaccgtgggcgagctcatcgaggtgcacctgcggcgccaggacagcatccctgccttcctcagctcgctcaccctcgagctcttcagccgccagaccgtggcgtagcctgcaggctcgggggcatagccggagccactctgcttggcctgacctgcaggtcccctgccccgccagccacaggctgggtgcacgtcctgcctctccagccccacagggcagcagcatgactgacagacacgctgggacctacgtcgggcttcctgctggggcggccagcaccctctccacgtgcagaccccatgcgtcccggagcctggtgtgtgggcgtcggccaccagcctgggttcctcaccttgtgaaataaaatcttctcccctaaaaagaagaaaaatgacctcggtggcctca

SEQ ID NO: 441703 - DNA, 531 bp, Homo sapiens
cgtgtgtggctcttctctggagaaatgttcaagggccccttgtttaattggctctttcctcttcatggtggagttgtgggagttctgggcatattctgggccaccagcccctcgggttccaagatgcagctactggagacagagttctcacacaccgtgggcgagctcatcgaggtgcacctgcggcgccaggacagcatccctgccttcctcagctcgctcaccctcgagctcttcagccgccagaccgtggcgtagcctgcaggctcgggggcatagccggagccactctgcttggcctgacctgcaggtcccctgccccgccagccacaggctgggtgcacgtcctgcctctccagccccacagggcagcagcatgactgacagacacgctgggacctacgtcgggcttcctgctggggcggccagcaccctctccacgtgcagaccccatgcgtcccggagcctggtgtgtgggcgtcggccaccagcctgggttcctcaccttgtgaaataaaatcttctccccta

SEQ ID NO: 441704 - DNA, 919 bp, Homo sapiens
  misc_feature (8)..(8): n is a, c, g, or t
  misc_feature (10)..(10): n is a, c, g, or t
  misc_feature (54)..(54): n is a, c, g, or t
agggacgncnaagcgacgtgtttgcaacccggcttccctctgcgcggctctgcnatcgtgtcatgggccggaggtcctggtccagggtgactatgaccagagcaggaccaaagtgctgcacatgagcctgaaccccaccagtgtggccaggcagcgcctgcacgaggaccacagccagctgcaggcggagtgcgagcgactgcgcgggctcctgcgcgccatggagagaggaggcaccgtcccagccgaccttgaggctgccgccgcgagtctgccatcgtccaaggaggtggcagagctgaagaagcaggtggagagtgccgagctgaagaaccagcggctcaaggaggttttccagaccaagatccaggagttccgcaaggcctgctacacgctcaccggctaccagatcgacatcaccacggagaaccagtaccggctgacctcgctgtacgccgagcacccaggcgactgcctcatcttcaaggccaccagcccctcgggttccaagatgcagctactggagacagagttctcacacaccgtgggcgagctcatcgaggtgcacctgcggcgccaggacagcatccctgccttcctcagctcgctcaccctcgagctcttcagccgccagaccgtggcgtagcctgcaggctcgggggcatagccggagccactctgcttggcctgacctgcaggtcccctgccccgccagccacaggctgggtgcacgtcctgcctctccagccccacagggcagcagcatgactgacagacacgctgggacctacgtcgggcttcctgctggggcggccagcaccctctccacgtgcagaccccatgcgtcccggagcctggtgtgtgggcgtcggccaccagcctgggttcctcaccttgtgaaataaaatcttctccccta

SEQ ID NO: 441705 - DNA, 1284 bp, Homo sapiens
ccctccctcactccgtgcctcttgtccgtgcccgctgggacaccatggggctcggctcgggatggtgggaccagcgcttagtaagacccctcagccctaggcaccgtgtgagcactgctcacgtggcagagctggaatgggggccgggcacacactccctggcccacgtgttccacggacgtgctgcagaggtccccggccctccagggcaggccctctctgcttccagaggggcaggtgagccccaggccaggccaggccagccggggtctggactggagtgcagtggccacaatggacgccgcgagtgtcttcattaagagccaccagcccctcgggttccaagatgcagctactggagacagagttctcacacaccgtgggcgagctcatcgaggtgcacctgcggcgccaggacagcatccctgccttcctcagctcgctcaccctcgagctcttcagccgccagaccgtggcgtagcctgcaggctcgggggcatagccggagccactctgcttggcctgacctgcaggtcccctgccccgccagccacaggctgggtgcacgtcctgcctctccagccccacagggcagcagcatgactgacagacacgctgggacctacgtcgggcttcctgctggggcggccagcaccctctccacgtgcagaccccatgcgtcccggagcctggtgtgtgggcgtcggccaccagcctgggttcctcaccttgtgaaataaaatcttctcccctagacactcccactcgccctgtgtatctgtggcctagccctagcagggtaggcgggaggaggggaaggagctccctcagcagccgccgccatctgcagaccggacaacgttagggtgagtcaggcatttccgctcagggagtgcacaggtggcagctgggaccaagggtggctggggtgcccccccaccaccatgggctgaggcccctccgcgtagcagcttccagctctgcctcaaggccgggccccagctctggggcttccctttgctgatggaacccggatggaggcacaggggctggggggactgtcctcacagataagggtgcatcgaggagagactgccctctgtgcccatctctccagggccatagaaatacattccatagacctaagcagtatttgaatttttataacaatagcatatgtgtttcttatgtgatttactagaaacaatttaatttctcgagttgtaaaaaggtgtattttaaacctgtgtaaaggtacctggagatcattgtcattcagaataa

SEQ ID NO: 441706 - DNA, 1070 bp, Homo sapiens
atctctcggccctttcttgtctagatcatattatcttaccttgataaacctttccaaattttctggtcttctatctcgttaaatgcttttgtttttttcctctcaacaaacctgccattctctgagactcccttaagctgcagaacgggaccgaattagcagagtctgactcagacgaagtgagatgggagtgccgaatgacctgagggcactgaattcacttgtgggggttactagctccttacgctttcatttcctcatgaatttagtcactgatcaaagctttactgagcccctgctgcacgccaggagccctgtgctgggggagcggatctgtgcggagtctactgtgatcttctccaggagcactggggagaatgggcagctgttgggatgttgggaagtggtcaggagtctctgggaagaggtaatatgtgggctaggaacacatttccaaggtggagaaggagacaaagcttgggaggattcggcaagatgccactgcctcactgattttgctctggaaggtcacggccacaggattccaacagtgctccctcatagatggacgaagtgtgaccccccttcaggcttcagggggactggtcctcctggaggagatgctcgccttggggaataatcactttattggtccactgtaacttcaaaggggtgaatggtacaacccatggctgataagaatgtccttgttggagctgaggtcatttcttcaggattatagccatcaaattaaccatggaaccctggaaatcaacaatttgcaggtctttctaattgacgtcttaactggattagaaggtttcccagtcagcccatgactcctctgagcctcctgggagctctagagagagtgctttcagttgccttgattctacatttctagcctgaaaagattcttgttttgaaaatggttcctacggtagtgtattcactttgtttgttttttctcttgagaaataagacatgaataactaggtactttaggaggtacaaggaggaataagacttttcttttactaaagtagtaagactgtcctggtgctctggcc

SEQ ID NO: 441707 - DNA, 3184 bp, Homo sapiens
  misc_feature (12)..(12): n is a, c, g, or t
  misc_feature (15)..(15): n is a, c, g, or t
gcagctctcgtngcnactgccaccgccgcgccgtcactgcgtcctggctccggctccggccatgcagccccgcggcgcccaggcgcccggtgtgcagctgctgcccgcgctggccctaatgcgattgctgctaggagcggggccccaaggcagctccctggccaacccggtgcccgccgcgcccctgtctgcgcccgggccgtgcgccgcgcagccctgccggaatgggggtgtgtgcacctcgcgccctgagccggacccgcagcacccggcccccgccggcgagcctggctacagctgcacctgccccgccgggatctccggcgccaactgccagcttgttgcagatccttgtgccagcaacccttgtcaccatggcaactgcagcagcagcagcagcagcagcagcgatggctacctctgcatttgcaatgaaggctatgaaggtcccaactgtgaacaggcacttcccagtctcccagccactggctggaccgaatccatggcaccccgacagcttcagcctgttcctgctactcaggagcctgacaaaatcctgcctcgctctcaggcaacggtgacactgcctacctggcagccgaaaacagggcagaaagttgtagaaatgaaatgggatcaagtggaggtgatcccagatattgcctgtgggaatgccagttctaacagctctgcgggtggccgcctggtatcctttgaagtgccacagaacacctcagtcaagattcggcaagatgccactgcctcactgattttgctctggaaggtcacggccacaggattccaacagtgctccctcatagatggacgaagtgtgaccccccttcaggcttcagggggactggtcctcctggaggagatgctcgccttggggaataatcactttattggttttgtgaatgattctgtgactaagtctattgtggctttgcgcttaactctggtggtgaaggtcagcacctgtgtgccgggggagagtcacgcaaatgacttggagtgttcaggaaaaggaaaatgcaccacgaagccgtcagaggcaactttttcctgtacctgtgaggagcagtacgtgggtactttctgtgaagaatacgatgcttgccagaggaaaccttgccaaaacaacgcgagctgtattgatgcaaatgaaaagcaagatgggagcaatttcacctgtgtttgccttcctggttatactggagagctttgccagtccaagattgattactgcatcctagacccatgcagaaatggagcaacatgcatttccagtctcagtggattcacctgccagtgtccagaaggatacttcggatctgcttgtgaagaaaaggtggacccctgcgcctcgtctccgtgccagaacaacggcacctgctatgtggacggggtacactttacctgcaactgcagcccgggcttcacagggccgacctgtgcccagcttattgacttctgtgccctcagcccctgtgctcatggcacgtgccgcagcgtgggcaccagctacaaatgcctctgtgatccaggttaccatggcctctactgtgaggaggaatataatgagtgcctctccgctccatgcctgaatgcagccacctgcagggacctcgttaatggctatgagtgtgtgtgcctggcagaatacaaaggaacacactgtgaattgtacaaggatccctgcgctaacgtcagctgtctgaacggagccacctgtgacagcgacggcctgaatggcacgtgcatctgtgcacccgggtttacaggtgaagagtgcgacattgacataaatgaatgtgacagtaacccctgccaccatggtgggagctgcctggaccagcccaatggttataactgccactgcccgcatggttgggtgggagcaaactgtgagatccacctccaatggaagtccgggcacatggcggagagcctcaccaacatgccacggcactccctctacatcatcattggagccctctgcgtggccttcatccttatgctgatcatcctgatcgtggggatttgccgcatcagccgcattgaataccagggttcttccaggccagcctatgaggagttctacaactgccgcagcatcgacagcgagttcagcaatgccattgcatccatccggcatgccaggtttggaaagaaatcccggcctgcaatgtatgatgtgagccccatcgcctatgaagattacagtcctgatgacaaacccttggtcacactgattaaaactaaagatttgtaatctttttttggattatttttcaaaaagatgagatactacactcatttaaatatttttaagaaaataaaaagcttaagaaatttaaaatgctagctgctcaagagttttcagtagaatatttaagaactaattttctgcagcttttagtttggaaaaaatattttaaaaacaaaatttgtgaaacctatagacgatgttttaatgtaccttcagctctctaaactgtgtgcttctactagtgtgtgctcttttcactgtagacactatcacgagacccagattaatttctgtggttgttacagaataagtctaatcaaggagaagtttctgtttgacgtttgagtgccggctttctgagtagagttaggaaaaccacgtaacgtagcatatgatgtataatagagtatacccgttacttaaaaagaagtctgaaatgttcgttttgtggaaaagaaactagttaaatttactattcctaacccgaatgaaattagcctttgccttattctgtgcatgggtaagtaacttatttctgcactgttttgttgaactttgtggaaacattctttcgagtttgtttttgtcattttcgtaacagtcgtcgaactaggcctcaaaaacatacgtaacgaaaaggcctagcgaggcaaattctgattgatttgaatctatatttttctttaaaaagtcaagggttctatattgtgagtaaattaaatttacatttgagttgtttgttgctaagaggtagtaaatgtaagagagtactggttccttcagtagtgagtatttctcatagtgcagctttatttatctccaggatgtttttgtggctgtatttgattgatatgtgcttcttctgattcttgctaatttccaaccatattgaataaatgtgatcaagtcaag

SEQ ID NO: 441708 - DNA, 3064 bp, Homo sapiens
  misc_feature (12)..(12): n is a, c, g, or t
  misc_feature (15)..(15): n is a, c, g, or t
gcagctctcgtngcnactgccaccgccgcgccgtcactgcgtcctggctccggctcccgcgcccctgtctgcgcccgggccgtgcgccgcgcagccctgccggaatgggggtgtgtgcacctcgcgccctgagccggacccgcagcacccggcccccgccggcgagcctggctacagctgcacctgccccgccgggatctccggcgccaactgccagcttgttgcagatccttgtgccagcaacccttgtcaccatggcaactgcagcagcagcagcagcagcagcagcgatggctacctctgcatttgcaatgaaggctatgaaggtcccaactgtgaacaggcacttcccagtctcccagccactggctggaccgaatccatggcaccccgacagcttcagcctgttcctgctactcaggagcctgacaaaatcctgcctcgctctcaggcaacggtgacactgcctacctggcagccgaaaacagggcagaaagttgtagaaatgaaatgggatcaagtggaggtgatcccagatattgcctgtgggaatgccagttctaacagctctgcgggtggccgcctggtatcctttgaagtgccacagaacacctcagtcaagattcggcaagatgccactgcctcactgattttgctctggaaggtcacggccacaggattccaacagtgctccctcatagatggacgaagtgtgaccccccttcaggcttcagggggactggtcctcctggaggagatgctcgccttggggaataatcactttattggttttgtgaatgattctgtgactaagtctattgtggctttgcgcttaactctggtggtgaaggtcagcacctgtgtgccgggggagagtcacgcaaatgacttggagtgttcaggaaaaggaaaatgcaccacgaagccgtcagaggcaactttttcctgtacctgtgaggagcagtacgtgggtactttctgtgaagaatacgatgcttgccagaggaaaccttgccaaaacaacgcgagctgtattgatgcaaatgaaaagcaagatgggagcaatttcacctgtgtttgccttcctggttatactggagagctttgccagtccaagattgattactgcatcctagacccatgcagaaatggagcaacatgcatttccagtctcagtggattcacctgccagtgtccagaaggatacttcggatctgcttgtgaagaaaaggtggacccctgcgcctcgtctccgtgccagaacaacggcacctgctatgtggacggggtacactttacctgcaactgcagcccgggcttcacagggccgacctgtgcccagcttattgacttctgtgccctcagcccctgtgctcatggcacgtgccgcagcgtgggcaccagctacaaatgcctctgtgatccaggttaccatggcctctactgtgaggaggaatataatgagtgcctctccgctccatgcctgaatgcagccacctgcagggacctcgttaatggctatgagtgtgtgtgcctggcagaatacaaaggaacacactgtgaattgtacaaggatccctgcgctaacgtcagctgtctgaacggagccacctgtgacagcgacggcctgaatggcacgtgcatctgtgcacccgggtttacaggtgaagagtgcgacattgacataaatgaatgtgacagtaacccctgccaccatggtgggagctgcctggaccagcccaatggttataactgccactgcccgcatggttgggtgggagcaaactgtgagatccacctccaatggaagtccgggcacatggcggagagcctcaccaacatgccacggcactccctctacatcatcattggagccctctgcgtggccttcatccttatgctgatcatcctgatcgtggggatttgccgcatcagccgcattgaataccagggttcttccaggccagcctatgaggagttctacaactgccgcagcatcgacagcgagttcagcaatgccattgcatccatccggcatgccaggtttggaaagaaatcccggcctgcaatgtatgatgtgagccccatcgcctatgaagattacagtcctgatgacaaacccttggtcacactgattaaaactaaagatttgtaatctttttttggattatttttcaaaaagatgagatactacactcatttaaatatttttaagaaaataaaaagcttaagaaatttaaaatgctagctgctcaagagttttcagtagaatatttaagaactaattttctgcagcttttagtttggaaaaaatattttaaaaacaaaatttgtgaaacctatagacgatgttttaatgtaccttcagctctctaaactgtgtgcttctactagtgtgtgctcttttcactgtagacactatcacgagacccagattaatttctgtggttgttacagaataagtctaatcaaggagaagtttctgtttgacgtttgagtgccggctttctgagtagagttaggaaaaccacgtaacgtagcatatgatgtataatagagtatacccgttacttaaaaagaagtctgaaatgttcgttttgtggaaaagaaactagttaaatttactattcctaacccgaatgaaattagcctttgccttattctgtgcatgggtaagtaacttatttctgcactgttttgttgaactttgtggaaacattctttcgagtttgtttttgtcattttcgtaacagtcgtcgaactaggcctcaaaaacatacgtaacgaaaaggcctagcgaggcaaattctgattgatttgaatctatatttttctttaaaaagtcaagggttctatattgtgagtaaattaaatttacatttgagttgtttgttgctaagaggtagtaaatgtaagagagtactggttccttcagtagtgagtatttctcatagtgcagctttatttatctccaggatgtttttgtggctgtatttgattgatatgtgcttcttctgattcttgctaatttccaaccatattgaataaatgtgatcaagtcaag

SEQ ID NO: 441709 - DNA, 2941 bp, Homo sapiens
  misc_feature (12)..(12): n is a, c, g, or t
  misc_feature (15)..(15): n is a, c, g, or t
gcagctctcgtngcnactgccaccgccgcgccgtcactgcgtcctggctccggctcccgcgcccctgtctgcgcccgggccgtgcgccgcgcagccctgccggaatgggggtgtgtgcacctcgcgccctgagccggacccgcagcacccggcccccgccggcgagcctggctacagctgcacctgccccgccgggatctccggcgccaactgccagcttgttgcagatccttgtgccagcaacccttgtcaccatggcaactgcagcagcagcagcagcagcagcagcgatggctacctctgcatttgcaatgaaggctatgaaggtcccaactgtgaacaggcacttcccagtctcccagccactggctggaccgaatccatggcaccccgacagcttcagcctgttcctgctactcaggagcctgacaaaatcctgcctcgctctcaggcaacggtgacactgcctacctggcagccgaaaacagggcagaaagttgtagaaatgaaatgggatcaagtggaggtgatcccagatattgcctgtgggaatgccagttctaacagctctgcgggtggccgcctggtatcctttgaagtgccacagaacacctcagtcaagattcggcaagatgccactgcctcactgattttgctctggaaggtcacggccacaggattccaacagtgctccctcatagatggacgaagtgtgaccccccttcaggcttcagggggactggtcctcctggaggagatgctcgccttggggaataatcactttattggttttgtgaatgattctgtgactaagtctattgtggctttgcgcttaactctggtggtgaaggtcagcacctgtgtgccgggggagagtcacgcaaatgacttggagtgttcaggaaaaggaaaatgcaccacgaagccgtcagaggcaactttttcctgtacctgtgaggagcagtacgtgggtactttctgtgaagaatacgatgcttgccagaggaaaccttgccaaaacaacgcgagctgtattgatgcaaatgaaaagcaagatgggagcaatttcacctgtgtttgccttcctggttatactggagagctttgccagtccaagattgattactgcatcctagacccatgcagaaatggagcaacatgcatttccagtctcagtggattcacctgccagtgtccagaaggatacttcggatctgcttgtgaagaaaaggtggacccctgcgcctcgtctccgtgccagaacaacggcacctgctatgtggacggggtacactttacctgcaactgcagcccgggcttcacagggccgacctgtgcccagcttattgacttctgtgccctcagcccctgtgctcatggcacgtgccgcagcgtgggcaccagctacaaatgcctctgtgatccaggaacacactgtgaattgtacaaggatccctgcgctaacgtcagctgtctgaacggagccacctgtgacagcgacggcctgaatggcacgtgcatctgtgcacccgggtttacaggtgaagagtgcgacattgacataaatgaatgtgacagtaacccctgccaccatggtgggagctgcctggaccagcccaatggttataactgccactgcccgcatggttgggtgggagcaaactgtgagatccacctccaatggaagtccgggcacatggcggagagcctcaccaacatgccacggcactccctctacatcatcattggagccctctgcgtggccttcatccttatgctgatcatcctgatcgtggggatttgccgcatcagccgcattgaataccagggttcttccaggccagcctatgaggagttctacaactgccgcagcatcgacagcgagttcagcaatgccattgcatccatccggcatgccaggtttggaaagaaatcccggcctgcaatgtatgatgtgagccccatcgcctatgaagattacagtcctgatgacaaacccttggtcacactgattaaaactaaagatttgtaatctttttttggattatttttcaaaaagatgagatactacactcatttaaatatttttaagaaaataaaaagcttaagaaatttaaaatgctagctgctcaagagttttcagtagaatatttaagaactaattttctgcagcttttagtttggaaaaaatattttaaaaacaaaatttgtgaaacctatagacgatgttttaatgtaccttcagctctctaaactgtgtgcttctactagtgtgtgctcttttcactgtagacactatcacgagacccagattaatttctgtggttgttacagaataagtctaatcaaggagaagtttctgtttgacgtttgagtgccggctttctgagtagagttaggaaaaccacgtaacgtagcatatgatgtataatagagtatacccgttacttaaaaagaagtctgaaatgttcgttttgtggaaaagaaactagttaaatttactattcctaacccgaatgaaattagcctttgccttattctgtgcatgggtaagtaacttatttctgcactgttttgttgaactttgtggaaacattctttcgagtttgtttttgtcattttcgtaacagtcgtcgaactaggcctcaaaaacatacgtaacgaaaaggcctagcgaggcaaattctgattgatttgaatctatatttttctttaaaaagtcaagggttctatattgtgagtaaattaaatttacatttgagttgtttgttgctaagaggtagtaaatgtaagagagtactggttccttcagtagtgagtatttctcatagtgcagctttatttatctccaggatgtttttgtggctgtatttgattgatatgtgcttcttctgattcttgctaatttccaaccatattgaataaatgtgatcaagtcaag

SEQ ID NO: 441710 - DNA, 460 bp, Homo sapiens
ggccacgaggccggccacgaggttttttccctctcttgcggagcgcctggctacagccctgcagaagctggaggaggccgagaaggcggctgatgagagcgagagaggaatgaaggtcatcgaaaaccgggccatgaaggatgaggagaagatggaactgcaggagatgcagctgaaggaggccaagcacatcgctgaggattcagaccgcaaatatgaagaggtggccaggaagctggtgatcctggaaggagagctgctctcttctctcctctcctttccattctctctatggggaggggagcaggcaggaggagcagaaattgccaacattgcacagccaggctgggagcagcctagggagagcccccatcatgcccaccacccactctggcactggcttcatcctttacctatccccttccaccctcctttgctgcttaataaattctgaacttgg

SEQ ID NO: 441711 - DNA, 505 bp, Homo sapiens
ctactactactaaattcgcggctgtcgacgcacagcacatcgctgaggattcagaccgcaaatatgaaggtggccaggaagctggtgatcctggaaggagagctggagcgctcggaggagagggctgaggtggccgagagtaaatgtggggacctagaggaggagctgaaaattgttaccaacaacttgaaatccctggaggcccaggcggacaagtattccaccaaagaagataaatatgaagaggagatcaaactgttggaggagaagctgaaggaggctgagacccgagcagagtttgccgagaggtctgtggcaaagttggagaaaaccatcgatgacctagaagagaccttggccagtgccaaggaggagaacgtcgagattcaccagaccttggaccagaccctgctggaactcaacaacctgtgagggccagccccacccccagccaggctatggttgccaccccaacccaataaaactgatgttactagcctctcaa

SEQ ID NO: 441712 - DNA, 1781 bp, Homo sapiens
cggggagctgggtcctgagccgccgggtgctcgcaggaagggcctggctccaggggcaggggctgggaggggaggcgaggggatgagaggtcaggccggtcctgggggcagcaagcccggccacactccccaccgcgaccggggctctgggctcgcttcctgcttcagtttccccaagctcccgatgagactccgctactaccaccacgtcgataacgcaaacctagagggactcagggtaaactgaggcactcaaactgccgaggagctccgcctcccgagagacatttaatccggggggatttgcaggaaacttctaaattaagggtagcggctgctgcagctgagggggggcacgccggtccctgcgcccgggcagctgccgtgagctcacgccccgaaatagccccaggggccccagccgcagctgccactgggtccggctgtcactcagaggaagcacggagcccccagcccaagggtcccctccccttcgcatcgccggggtttttccagccgaccgtcggccactttttcctccgacggctggcagggaagagggggatgggggcgggaccccaagggaggcggtccccagtgggtgggcgaagggggcggccgcaccccccggccgggccgtgcttctgcccctacaaggtttgggccgaggtgggggagggtcctggttgccggccccgcccggtccctccccgccttttaggcgcccgcgtggccgggacgtcccagtcccgctccgtcctcctcgcctgccaccggtgcacccagtccgctcacccagcccagtccgtccggtcctcaccgcctgccggccggcccaccccccaccgcagccatggacgccatcaagaagaagatgcagatgctgaagctggacaaggagaacgccatcgaccgcgccgagcaggccgaagccgacaagaagcaagctgaggaccgctgcaagcagctggaggaggagcagcaggccctccagaagaagctgaaggggacagaggatgaggtggaaaagtattctgaatccgtgaaggaggcccaggagaaactggagcaggccgagaagaaggccactgatgctgaggcagatgtggcctccctgaaccgccgcattcagctggttgaggaggagctggaccgggcccaggagcgcctggctacagccctgcagaagctggaggaggccgagaaggcggctgatgagagcgagagaggaatgaaggtcatcgaaaaccgggccatgaaggatgaggagaagatggaactgcaggagatgcagctgaaggaggccaagcacatcgctgaggattcagaccgcaaatatgaagaggtggccaggaagctggtgatcctggaaggagagctggagcgctcggaggagagggctgaggtggccgagagccgagccagacagctggaggaggaacttcgaaccatggaccaggccctcaagtccctgatggcctcagaggaggagtattccaccaaagaagataaatatgaagaggagatcaaactgttggaggagaagctgaaggaggctgagacccgagcagagtttgccgagaggtctgtggcaaagttggagaaaaccatcgatgacctagaagagaccttggccagtgccaaggaggagaacgtcgagattcaccagaccttggaccagaccctgctggaactcaacaacctgtgagggccagccccacccccagccaggctatggttgccaccccaacccaataaaactgatgttactagcctctcaa

SEQ ID NO: 441713 - DNA, 1935 bp, Homo sapiens
cggggagctgggtcctgagccgccgggtgctcgcaggaagggcctggctccaggggcaggggctgggaggggaggcgaggggatgagaggtcaggccggtcctgggggcagcaagcccggccacactccccaccgcgaccggggctctgggctcgcttcctgcttcagtttccccaagctcccgatgagactccgctactaccaccacgtcgataacgcaaacctagagggactcagggtaaactgaggcactcaaactgccgaggagctccgcctcccgagagacatttaatccggggggatttgcaggaaacttctaaattaagggtagcggctgctgcagctgagggggggcacgccggtccctgcgcccgggcagctgccgtgagctcacgccccgaaatagccccaggggccccagccgcagctgccactgggtccggctgtcactcagaggaagcacggagcccccagcccaagggtcccctccccttcgcatcgccggggtttttccagccgaccgtcggccactttttcctccgacggctggcagggaagagggggatgggggcgggaccccaagggaggcggtccccagtgggtgggcgaagggggcggccgcaccccccggccgggccgtgcttctgcccctacaaggtttgggccgaggtgggggagggtcctggttgccggccccgcccggtccctccccgccttttaggcgcccgcgtggccgggacgtcccagtcccgctccgtcctcctcgcctgccaccggtgcacccagtccgctcacccagcccagtccgtccggtcctcaccgcctgccggccggcccaccccccaccgcagccatggacgccatcaagaagaagatgcagatgctgaagctggacaaggagaacgccatcgaccgcgccgagcaggccgaagccgacaagaagcaagctgaggaccgctgcaagcagctggaggaggagcagcaggccctccagaagaagctgaaggggacagaggatgaggtggaaaagtattctgaatccgtgaaggaggcccaggagaaactggagcaggccgagaagaaggccactgatgctgaggcagatgtggcctccctgaaccgccgcattcagctggttgaggaggagctggaccgggcccaggagcgcctggctacagccctgcagaagctggaggaggccgagaaggcggctgatgagagcgagagaggaatgaaggtcatcgaaaaccgggccatgaaggatgaggagaagatggaactgcaggagatgcagctgaaggaggccaagcacatcgctgaggattcagaccgcaaatatgaagaggtggccaggaagctggtgatcctggaaggagagctggagcgctcggaggagagggctgaggtggccgagagtaaatgtggggacctagaggaggagctgaaaattgttaccaacaacttgaaatccctggaggcccaggcggacaagtattccaccaaagaagataaatatgaagaggagatcaaactgttggaggagaagctgaaggaggctgagacccgagcagagtttgccgagaggtctgtggcaaagttggagaaaaccatcgatgacctagaagatgaagtctatgcccagaagatgaagtacaaggccattagcgaggaactggacaacgcactcaatgacatcacctccctctgagccccacgccagcgtggccacctcagctctcttctctcctctcctttccattctctctatggggaggggagcaggcaggaggagcagaaattgccaacattgcacagccaggctgggagcagcctagggagagcccccatcatgcccaccacccactctggcactggcttcatcctttacctatccccttccaccctcctttgctgcttaataaattctgaacttgg

SEQ ID NO: 441714 - DNA, 2011 bp, Homo sapiens
cggggagctgggtcctgagccgccgggtgctcgcaggaagggcctggctccaggggcaggggctgggaggggaggcgaggggatgagaggtcaggccggtcctgggggcagcaagcccggccacactccccaccgcgaccggggctctgggctcgcttcctgcttcagtttccccaagctcccgatgagactccgctactaccaccacgtcgataacgcaaacctagagggactcagggtaaactgaggcactcaaactgccgaggagctccgcctcccgagagacatttaatccggggggatttgcaggaaacttctaaattaagggtagcggctgctgcagctgagggggggcacgccggtccctgcgcccgggcagctgccgtgagctcacgccccgaaatagccccaggggccccagccgcagctgccactgggtccggctgtcactcagaggaagcacggagcccccagcccaagggtcccctccccttcgcatcgccggggtttttccagccgaccgtcggccactttttcctccgacggctggcagggaagagggggatgggggcgggaccccaagggaggcggtccccagtgggtgggcgaagggggcggccgcaccccccggccgggccgtgcttctgcccctacaaggtttgggccgaggtgggggagggtcctggttgccggccccgcccggtccctccccgccttttaggcgcccgcgtggccgggacgtcccagtcccgctccgtcctcctcgcctgccaccggtgcacccagtccgctcacccagcccagtccgtccggtcctcaccgcctgccggccggcccaccccccaccgcagccatggacgccatcaagaagaagatgcagatgctgaagctggacaaggagaacgccatcgaccgcgccgagcaggccgaagccgacaagaagcaagctgaggaccgctgcaagcagctggaggaggagcagcaggccctccagaagaagctgaaggggacagaggatgaggtggaaaagtattctgaatccgtgaaggaggcccaggagaaactggagcaggccgagaagaaggccactgatgctgaggcagatgtggcctccctgaaccgccgcattcagctggttgaggaggagctggaccgggcccaggagcgcctggctacagccctgcagaagctggaggaggccgagaaggcggctgatgagagcgagagaggaatgaaggtcatcgaaaaccgggccatgaaggatgaggagaagatggaactgcaggagatgcagctgaaggaggccaagcacatcgctgaggattcagaccgcaaatatgaagaggtggccaggaagctggtgatcctggaaggagagctggagcgctcggaggagagggctgaggtggccgagagccgagccagacagctggaggaggaacttcgaaccatggaccaggccctcaagtccctgatggcctcagaggaggagtaaatgtggggacctagaggaggagctgaaaattgttaccaacaacttgaaatccctggaggcccaggcggacaagtattccaccaaagaagataaatatgaagaggagatcaaactgttggaggagaagctgaaggaggctgagacccgagcagagtttgccgagaggtctgtggcaaagttggagaaaaccatcgatgacctagaagatgaagtctatgcccagaagatgaagtacaaggccattagcgaggaactggacaacgcactcaatgacatcacctccctctgagccccacgccagcgtggccacctcagctctcttctctcctctcctttccattctctctatggggaggggagcaggcaggaggagcagaaattgccaacattgcacagccaggctgggagcagcctagggagagcccccatcatgcccaccacccactctggcactggcttcatcctttacctatccccttccaccctcctttgctgcttaataaattctgaacttgg

SEQ ID NO: 441715 - DNA, 2401 bp, Homo sapiens
cggggagctgggtcctgagccgccgggtgctcgcaggaagggcctggctccaggggcaggggctgggaggggaggcgaggggatgagaggtcaggccggtcctgggggcagcaagcccggccacactccccaccgcgaccggggctctgggctcgcttcctgcttcagtttccccaagctcccgatgagactccgctactaccaccacgtcgataacgcaaacctagagggactcagggtaaactgaggcactcaaactgccgaggagctccgcctcccgagagacatttaatccggggggatttgcaggaaacttctaaattaagggtagcggctgctgcagctgagggggggcacgccggtccctgcgcccgggcagctgccgtgagctcacgccccgaaatagccccaggggccccagccgcagctgccactgggtccggctgtcactcagaggaagcacggagcccccagcccaagggtcccctccccttcgcatcgccggggtttttccagccgaccgtcggccactttttcctccgacggctggcagggaagagggggatgggggcgggaccccaagggaggcggtccccagtgggtgggcgaagggggcggccgcaccccccggccgggccgtgcttctgcccctacaaggtttgggccgaggtgggggagggtcctggttgccggccccgcccggtccctccccgccttttaggcgcccgcgtggccgggacgtcccagtcccgctccgtcctcctcgcctgccaccggtgcacccagtccgctcacccagcccagtccgtccggtcctcaccgcctgccggccggcccaccccccaccgcagccatggacgccatcaagaagaagatgcagatgctgaagctggacaaggagaacgccatcgaccgcgccgagcaggccgaagccgacaagaagcaagctgaggaccgctgcaagcagctggaggaggagcagcaggccctccagaagaagctgaaggggacagaggatgaggtggaaaagtattctgaatccgtgaaggaggcccaggagaaactggagcaggccgagaagaaggccactgatgctgaggcagatgtggcctccctgaaccgccgcattcagctggttgaggaggagctggaccgggcccaggagcgcctggctacagccctgcagaagctggaggaggccgagaaggcggctgatgagagcgagagaggaatgaaggtcatcgaaaaccgggccatgaaggatgaggagaagatggaactgcaggagatgcagctgaaggaggccaagcacatcgctgaggattcagaccgcaaatatgaagaggtggccaggaagctggtgatcctggaaggagagctggagcgctcggaggagagggctgaggtggccgagaggtaaagatacccgggggtgacaagtgagcccattggccctggggccttccacacagtgggaaggtagcatcctaggcttggggctgtagggacaggccctgttctctgacccctgcccgctgcccccagccgagccagacagctggaggaggaacttcgaaccatggaccaggccctcaagtccctgatggcctcagaggaggagggtagtgacccctctgaacctttctgggcaatggcgccttctctcagctcaccttccctccgtctcagcaccgcaggctgctctttctcagctgctggggatcaggaagggcctggggcttctgagccctgcctgctgtcactctcacaactttgctcttctcttctctcctccacccgtcccctgctgtgccatctccactgtctggcttcgctgtgccctcacaccctgccccccccgccacacaccccctgcagtaaataaatgtggggacctagaggaggagctgaaaattgttaccaacaacttgaaatccctggaggcccaggcggacaagtattccaccaaagaagataaatatgaagaggagatcaaactgttggaggagaagctgaaggaggctgagacccgagcagagtttgccgagaggtctgtggcaaagttggagaaaaccatcgatgacctagaagatgaagtctatgcccagaagatgaagtacaaggccattagcgaggaactggacaacgcactcaatgacatcacctccctctgagccccacgccagcgtggccacctcagctctcttctctcctctcctttccattctctctatggggaggggagcaggcaggaggagcagaaattgccaacattgcacagccaggctgggagcagcctagggagagcccccatcatgcccaccacccactctggcactggcttcatcctttacctatccccttccaccctcctttgctgcttaataaattctgaacttgg

SEQ ID NO: 441716 - DNA, 2857 bp, Homo sapiens
cggggagctgggtcctgagccgccgggtgctcgcaggaagggcctggctccaggggcaggggctgggaggggaggcgaggggatgagaggtcaggccggtcctgggggcagcaagcccggccacactccccaccgcgaccggggctctgggctcgcttcctgcttcagtttccccaagctcccgatgagactccgctactaccaccacgtcgataacgcaaacctagagggactcagggtaaactgaggcactcaaactgccgaggagctccgcctcccgagagacatttaatccggggggatttgcaggaaacttctaaattaagggtagcggctgctgcagctgagggggggcacgccggtccctgcgcccgggcagctgccgtgagctcacgccccgaaatagccccaggggccccagccgcagctgccactgggtccggctgtcactcagaggaagcacggagcccccagcccaagggtcccctccccttcgcatcgccggggtttttccagccgaccgtcggccactttttcctccgacggctggcagggaagagggggatgggggcgggaccccaagggaggcggtccccagtgggtgggcgaagggggcggccgcaccccccggccgggccgtgcttctgcccctacaaggtttgggccgaggtgggggagggtcctggttgccggccccgcccggtccctccccgccttttaggcgcccgcgtggccgggacgtcccagtcccgctccgtcctcctcgcctgccaccggtgcacccagtccgctcacccagcccagtccgtccggtcctcaccgcctgccggccggcccaccccccaccgcagccatggacgccatcaagaagaagatgcagatgctgaagctggacaaggagaacgccatcgaccgcgccgagcaggccgaagccgacaagaagcaagctgaggaccgctgcaagcagctggaggaggagcagcaggccctccagaagaagctgaaggggacagaggatgaggtggaaaagtattctgaatccgtgaaggaggcccaggagaaactggagcaggccgagaagaaggccactgatgctgaggcagatgtggcctccctgaaccgccgcattcagctggttgaggaggagctggaccgggcccaggagcgcctggctacagccctgcagaagctggaggaggccgagaaggcggctgatgagagcgagagaggaatgaaggtcatcgaaaaccgggccatgaaggatgaggagaagatggaactgcaggagatgcagctgaaggaggccaagcacatcgctgaggattcagaccgcaaatatgaagaggtggccaggaagctggtgatcctggaaggagagctggagcgctcggaggagagggctgaggtggccgagagtaaatgtggggacctagaggaggagctgaaaattgttaccaacaacttgaaatccctggaggcccaggcggacaagtattccaccaaagaagataaatatgaagaggagatcaaactgttggaggagaagctgaaggaggctgagacccgagcagagtttgccgagaggtctgtggcaaagttggagaaaaccatcgatgacctagaagatgaagtctatgcccagaagatgaagtacaaggccattagcgaggaactggacaacgcactcaatgacatcacctccctctgagccccacgccagcgtggccacctcagctctcttctctcctctcctttccattctctctatggggaggggagcaggcaggaggagcagaaattgccaacattgcacagccaggctgggagcagcctagggagagcccccatcatgcccaccacccactctggcactggcttcatcctttacctatccccttccaccctcctttgctgcttaataaattctgaacttggtccatgctgttttcctgccctccagagagcacctctatcgccaccacggagcactggttcactcctgacaccctggcacttactgacacccccagcccctgcactgagcccacccacaaaacaccatggcccacgctgaaacccctctgcacaggcactcccctggctgtcgctctctgattcaccactgcatgtgggcacgtgtggccccatcaaaccatgaccgcctctggtgccaatccctgacctcagagcacttagctggggttccaggatcaaacagagtgactggaaaggaagtagggtggtgaggtgcaggacaggggcaagaaggttgcaaaaggtctggaatggagcttggaaaaatgttggatatcagcaacatggggctttcactgcagcagcaggtctgttttctacctcaagtctgtctgtctggcccttcctttcctggcgcagtctttgtcttaccttctgtctccaacttccttaaaccttctaaagaagaggataaagtagtttatgactcagccctccccaccccacctctatgaccccaaggccttgagtgaggcatccacgtccgtcctgttcccctcatcctagtcagtccatctgtttgtccctgccatggggccctgaggtccgtgaatgcatgtgtcttccttgacccactccatgtctatatgtcaccttcccctggccctgcctccccacgtctcccccttgtgtctcccttctccctcacctgctgcttcccctcacaagaccttggccagtgccaaggaggagaacgtcgagattcaccagaccttggaccagaccctgctggaactcaacaacctgtgagggccagccccacccccagccaggctatggttgccaccccaacccaataaaactgatgttactagcctctcaa

SEQ ID NO: 441717 - DNA, 2498 bp, Homo sapiens
cggggagctgggtcctgagccgccgggtgctcgcaggaagggcctggctccaggggcaggggctgggaggggaggcgaggggatgagaggtcaggccggtcctgggggcagcaagcccggccacactccccaccgcgaccggggctctgggctcgcttcctgcttcagtttccccaagctcccgatgagactccgctactaccaccacgtcgataacgcaaacctagagggactcagggtaaactgaggcactcaaactgccgaggagctccgcctcccgagagacatttaatccggggggatttgcaggaaacttctaaattaagggtagcggctgctgcagctgagggggggcacgccggtccctgcgcccgggcagctgccgtgagctcacgccccgaaatagccccaggggccccagccgcagctgccactgggtccggctgtcactcagaggaagcacggagcccccagcccaagggtcccctccccttcgcatcgccggggtttttccagccgaccgtcggccactttttcctccgacggctggcagggaagagggggatgggggcgggaccccaagggaggcggtccccagtgggtgggcgaagggggcggccgcaccccccggccgggccgtgcttctgcccctacaaggtttgggccgaggtgggggagggtcctggttgccggccccgcccggtccctccccgccttttaggcgcccgcgtggccgggacgtcccagtcccgctccgtcctcctcgcctgccaccggtgcacccagtccgctcacccagcccagtccgtccggtcctcaccgcctgccggccggcccaccccccaccgcagccatggacgccatcaagaagaagatgcagatgctgaagctggacaaggagaacgccatcgaccgcgccgagcaggccgaagccgacaagaagcaagctgaggaccgctgcaagcagctggaggaggagcagcaggccctccagaagaagctgaaggggacagaggatgaggtggaaaagtattctgaatccgtgaaggaggcccaggagaaactggagcaggccgagaagaaggccactgatgctgaggcagatgtggcctccctgaaccgccgcattcagctggttgaggaggagctggaccgggcccaggagcgcctggctacagccctgcagaagctggaggaggccgagaaggcggctgatgagagcgagagaggaatgaaggtcatcgaaaaccgggccatgaaggatgaggagaagatggaactgcaggagatgcagctgaaggaggccaagcacatcgctgaggattcagaccgcaaatatgaagaggtggccaggaagctggtgatcctggaaggagagctggagcgctcggaggagagggctgaggtggccgagagtaaatgtggggacctagaggaggagctgaaaattgttaccaacaacttgaaatccctggaggcccaggcggacaagtattccaccaaagaagataaatatgaagaggagatcaaactgttggaggagaagctgaaggaggctgagacccgagcagagtttgccgagaggtctgtggcaaagttggagaaaaccatcgatgacctagaagatgaagtctatgcccagaagatgaagtacaaggccattagcgaggaactggacaacgcactcaatgacatcacctccctctgagccccacgccagcgtggccacctcagctctcttctctcctctcctttccattctctctatggggaggggagcaggcaggaggagcagaaattgccaacattgcacagccaggctgggagcagcctagggagagcccccatcatgcccaccacccactctggcactggcttcatcctttacctatccccttccaccctcctttgctgcttaataaattctgaacttggtccatgctgttttcctgccctccagagagcacctctatcgccaccacggagcactggttcactcctgacaccctggcacttactgacacccccagcccctgcactgagcccacccacaaaacaccatggcccacgctgaaacccctctgcacaggcactcccctggctgtcgctctctgattcaccactgcatgtgggcacgtgtggccccatcaaaccatgaccgcctctggtgccaatccctgacctcagagcacttagctggggttccaggatcaaacagagtgactggaaaggaagtagggtggtgaggtgcaggacaggggcaagaaggttgcaaaaggtctggaatggagcttggaaaaatgttggatatcagcaacatggggctttcactgcagcagcagagaccttggccagtgccaaggaggagaacgtcgagattcaccagaccttggaccagaccctgctggaactcaacaacctgtgagggccagccccacccccagccaggctatggttgccaccccaacccaataaaactgatgttactagcctctcaa

SEQ ID NO: 441718 - DNA, 1847 bp, Homo sapiens
  misc_feature (1827)..(1827): n is a, c, g, or t
  misc_feature (1833)..(1833): n is a, c, g, or t
  misc_feature (1837)..(1837): n is a, c, g, or t
  misc_feature (1841)..(1841): n is a, c, g, or t
cggggagctgggtcctgagccgccgggtgctcgcaggaagggcctggctccaggggcaggggctgggaggggaggcgaggggatgagaggtcaggccggtcctgggggcagcaagcccggccacactccccaccgcgaccggggctctgggctcgcttcctgcttcagtttccccaagctcccgatgagactccgctactaccaccacgtcgataacgcaaacctagagggactcagggtaaactgaggcactcaaactgccgaggagctccgcctcccgagagacatttaatccggggggatttgcaggaaacttctaaattaagggtagcggctgctgcagctgagggggggcacgccggtccctgcgcccgggcagctgccgtgagctcacgccccgaaatagccccaggggccccagccgcagctgccactgggtccggctgtcactcagaggaagcacggagcccccagcccaagggtcccctccccttcgcatcgccggggtttttccagccgaccgtcggccactttttcctccgacggctggcagggaagagggggatgggggcgggaccccaagggaggcggtccccagtgggtgggcgaagggggcggccgcaccccccggccgggccgtgcttctgcccctacaaggtttgggccgaggtgggggagggtcctggttgccggccccgcccggtccctccccgccttttaggcgcccgcgtggccgggacgtcccagtcccgctccgtcctcctcgcctgccaccggtgcacccagtccgctcacccagcccagtccgtccggtcctcaccgcctgccggccggcccaccccccaccgcagccatggacgccatcaagaagaagatgcagatgctgaagctggacaaggagaacgccatcgaccgcgccgagcaggccgaagccgacaagaagcaagctgaggaccgctgcaagcagctggaggaggagcagcaggccctccagaagaagctgaaggggacagaggatgaggtggaaaagtattctgaatccgtgaaggaggcccaggagaaactggagcaggccgagaagaaggccactgatgctgaggcagatgtggcctccctgaaccgccgcattcagctggttgaggaggagctggaccgggcccaggagcgcctggctacagccctgcagaagctggaggaggccgagaaggcggctgatgagagcgagagaggaatgaaggtcatcgaaaaccgggccatgaaggatgaggagaagatggaactgcaggagatgcagctgaaggaggccaagcacatcgctgaggattcagaccgcaaatatgaagaggtggccaggaagctggtgatcctggaaggagagctggagcgctcggaggagagggctgaggtggccgagagccgagccagacagctggaggaggaacttcgaaccatggaccaggccctcaagtccctgatggcctcagaggaggagtattccaccaaagaagataaatatgaagaggagatcaaactgttggaggagaagctgaaggaggctgagacccgagcagagtttgccgagaggtctgtggcaaagttggagaaaaccatcgatgacctagaagagaccttggccagtgccaaggaggagaacgtcgagattcaccagaccttggaccagaccctgctggaactcaacaacctgtgagggccagccccacccccagccaggctatggttgccaccccaacccaataaaactgatgttactagcctctcaaaaaaaaaaaaaaaaaaaaagaaaaaaaaaaaaaagaaaaaaaaaanaaaaangaanaatnaaaaca

SEQ ID NO: 441719 - DNA, 1034 bp, Homo sapiens
ctactactactaaattcgcggccgcgtcgacccgacaagaagcaagctgaggaccgctgcaagcagctggaggaggagcagcaggccctccagaagaagctgaaggggacagaggatgaggtggaaaagtattctgaatccgtgaaggaggcccaggagaaactggagcaggccgagaagaaggccactgatgctgaggcagatgtggcctccctgaaccgccgcattcagctggttgaggaggagctggaccgggcccaggagcgcctggctacagccctgcagaagctggaggaggccgagaaggcggctgatgagagcgagagaggaatgaaggtcatcgaaaaccgggccatgaaggatgaggagaagatggaactgcaggagatgcagctgaaggaggccaagcacatcgctgaggattcagaccgcaaatatgaagaggtggccaggaagctggtgatcctggaaggagagctggagcgctcggaggagagggctgaggtggccgagagtaaatgtggggacctagaggaggagctgaaaattgttaccaacaacttgaaatccctggaggcccaggcggacaagtattccaccaaagaagataaatatgaagaggagatcaaactgttggaggagaagctgaaggaggctgagacccgagcagagtttgccgagaggtctgtggcaaagttggagaaaaccatcgatgacctagaagatgaagtctatgcccagaagatgaagtacaaggccattagcgaggaactggacaacgcactcaatgacatcacctccctctgagccccacgccagcgtggccacctcagctctcttctctcctctcctttccattctctctatggggaggggagcaggcaggaggagcagaaattgccaacattgcacagccaggctgggagcagcctagggagagcccccatcatgcccaccacccactctggcactggcttcatcctttacctatccccttccaccctcctttgctgcttaataaattctgaacttgg

SEQ ID NO: 441720 - DNA, 2205 bp, Homo sapiens
cggggagctgggtcctgagccgccgggtgctcgcaggaagggcctggctccaggggcaggggctgggaggggaggcgaggggatgagaggtcaggccggtcctgggggcagcaagcccggccacactccccaccgcgaccggggctctgggctcgcttcctgcttcagtttccccaagctcccgatgagactccgctactaccaccacgtcgataacgcaaacctagagggactcagggtaaactgaggcactcaaactgccgaggagctccgcctcccgagagacatttaatccggggggatttgcaggaaacttctaaattaagggtagcggctgctgcagctgagggggggcacgccggtccctgcgcccgggcagctgccgtgagctcacgccccgaaatagccccaggggccccagccgcagctgccactgggtccggctgtcactcagaggaagcacggagcccccagcccaagggtcccctccccttcgcatcgccggggtttttccagccgaccgtcggccactttttcctccgacggctggcagggaagagggggatgggggcgggaccccaagggaggcggtccccagtgggtgggcgaagggggcggccgcaccccccggccgggccgtgcttctgcccctacaaggtttgggccgaggtgggggagggtcctggttgccggccccgcccggtccctccccgccttttaggcgcccgcgtggccgggacgtcccagtcccgctccgtcctcctcgcctgccaccggtgcacccagtccgctcacccagcccagtccgtccggtcctcaccgcctgccggccggcccaccccccaccgcagccatggacgccatcaagaagaagatgcagatgctgaagctggacaaggagaacgccatcgaccgcgccgagcaggccgaagccgacaagaagcaagctgaggaccgctgcaagcagctggaggaggagcagcaggccctccagaagaagctgaaggggacagaggatgaggtggaaaagtattctgaatccgtgaaggaggcccaggagaaactggagcaggccgagaagaaggccactgatgctgaggcagatgtggcctccctgaaccgccgcattcagctggttgaggaggagctggaccgggcccaggagcgcctggctacagccctgcagaagctggaggaggccgagaaggcggctgatgagagcgagagctgaaggaggccaagcacatcgctgaggattcagaccgcaaatatgaagaggtggccaggaagctggtgatcctggaaggagagctggagcgctcggaggagagggctgaggtggccgagagccgagccagacagctggaggaggaacttcgaaccatggaccaggccctcaagtccctgatggcctcagaggaggagggtagtgacccctctgaacctttctgggcaatggcgccttctctcagctcaccttccctccgtctcagcaccgcaggctgctctttctcagctgctggggatcaggaagggcctggggcttctgagccctgcctgctgtcactctcacaactttgctcttctcttctctcctccacccgtcccctgctgtgccatctccactgtctggcttcgctgtgccctcacaccctgccccccccgccacacaccccctgcagtaaataaatgtggggacctagaggaggagctgaaaattgttaccaacaacttgaaatccctggaggcccaggcggacaagtattccaccaaagaagataaatatgaagaggagatcaaactgttggaggagaagctgaaggaggctgagacccgagcagagtttgccgagaggtctgtggcaaagttggagaaaaccatcgatgacctagaagatgaagtctatgcccagaagatgaagtacaaggccattagcgaggaactggacaacgcactcaatgacatcacctccctctgagccccacgccagcgtggccacctcagctctcttctctcctctcctttccattctctctatggggaggggagcaggcaggaggagcagaaattgccaacattgcacagccaggctgggagcagcctagggagagcccccatcatgcccaccacccactctggcactggcttcatcctttacctatccccttccaccctcctttgctgcttaataaattctgaacttgg

SEQ ID NO: 441721 - DNA, 1233 bp, Homo sapiens
ggaccgtgctcgtatgaggtcggtgaaactggagcggcgagaagaaggcacgatgctgaggcagatgtggcctccctgaaccgccgcattcagctggttgaggaggagctggaccgggcccaggagcgcctggctacagccctgcagaagctggaggaggccgagaaggcggctgatgagagcgagagaggaatgaaggtcatcgaaaaccgggccatgaaggatgaggagaagatggaactgcaggagatgcagctgaaggaggccaagcacatcgctgaggattcagaccgcaaatatgaagaggtggccaggaagctggtgatcctggaaggagagctggagcgctcggaggagagggctgaggtggccgagagccgagccagacagctggaggaggaacttcgaaccatggaccaggccctcaagtccctgatggcctcagaggaggagggtagtgacccctctgaacctttctgggcaatggcgccttctctcagctcaccttccctccgtctcagcaccgcaggctgctctttctcagctgctggggatcaggaagggcctggggcttctgagccctgcctgctgtcactctcacaactttgctcttctcttctctcctccacccgtcccctgctgtgccatctccactgtctggcttcgctgtgccctcacaccctgccccccccgccacacaccccctgcagtaaataaatgtggggacctagaggaggagctgaaaattgttaccaacaacttgaaatccctggaggcccaggcggacaagtattccaccaaagaagataaatatgaagaggagatcaaactgttggaggagaagctgaaggaggctgagacccgagcagagtttgccgagaggtctgtggcaaagttggagaaaaccatcgatgacctagaagatgaagtctatgcccagaagatgaagtacaaggccattagcgaggaactggacaacgcactcaatgacatcacctccctctgagccccacgccagcgtggccacctcagctctcttctctcctctcctttccattctctctatggggaggggagcaggcaggaggagcagaaattgccaacattgcacagccaggctgggagcagcctagggagagcccccatcatgcccaccacccactctggcactggcttcatcctttacctatccccttccaccctcctttgctgcttaataaattctgaacttgg

SEQ ID NO: 441722 - DNA, 573 bp, Homo sapiens
gaatgatatctgaaaccgggacgaggagtgaggctgcagataggtggccgcgagtaaatgtggggacctagaggaggagctgaaaattgttaccaacaacttgaaatccctggaggcccaggcggacaagtattccaccaaagaagataaatatgaagaggagatcaaactgttggaggagaagctgaaggaggctgagacccgagcagagtttgccgagaggtctgtggcaaagttggagaaaaccatcgatgacctagaagatgaagtctatgcccagaagatgaagtacaaggccattagcgaggaactggacaacgcactcaatgacatcacctccctctgagccccacgccagcgtggccacctcagctctcttctctcctctcctttccattctctctatggggaggggagcaggcaggaggagcagaaattgccaacattgcacagccaggctgggagcagcctagggagagcccccatcatgcccaccacccactctggcactggcttcatcctttacctatccccttccaccctcctttgctgcttaataaattctgaacttgg

SEQ ID NO: 441723 - DNA, 803 bp, Homo sapiens
gagaaatgaaggatctgtggtagcgctgtactgatggcgtgtgtgtgtcccctaaagtattccaccaaagaagataaatatgaagaggagatcaaactgttggtaaatgtggggacctagaggaggagctgaaaattgttaccaacaacttgaaatccctggaggcccaggcggacaaggtagaggggagcagaggggcagtgaggatggggtcccacaggggagggaggtgaggggcccaaggcagggaggggctgggtgttcaacggaggcaagatgaccaggagcctacggggtacaatggagaaatgaaggatctgtggtagcgctgtactgatggcgtgtgtgtgtccccaaaagtattccaccaaagaagataaatatgaagaggagatcaaactgttggaggagaagctgaaggaggctgagacccgagcagagtttgccgagaggtctgtggcaaagttggagaaaaccatcgatgacctagaagatgaagtctatgcccagaagatgaagtacaaggccattagcgaggaactggacaacgcactcaatgacatcacctccctctgagccccacgccagcgtggccacctcagctctcttctctcctctcctttccattctctctatggggaggggagcaggcaggaggagcagaaattgccaacattgcacagccaggctgggagcagcctagggagagcccccatcatgcccaccacccactctggcactggcttcatcctttacctatccccttccaccctcctttgctgcttaataaattctgaacttgg

SEQ ID NO: 441724 - DNA, 2163 bp, Homo sapiens
cggggagctgggtcctgagccgccgggtgctcgcaggaagggcctggctccaggggcaggggctgggaggggaggcgaggggatgagaggtcaggccggtcctgggggcagcaagcccggccacactccccaccgcgaccggggctctgggctcgcttcctgcttcagtttccccaagctcccgatgagactccgctactaccaccacgtcgataacgcaaacctagagggactcagggtaaactgaggcactcaaactgccgaggagctccgcctcccgagagacatttaatccggggggatttgcaggaaacttctaaattaagggtagcggctgctgcagctgagggggggcacgccggtccctgcgcccgggcagctgccgtgagctcacgccccgaaatagccccaggggccccagccgcagctgccactgggtccggctgtcactcagaggaagcacggagcccccagcccaagggtcccctccccttcgcatcgccggggtttttccagccgaccgtcggccactttttcctccgacggctggcagggaagagggggatgggggcgggaccccaagggaggcggtccccagtgggtgggcgaagggggcggccgcaccccccggccgggccgtgcttctgcccctacaaggtttgggccgaggtgggggagggtcctggttgccggccccgcccggtccctccccgccttttaggcgcccgcgtggccgggacgtcccagtcccgctccgtcctcctcgcctgccaccggtgcacccagtccgctcacccagcccagtccgtccggtcctcaccgcctgccggccggcccaccccccaccgcagccatggacgccatcaagaagaagatgcagatgctgaagctggacaaggagaacgccatcgaccgcgccgagcaggccgaagccgacaagaagcaagctgaggaccgctgcaagcagctggaggaggagcagcaggccctccagaagaagctgaaggggacagaggatgaggtggaaaagtattctgaatccgtgaaggaggcccaggagaaactggagcaggccgagaagaaggccactgatgctgaggcagatgtggcctccctgaaccgccgcattcagctggttgaggaggagctggaccgggcccaggagcgcctggctacagccctgcagaagctggaggaggccgagaaggcggctgatgagagcgagagaggaatgaaggtcatcgaaaaccgggccatgaaggatgaggagaagatggaactgcaggagatgcagctgaaggaggccaagcacatcgctgaggattcagaccgcaaatatgaagaggtggccaggaagctggtgatcctggaaggagagctggagcgctcggaggagagggctgaggtggccgagagccgagccagacagctggaggaggaacttcgaaccatggaccaggccctcaagtccctgatggcctcagaggaggagtattccaccaaagaagataaatatgaagaggagatcaaactgttggaggagaagctgaaggaggctgagacccgagcagagtttgccgagaggtctgtggcaaagttggagaaaaccatcgatgacctagaagagagcacctctatcgccaccacggagcactggttcactcctgacaccctggcacttactgacacccccagcccctgcactgagcccacccacaaaacaccatggcccacgctgaaacccctctgcacaggcactcccctggctgtcgctctctgattcaccactgcatgtgggcacgtgtggccccatcaaaccatgaccgcctctggtgccaatccctgacctcagagcacttagctggggttccaggatcaaacagagtgactggaaaggaagtagggtggtgaggtgcaggacaggggcaagaaggttgcaaaaggtctggaatggagcttggaaaaatgttggatatcagcaacatggggctttcactgcagcagcagagaccttggccagtgccaaggaggagaacgtcgagattcaccagaccttggaccagaccctgctggaactcaacaacctgtgagggccagccccacccccagccaggctatggttgccaccccaacccaataaaactgatgttactagcctctcaa

SEQ ID NO: 441725 - DNA, 2522 bp, Homo sapiens
cggggagctgggtcctgagccgccgggtgctcgcaggaagggcctggctccaggggcaggggctgggaggggaggcgaggggatgagaggtcaggccggtcctgggggcagcaagcccggccacactccccaccgcgaccggggctctgggctcgcttcctgcttcagtttccccaagctcccgatgagactccgctactaccaccacgtcgataacgcaaacctagagggactcagggtaaactgaggcactcaaactgccgaggagctccgcctcccgagagacatttaatccggggggatttgcaggaaacttctaaattaagggtagcggctgctgcagctgagggggggcacgccggtccctgcgcccgggcagctgccgtgagctcacgccccgaaatagccccaggggccccagccgcagctgccactgggtccggctgtcactcagaggaagcacggagcccccagcccaagggtcccctccccttcgcatcgccggggtttttccagccgaccgtcggccactttttcctccgacggctggcagggaagagggggatgggggcgggaccccaagggaggcggtccccagtgggtgggcgaagggggcggccgcaccccccggccgggccgtgcttctgcccctacaaggtttgggccgaggtgggggagggtcctggttgccggccccgcccggtccctccccgccttttaggcgcccgcgtggccgggacgtcccagtcccgctccgtcctcctcgcctgccaccggtgcacccagtccgctcacccagcccagtccgtccggtcctcaccgcctgccggccggcccaccccccaccgcagccatggacgccatcaagaagaagatgcagatgctgaagctggacaaggagaacgccatcgaccgcgccgagcaggccgaagccgacaagaagcaagctgaggaccgctgcaagcagctggaggaggagcagcaggccctccagaagaagctgaaggggacagaggatgaggtggaaaagtattctgaatccgtgaaggaggcccaggagaaactggagcaggccgagaagaaggccactgatgctgaggcagatgtggcctccctgaaccgccgcattcagctggttgaggaggagctggaccgggcccaggagcgcctggctacagccctgcagaagctggaggaggccgagaaggcggctgatgagagcgagagaggaatgaaggtcatcgaaaaccgggccatgaaggatgaggagaagatggaactgcaggagatgcagctgaaggaggccaagcacatcgctgaggattcagaccgcaaatatgaagaggtggccaggaagctggtgatcctggaaggagagctggagcgctcggaggagagggctgaggtggccgagagtaaatgtggggacctagaggaggagctgaaaattgttaccaacaacttgaaatccctggaggcccaggcggacaagtattccaccaaagaagataaatatgaagaggagatcaaactgttggaggagaagctgaaggaggctgagacccgagcagagtttgccgagaggtctgtggcaaagttggagaaaaccatcgatgacctagaagagagcacctctatcgccaccacggagcactggttcactcctgacaccctggcacttactgacacccccagcccctgcactgagcccacccacaaaacaccatggcccacgctgaaacccctctgcacaggcactcccctggctgtcgctctctgattcaccactgcatgtgggcacgtgtggccccatcaaaccatgaccgcctctggtgccaatccctgacctcagagcacttagctggggttccaggatcaaacagagtgactggaaaggaagtagggtggtgaggtgcaggacaggggcaagaaggttgcaaaaggtctggaatggagcttggaaaaatgttggatatcagcaacatggggctttcactgcagcagcaggtctgttttctacctcaagtctgtctgtctggcccttcctttcctggcgcagtctttgtcttaccttctgtctccaacttccttaaaccttctaaagaagaggataaagtagtttatgactcagccctccccaccccacctctatgaccccaaggccttgagtgaggcatccacgtccgtcctgttcccctcatcctagtcagtccatctgtttgtccctgccatggggccctgaggtccgtgaatgcatgtgtcttccttgacccactccatgtctatatgtcaccttcccctggccctgcctccccacgtctcccccttgtgtctcccttctccctcacctgctgcttcccctcacaagaccttggccagtgccaaggaggagaacgtcgagattcaccagaccttggaccagaccctgctggaactcaacaacctgtgagggccagccccacccccagccaggctatggttgccaccccaacccaataaaactgatgttactagcctctcaa

SEQ ID NO: 441726 - DNA, 1857 bp, Homo sapiens
cggggagctgggtcctgagccgccgggtgctcgcaggaagggcctggctccaggggcaggggctgggaggggaggcgaggggatgagaggtcaggccggtcctgggggcagcaagcccggccacactccccaccgcgaccggggctctgggctcgcttcctgcttcagtttccccaagctcccgatgagactccgctactaccaccacgtcgataacgcaaacctagagggactcagggtaaactgaggcactcaaactgccgaggagctccgcctcccgagagacatttaatccggggggatttgcaggaaacttctaaattaagggtagcggctgctgcagctgagggggggcacgccggtccctgcgcccgggcagctgccgtgagctcacgccccgaaatagccccaggggccccagccgcagctgccactgggtccggctgtcactcagaggaagcacggagcccccagcccaagggtcccctccccttcgcatcgccggggtttttccagccgaccgtcggccactttttcctccgacggctggcagggaagagggggatgggggcgggaccccaagggaggcggtccccagtgggtgggcgaagggggcggccgcaccccccggccgggccgtgcttctgcccctacaaggtttgggccgaggtgggggagggtcctggttgccggccccgcccggtccctccccgccttttaggcgcccgcgtggccgggacgtcccagtcccgctccgtcctcctcgcctgccaccggtgcacccagtccgctcacccagcccagtccgtccggtcctcaccgcctgccggccggcccaccccccaccgcagccatggacgccatcaagaagaagatgcagatgctgaagctggacaaggagaacgccatcgaccgcgccgagcaggccgaagccgacaagaagcaagctgaggaccgctgcaagcagctggaggaggagcagcaggccctccagaagaagctgaaggggacagaggatgaggtggaaaagtattctgaatccgtgaaggaggcccaggagaaactggagcaggccgagaagaaggccactgatgctgaggcagatgtggcctccctgaaccgccgcattcagctggttgaggaggagctggaccgggcccaggagcgcctggctacagccctgcagaagctggaggaggccgagaaggcggctgatgagagcgagagaggaatgaaggtcatcgaaaaccgggccatgaaggatgaggagaagatggaactgcaggagatgcagctgaaggaggccaagcacatcgctgaggattcagaccgcaaatatgaagaggtggccaggaagctggtgatcctggaaggagagctggagcgctcggaggagagggctgaggtggccgagagccgagccagacagctggaggaggaacttcgaaccatggaccaggccctcaagtccctgatggcctcagaggaggagtaaatgtggggacctagaggaggagctgaaaattgttaccaacaacttgaaatccctggaggcccaggcggacaagtattccaccaaagaagataaatatgaagaggagatcaaactgttggaggagaagctgaaggaggctgagacccgagcagagtttgccgagaggtctgtggcaaagttggagaaaaccatcgatgacctagaagagaccttggccagtgccaaggaggagaacgtcgagattcaccagaccttggaccagaccctgctggaactcaacaacctgtgagggccagccccacccccagccaggctatggttgccaccccaacccaataaaactgatgttactagcctctcaa

SEQ ID NO: 441727 - DNA, 2299 bp, Homo sapiens
cggggagctgggtcctgagccgccgggtgctcgcaggaagggcctggctccaggggcaggggctgggaggggaggcgaggggatgagaggtcaggccggtcctgggggcagcaagcccggccacactccccaccgcgaccggggctctgggctcgcttcctgcttcagtttccccaagctcccgatgagactccgctactaccaccacgtcgataacgcaaacctagagggactcagggtaaactgaggcactcaaactgccgaggagctccgcctcccgagagacatttaatccggggggatttgcaggaaacttctaaattaagggtagcggctgctgcagctgagggggggcacgccggtccctgcgcccgggcagctgccgtgagctcacgccccgaaatagccccaggggccccagccgcagctgccactgggtccggctgtcactcagaggaagcacggagcccccagcccaagggtcccctccccttcgcatcgccggggtttttccagccgaccgtcggccactttttcctccgacggctggcagggaagagggggatgggggcgggaccccaagggaggcggtccccagtgggtgggcgaagggggcggccgcaccccccggccgggccgtgcttctgcccctacaaggtttgggccgaggtgggggagggtcctggttgccggccccgcccggtccctccccgccttttaggcgcccgcgtggccgggacgtcccagtcccgctccgtcctcctcgcctgccaccggtgcacccagtccgctcacccagcccagtccgtccggtcctcaccgcctgccggccggcccaccccccaccgcagccatggacgccatcaagaagaagatgcagatgctgaagctggacaaggagaacgccatcgaccgcgccgagcaggccgaagccgacaagaagcaagctgaggaccgctgcaagcagctggaggaggagcagcaggccctccagaagaagctgaaggggacagaggatgaggtggaaaagtattctgaatccgtgaaggaggcccaggagaaactggagcaggccgagaagaaggccactgatgctgaggcagatgtggcctccctgaaccgccgcattcagctggttgaggaggagctggaccgggcccaggagcgcctggctacagccctgcagaagctggaggaggccgagaaggcggctgatgagagcgagagaggaatgaaggtcatcgaaaaccgggccatgaaggatgaggagaagatggaactgcaggagatgcagctgaaggaggccaagcacatcgctgaggattcagaccgcaaatatgaagaggtggccaggaagctggtgatcctggaaggagagctggagcgctcggaggagagggctgaggtggccgagagccgagccagacagctggaggaggaacttcgaaccatggaccaggccctcaagtccctgatggcctcagaggaggagggtagtgacccctctgaacctttctgggcaatggcgccttctctcagctcaccttccctccgtctcagcaccgcaggctgctctttctcagctgctggggatcaggaagggcctggggcttctgagccctgcctgctgtcactctcacaactttgctcttctcttctctcctccacccgtcccctgctgtgccatctccactgtctggcttcgctgtgccctcacaccctgccccccccgccacacaccccctgcagtaaataaatgtggggacctagaggaggagctgaaaattgttaccaacaacttgaaatccctggaggcccaggcggacaaggtagaggggagcagaggggcagtgaggatggggtcccacaggggagggaggtgaggggcccaaggcagggaggggctgggtgttcaacggaggcaagatgaccaggagcctacggggtacaatggagaaatgaaggatctgtggtagcgctgtactgatggcgtgtgtgtgtccccaaaagtattccaccaaagaagataaatatgaagaggagatcaaactgttggaggagaagctgaaggaggctgagacccgagcagagtttgccgagaggtctgtggcaaagttggagaaaaccatcgatgacctagaagagaccttggccagtgccaaggaggagaacgtcgagattcaccagaccttggaccagaccctgctggaactcaacaacctgtgagggccagccccacccccagccaggctatggttgccaccccaacccaataaaactgatgttactagcctctcaa

SEQ ID NO: 441728 - DNA, 2504 bp, Homo sapiens
cggggagctgggtcctgagccgccgggtgctcgcaggaagggcctggctccaggggcaggggctgggaggggaggcgaggggatgagaggtcaggccggtcctgggggcagcaagcccggccacactccccaccgcgaccggggctctgggctcgcttcctgcttcagtttccccaagctcccgatgagactccgctactaccaccacgtcgataacgcaaacctagagggactcagggtaaactgaggcactcaaactgccgaggagctccgcctcccgagagacatttaatccggggggatttgcaggaaacttctaaattaagggtagcggctgctgcagctgagggggggcacgccggtccctgcgcccgggcagctgccgtgagctcacgccccgaaatagccccaggggccccagccgcagctgccactgggtccggctgtcactcagaggaagcacggagcccccagcccaagggtcccctccccttcgcatcgccggggtttttccagccgaccgtcggccactttttcctccgacggctggcagggaagagggggatgggggcgggaccccaagggaggcggtccccagtgggtgggcgaagggggcggccgcaccccccggccgggccgtgcttctgcccctacaaggtttgggccgaggtgggggagggtcctggttgccggccccgcccggtccctccccgccttttaggcgcccgcgtggccgggacgtcccagtcccgctccgtcctcctcgcctgccaccggtgcacccagtccgctcacccagcccagtccgtccggtcctcaccgcctgccggccggcccaccccccaccgcagccatggacgccatcaagaagaagatgcagatgctgaagctggacaaggagaacgccatcgaccgcgccgagcaggccgaagccgacaagaagcaagctgaggaccgctgcaagcagctggaggaggagcagcaggccctccagaagaagctgaaggggacagaggatgaggtggaaaagtattctgaatccgtgaaggaggcccaggagaaactggagcaggccgagaagaaggccactgatgctgaggcagatgtggcctccctgaaccgccgcattcagctggttgaggaggagctggaccgggcccaggagcgcctggctacagccctgcagaagctggaggaggccgagaaggcggctgatgagagcgagagaggaatgaaggtcatcgaaaaccgggccatgaaggatgaggagaagatggaactgcaggagatgcagctgaaggaggccaagcacatcgctgaggattcagaccgcaaatatgaagaggtggccaggaagctggtgatcctggaaggagagctgctctcttctctcctctcctttccattctctctatggggaggggagcaggcaggaggagcagaaattgccaacattgcacagccaggctgggagcagcctagggagagcccccatcatgcccaccacccactctggcactggcttcatcctttacctatccccttccaccctcctttgctgcttaataaattctgaacttggtccatgctgttttcctgccctccagagagcacctctatcgccaccacggagcactggttcactcctgacaccctggcacttactgacacccccagcccctgcactgagcccacccacaaaacaccatggcccacgctgaaacccctctgcacaggcactcccctggctgtcgctctctgattcaccactgcatgtgggcacgtgtggccccatcaaaccatgaccgcctctggtgccaatccctgacctcagagcacttagctggggttccaggatcaaacagagtgactggaaaggaagtagggtggtgaggtgcaggacaggggcaagaaggttgcaaaaggtctggaatggagcttggaaaaatgttggatatcagcaacatggggctttcactgcagcagcaggtctgttttctacctcaagtctgtctgtctggcccttcctttcctggcgcagtctttgtcttaccttctgtctccaacttccttaaaccttctaaagaagaggataaagtagtttatgactcagccctccccaccccacctctatgaccccaaggccttgagtgaggcatccacgtccgtcctgttcccctcatcctagtcagtccatctgtttgtccctgccatggggccctgaggtccgtgaatgcatgtgtcttccttgacccactccatgtctatatgtcaccttcccctggccctgcctccccacgtctcccccttgtgtctcccttctccctcacctgctgcttcccctcacaagaccttggccagtgccaaggaggagaacgtcgagattcaccagaccttggaccagaccctgctggaactcaacaacctgtgagggccagccccacccccagccaggctatggttgccaccccaacccaataaaactgatgttactagcctctcaa

SEQ ID NO: 441729 - DNA, 1473 bp, Homo sapiens
cggggagctgggtcctgagccgccgggtgctcgcaggaagggcctggctccaggggcaggggctgggaggggaggcgaggggatgagaggtcaggccggtcctgggggcagcaagcccggccacactccccaccgcgaccggggctctgggctcgcttcctgcttcagtttccccaagctcccgatgagactccgctactaccaccacgtcgataacgcaaacctagagggactcagggtaaactgaggcactcaaactgccgaggagctccgcctcccgagagacatttaatccggggggatttgcaggaaacttctaaattaagggtagcggctgctgcagctgagggggggcacgccggtccctgcgcccgggcagctgccgtgagctcacgccccgaaatagccccaggggccccagccgcagctgccactgggtccggctgtcactcagaggaagcacggagcccccagcccaagggtcccctccccttcgcatcgccggggtttttccagccgaccgtcggccactttttcctccgacggctggcagggaagagggggatgggggcgggaccccaagggaggcggtccccagtgggtgggcgaagggggcggccgcaccccccggccgggccgtgcttctgcccctacaaggtttgggccgaggtgggggagggtcctggttgccggccccgcccggtccctccccgccttttaggcgcccgcgtggccgggacgtcccagtcccgctccgtcctcctcgcctgccaccggtgcacccagtccgctcacccagcccagtccgtccggtcctcaccgcctgccggccggcccaccccccaccgcagccatggacgccatcaagaagaagatgcagatgctgaagctggacaaggagaacgccatcgaccgcgccgagcaggccgaagccgacaagaagcaagctgaggaccgctgcaagcagctggaggaggagcagcaggccctccagaagaagctgaaggggacagaggatgaggtggaaaagtattctgaatccgtgaaggaggcccaggagaaactggagcaggccgagaagaaggccactgatgctgaggcagatgtggcctccctgaaccgccgcattcagctggttgaggaggagctggaccgggcccaggagcgcctggctacagccctgcagaagctggaggaggccgagaaggcggctgatgagagcgagagaggaatgaaggtcatcgaaaaccgggccatgaaggatgaggagaagatggaactgcaggagatgcagctgaaggaggccaagcacatcgctgaggattcagaccgcaaatatgaagaggtggccaggaagctggtgatcctggaaggagagctggagcgctcggaggagagggctgaggtggccgagagccgagccagacagctgtggaagggagggggactcctctaggagatcgactatcaccc

SEQ ID NO: 441730 - DNA, 1582 bp, Homo sapiens
cggggagctgggtcctgagccgccgggtgctcgcaggaagggcctggctccaggggcaggggctgggaggggaggcgaggggatgagaggtcaggccggtcctgggggcagcaagcccggccacactccccaccgcgaccggggctctgggctcgcttcctgcttcagtttccccaagctcccgatgagactccgctactaccaccacgtcgataacgcaaacctagagggactcagggtaaactgaggcactcaaactgccgaggagctccgcctcccgagagacatttaatccggggggatttgcaggaaacttctaaattaagggtagcggctgctgcagctgagggggggcacgccggtccctgcgcccgggcagctgccgtgagctcacgccccgaaatagccccaggggccccagccgcagctgccactgggtccggctgtcactcagaggaagcacggagcccccagcccaagggtcccctccccttcgcatcgccggggtttttccagccgaccgtcggccactttttcctccgacggctggcagggaagagggggatgggggcgggaccccaagggaggcggtccccagtgggtgggcgaagggggcggccgcaccccccggccgggccgtgcttctgcccctacaaggtttgggccgaggtgggggagggtcctggttgccggccccgcccggtccctccccgccttttaggcgcccgcgtggccgggacgtcccagtcccgctccgtcctcctcgcctgccaccggtgcacccagtccgctcacccagcccagtccgtccggtcctcaccgcctgccggccggcccaccccccaccgcagccatggacgccatcaagaagaagatgcagatgctgaagctggacaaggagaacgccatcgaccgcgccgagcaggccgaagccgacaagaagcaagctgaggaccgctgcaagcagctggaggaggagcagcaggccctccagaagaagctgaaggggacagaggatgaggtggaaaagtattctgaatccgtgaaggaggcccaggagaaactggagcaggccgagaagaaggccactgatgctgaggcagatgtggcctccctgaaccgccgcattcagctggttgaggaggagctggaccgggcccaggagcgcctggctacagccctgcagaagctggaggaggccgagaaggcggctgatgagagcgagagaggaatgaaggtcatcgaaaaccgggccatgaaggatgaggagaagatggaactgcaggagatgcagctgaaggaggccaagcacatcgctgaggattcagaccgcaaatatgaagaggtggccaggaagctggtgatcctggaaggagagctgctctcttctctcctctcctttccattctctctatggggaggggagcaggcaggaggagcagaaattgccaacattgcacagccaggctgggagcagcctagggagagcccccatcatgcccaccacccactctggcactggcttcatcctttacctatccccttccaccctcctttgctgcttaataaattctgaacttgg

SEQ ID NO: 441731 - DNA, 1319 bp, Homo sapiens
  misc_feature (1263)..(1263): n is a, c, g, or t
  misc_feature (1294)..(1294): n is a, c, g, or t
  misc_feature (1306)..(1306): n is a, c, g, or t
cggggagctgggtcctgagccgccgggtgctcgcaggaagggcctggctccaggggcaggggctgggaggggaggcgaggggatgagaggtcaggccggtcctgggggcagcaagcccggccacactccccaccgcgaccggggctctgggctcgcttcctgcttcagtttccccaagctcccgatgagactccgctactaccaccacgtcgataacgcaaacctagagggactcagggtaaactgaggcactcaaactgccgaggagctccgcctcccgagagacatttaatccggggggatttgcaggaaacttctaaattaagggtagcggctgctgcagctgagggggggcacgccggtccctgcgcccgggcagctgccgtgagctcacgccccgaaatagccccaggggccccagccgcagctgccactgggtccggctgtcactcagaggaagcacggagcccccagcccaagggtcccctccccttcgcatcgccggggtttttccagccgaccgtcggccactttttcctccgacggctggcagggaagagggggatgggggcgggaccccaagggaggcggtccccagtgggtgggcgaagggggcggccgcaccccccggccgggccgtgcttctgcccctacaaggtttgggccgaggtgggggagggtcctggttgccggccccgcccggtccctccccgccttttaggcgcccgcgtggccgggacgtcccagtcccgctccgtcctcctcgcctgccaccggtgcacccagtccgctcacccagcccagtccgtccggtcctcaccgcctgccggccggcccaccccccaccgcagccatggacgccatcaagaagaagatgcagatgctgaagctggacaaggagaacgccatcgaccgcgccgagcaggccgaagccgacaagaagcaagctgaggaccgctgcaagcagctggaggaggagcagcaggccctccagaagaagctgaaggggacagaggatgaggtggaaaagtattctgaatccgtgaaggaggcccaggagaaactggagcaggccgagaagaaggccactgatgctgaggcagatgtggcctccctgaaccgccgcattcagctggttgaggaggagctggaccgggcccaggagcgcctggctacagccctgcagaagaggcagataggaagtatgaagaggtggctcgtaagttggtgatcattgaaggagacttggaacgcacagaggancgagctgagctggcagagtctaagtgttctnagctggaggagnagcttgaaggaat

SEQ ID NO: 441732 - DNA, 1119 bp, Homo sapiens
cggggagctgggtcctgagccgccgggtgctcgcaggaagggcctggctccaggggcaggggctgggaggggaggcgaggggatgagaggtcaggccggtcctgggggcagcaagcccggccacactccccaccgcgaccggggctctgggctcgcttcctgcttcagtttccccaagctcccgatgagactccgctactaccaccacgtcgataacgcaaacctagagggactcagggtaaactgaggcactcaaactgccgaggagctccgcctcccgagagacatttaatccggggggatttgcaggaaacttctaaattaagggtagcggctgctgcagctgagggggggcacgccggtccctgcgcccgggcagctgccgtgagctcacgccccgaaatagccccaggggccccagccgcagctgccactgggtccggctgtcactcagaggaagcacggagcccccagcccaagggtcccctccccttcgcatcgccggggtttttccagccgaccgtcggccactttttcctccgacggctggcagggaagagggggatgggggcgggaccccaagggaggcggtccccagtgggtgggcgaagggggcggccgcaccccccggccgggccgtgcttctgcccctacaaggtttgggccgaggtgggggagggtcctggttgccggccccgcccggtccctccccgccttttaggcgcccgcgtggccgggacgtcccagtcccgctccgtcctcctcgcctgccaccggtgcacccagtccgctcacccagcccagtccgtccggtcctcaccgcctgccggccggcccaccccccaccgcagccatggacgccatcaagaagaagatgcagatgctgaagtgaccccaaccacaacacccaccggcacacagaccccaaccacgacacccatcaccaccaccagcagggtgaccccaaccccaacagagtgcctcagagtagagagggtccaagcaaggaagaccacaaagatgataaggatgatcaatgcgagcagcagcaccgccatcacagcccccacgatcccatacacgaggctcttggcgatgttgacattcacaggtctctcc

SEQ ID NO: 441733 - DNA, 418 bp, Homo sapiens
actgatggcgtgtgtgtgtccccaaaagtattccaccaaagaagataaatatgaagaggagatcaaactgttggaggagaagctgaaggaggtgagagtcctcttccagttcccagtctcccctcaagccaccctaatccttgccagagacggcctgtggcaggacacttgagggttgggatggacaagaagcttgacttaggcagtagtctgtgggagggcctaattctttgccatttctcccatcctgcctttacccccaggctgagacccgagcagagtttgccgagaggtctgtggcaaagttggagaaaaccatcgatgacctagaaggtaaaagaagcctttataagtaggtccacacctgccgtgattatcagtctgtcctgtaccttctcatcccattttatttgccacc

SEQ ID NO: 441734 - DNA, 1108 bp, Homo sapiens
gttttaaaaaagaaaaggggggcggagaattaaaaaaaaaaaaaaaaaaaaaaaaaaaaaaaaaaaaaaaaaaaaagcgctccgtcctcctcgcctgccaccggtgcacccagtccgctcacccagcccagtccgtccggtcctcaccgcctgccggccggcccaccccccaccgcagccatggacgccatcaagaagaagatgcagatgctgaagctggacaaggagaacgccatcgaccgcgccgagcaggccgaagccgacaagaagcaagctgaggaccgctgcaagcagctggaggaggagcagcaggccctccagaagaagctgaaggggacagaggatgaggtggaaaagtattctgaatccgtgaaggaggcccaggagaaactggagcaggccgagaagaaggccactgatgctgaggcagatgtggcctccctgaaccgccgcattcagctggttgaggaggagctggaccgggcccaggagcgcctggctacagccctgcagaagctggaggaggccgagaaggcggctgatgagagcgagagaggaatgaaggtcatcgaaaaccgggccatgaaggatgaggagaagatggaactgcaggagatgcagctgaaggaggccaagcacatcgctgaggattcagaccgcaaatatgaagaggtggccaggaagctggtgatcctggaaggagagctggagcgctcggaggagagggctgaggtggccgagagccgagccagacagctggaggaggaacttcgaaccatggaccaggccctcaagtccctgatggcctcagaggaggagtattccaccaaagaagataaatatgaagaggagatcaaactgttggaggagaagctgaaggaggctgagacccgagcagagtttgccgagaggtctgtggcaaagttggagaaaaccatcgatgacctagaagagaccttggccagtgccaaggaggagaacgtcgagattcaccagaccttggaccagaccctgctggaactcaacaacctgtgagggccagccccacccccagccaggctatggttgccaccccaacccaataaaactgatgttactagcctctcaa

SEQ ID NO: 441735 - DNA, 2272 bp, Homo sapiens
cggggagctgggtcctgagccgccgggtgctcgcaggaagggcctggctccaggggcaggggctgggaggggaggcgaggggatgagaggtcaggccggtcctgggggcagcaagcccggccacactccccaccgcgaccggggctctgggctcgcttcctgcttcagtttccccaagctcccgatgagactccgctactaccaccacgtcgataacgcaaacctagagggactcagggtaaactgaggcactcaaactgccgaggagctccgcctcccgagagacatttaatccggggggatttgcaggaaacttctaaattaagggtagcggctgctgcagctgagggggggcacgccggtccctgcgcccgggcagctgccgtgagctcacgccccgaaatagccccaggggccccagccgcagctgccactgggtccggctgtcactcagaggaagcacggagcccccagcccaagggtcccctccccttcgcatcgccggggtttttccagccgaccgtcggccactttttcctccgacggctggcagggaagagggggatgggggcgggaccccaagggaggcggtccccagtgggtgggcgaagggggcggccgcaccccccggccgggccgtgcttctgcccctacaaggtttgggccgaggtgggggagggtcctggttgccggccccgcccggtccctccccgccttttaggcgcccgcgtggccgggacgtcccagtcccgctccgtcctcctcgcctgccaccggtgcacccagtccgctcacccagcccagtccgtccggtcctcaccgcctgccggccggcccaccccccaccgcagccatggacgccatcaagaagaagatgcagatgctgaagctggacaaggagaacgccatcgaccgcgccgagcaggccgaagccgacaagaagcaagctgaggaccgctgcaagcagctggaggaggagcagcaggccctccagaagaagctgaaggggacagaggatgaggtggaaaagtattctgaatccgtgaaggaggcccaggagaaactggagcaggccgagaagaaggccactgatgctgaggcagatgtggcctccctgaaccgccgcattcagctggttgaggaggagctggaccgggcccaggagcgcctggctacagccctgcagaagctggaggaggccgagaaggcggctgatgagagcgagagaggaatgaaggtcatcgaaaaccgggccatgaaggatgaggagaagatggaactgcaggagatgcagctgaaggaggccaagcacatcgctgaggattcagaccgcaaatatgaagaggtggccaggaagctggtgatcctggaaggagagctggagcgctcggaggagagggctgaggtggccgagagccgagccagacagctggaggaggaacttcgaaccatggaccaggccctcaagtccctgatggcctcagaggaggagggtagtgacccctctgaacctttctgggcaatggcgccttctctcagctcaccttccctccgtctcagcaccgcaggctgctctttctcagctgctggggatcaggaagggcctggggcttctgagccctgcctgctgtcactctcacaactttgctcttctcttctctcctccacccgtcccctgctgtgccatctccactgtctggcttcgctgtgccctcacaccctgccccccccgccacacaccccctgcagtaaataaatgtggggacctagaggaggagctgaaaattgttaccaacaacttgaaatccctggaggcccaggcggacaagtattccaccaaagaagataaatatgaagaggagatcaaactgttggaggagaagctgaaggaggctgagacccgagcagagtttgccgagaggtctgtggcaaagttggagaaaaccatcgatgacctagaagatgaagtctatgcccagaagatgaagtacaaggccattagcgaggaactggacaacgcactcaatgacatcacctccctctgagccccacgccagcgtggccacctcagctctcttctctcctctcctttccattctctctatggggaggggagcaggcaggaggagcagaaattgccaacattgcacagccaggctgggagcagcctagggagagcccccatcatgcccaccacccactctggcactggcttcatcctttacctatccccttccaccctcctttgctgcttaataaattctgaacttgg

SEQ ID NO: 441736 - DNA, 2453 bp, Homo sapiens
cggggagctgggtcctgagccgccgggtgctcgcaggaagggcctggctccaggggcaggggctgggaggggaggcgaggggatgagaggtcaggccggtcctgggggcagcaagcccggccacactccccaccgcgaccggggctctgggctcgcttcctgcttcagtttccccaagctcccgatgagactccgctactaccaccacgtcgataacgcaaacctagagggactcagggtaaactgaggcactcaaactgccgaggagctccgcctcccgagagacatttaatccggggggatttgcaggaaacttctaaattaagggtagcggctgctgcagctgagggggggcacgccggtccctgcgcccgggcagctgccgtgagctcacgccccgaaatagccccaggggccccagccgcagctgccactgggtccggctgtcactcagaggaagcacggagcccccagcccaagggtcccctccccttcgcatcgccggggtttttccagccgaccgtcggccactttttcctccgacggctggcagggaagagggggatgggggcgggaccccaagggaggcggtccccagtgggtgggcgaagggggcggccgcaccccccggccgggccgtgcttctgcccctacaaggtttgggccgaggtgggggagggtcctggttgccggccccgcccggtccctccccgccttttaggcgcccgcgtggccgggacgtcccagtcccgctccgtcctcctcgcctgccaccggtgcacccagtccgctcacccagcccagtccgtccggtcctcaccgcctgccggccggcccaccccccaccgcagccatggacgccatcaagaagaagatgcagatgctgaagctggacaaggagaacgccatcgaccgcgccgagcaggccgaagccgacaagaagcaagctgaggaccgctgcaagcagctggaggaggagcagcaggccctccagaagaagctgaaggggacagaggatgaggtggaaaagtattctgaatccgtgaaggaggcccaggagaaactggagcaggccgagaagaaggccactgatgctgaggcagatgtggcctccctgaaccgccgcattcagctggttgaggaggagctggaccgggcccaggagcgcctggctacagccctgcagaagctggaggaggccgagaaggcggctgatgagagcgagagaggaatgaaggtcatcgaaaaccgggccatgaaggatgaggagaagatggaactgcaggagatgcagctgaaggaggccaagcacatcgctgaggattcagaccgcaaatatgaagaggtggccaggaagctggtgatcctggaaggagagctggagcgctcggaggagagggctgaggtggccgagagccgagccagacagctggaggaggaacttcgaaccatggaccaggccctcaagtccctgatggcctcagaggaggagggtagtgacccctctgaacctttctgggcaatggcgccttctctcagctcaccttccctccgtctcagcaccgcaggctgctctttctcagctgctggggatcaggaagggcctggggcttctgagccctgcctgctgtcactctcacaactttgctcttctcttctctcctccacccgtcccctgctgtgccatctccactgtctggcttcgctgtgccctcacaccctgccccccccgccacacaccccctgcagtaaataaatgtggggacctagaggaggagctgaaaattgttaccaacaacttgaaatccctggaggcccaggcggacaaggtagaggggagcagaggggcagtgaggatggggtcccacaggggagggaggtgaggggcccaaggcagggaggggctgggtgttcaacggaggcaagatgaccaggagcctacggggtacaatggagaaatgaaggatctgtggtagcgctgtactgatggcgtgtgtgtgtccccaaaagtattccaccaaagaagataaatatgaagaggagatcaaactgttggaggagaagctgaaggaggctgagacccgagcagagtttgccgagaggtctgtggcaaagttggagaaaaccatcgatgacctagaagatgaagtctatgcccagaagatgaagtacaaggccattagcgaggaactggacaacgcactcaatgacatcacctccctctgagccccacgccagcgtggccacctcagctctcttctctcctctcctttccattctctctatggggaggggagcaggcaggaggagcagaaattgccaacattgcacagccaggctgggagcagcctagggagagcccccatcatgcccaccacccactctggcactggcttcatcctttacctatccccttccaccctcctttgctgcttaataaattctgaacttgg

SEQ ID NO: 441737 - DNA, 1983 bp, Homo sapiens
cggggagctgggtcctgagccgccgggtgctcgcaggaagggcctggctccaggggcaggggctgggaggggaggcgaggggatgagaggtcaggccggtcctgggggcagcaagcccggccacactccccaccgcgaccggggctctgggctcgcttcctgcttcagtttccccaagctcccgatgagactccgctactaccaccacgtcgataacgcaaacctagagggactcagggtaaactgaggcactcaaactgccgaggagctccgcctcccgagagacatttaatccggggggatttgcaggaaacttctaaattaagggtagcggctgctgcagctgagggggggcacgccggtccctgcgcccgggcagctgccgtgagctcacgccccgaaatagccccaggggccccagccgcagctgccactgggtccggctgtcactcagaggaagcacggagcccccagcccaagggtcccctccccttcgcatcgccggggtttttccagccgaccgtcggccactttttcctccgacggctggcagggaagagggggatgggggcgggaccccaagggaggcggtccccagtgggtgggcgaagggggcggccgcaccccccggccgggccgtgcttctgcccctacaaggtttgggccgaggtgggggagggtcctggttgccggccccgcccggtccctccccgccttttaggcgcccgcgtggccgggacgtcccagtcccgctccgtcctcctcgcctgccaccggtgcacccagtccgctcacccagcccagtccgtccggtcctcaccgcctgccggccggcccaccccccaccgcagccatggacgccatcaagaagaagatgcagatgctgaagctggacaaggagaacgccatcgaccgcgccgagcaggccgaagccgacaagaagcaagctgaggaccgctgcaagcagctggaggaggagcagcaggccctccagaagaagctgaaggggacagaggatgaggtggaaaagtattctgaatccgtgaaggaggcccaggagaaactggagcaggccgagaagaaggccactgatgctgaggcagatgtggcctccctgaaccgccgcattcagctggttgaggaggagctggaccgggcccaggagcgcctggctacagccctgcagaagctggaggaggccgagaaggcggctgatgagagcgagagaggaatgaaggtcatcgaaaaccgggccatgaaggatgaggagaagatggaactgcaggagatgcagctgaaggaggccaagcacatcgctgaggattcagaccgcaaatatgaagaggtggccaggaagctggtgatcctggaaggagagctggagcgctcggaggagagggctgaggtggccgagagtaaatgtggggacctagaggaggagctgaaaattgttaccaacaacttgaaatccctggaggcccaggcggacaagtattccaccaaagaagataaatatgaagaggagatcaaactgttggaggagaagctgaaggaggctgagacccgagcagagtttgccgagaggtctgtggcaaagttggagaaaaccatcgatgacctagaagatgaagtctatgcccagaagatgaagtacaaggccattagcgaggaactggacaacgcactcaatgacatcacctccctctgagccccacgccagcgtggccacctcagctctcttctctcctctcctttccattctctctatggggaggggagcaggcaggaggagcagaaattgccaacattgcacagccaggctgggagcagcctagggagagcccccatcatgcccaccacccactctggcactggcttcatcctttacctatccccttccaccctcctttgctgcttaataaattctgaacttggaaaaaaaaaaaaaaaaagggggcctttggggattgcttttggggggcc

SEQ ID NO: 441738 - DNA, 2320 bp, Homo sapiens
cggggagctgggtcctgagccgccgggtgctcgcaggaagggcctggctccaggggcaggggctgggaggggaggcgaggggatgagaggtcaggccggtcctgggggcagcaagcccggccacactccccaccgcgaccggggctctgggctcgcttcctgcttcagtttccccaagctcccgatgagactccgctactaccaccacgtcgataacgcaaacctagagggactcagggtaaactgaggcactcaaactgccgaggagctccgcctcccgagagacatttaatccggggggatttgcaggaaacttctaaattaagggtagcggctgctgcagctgagggggggcacgccggtccctgcgcccgggcagctgccgtgagctcacgccccgaaatagccccaggggccccagccgcagctgccactgggtccggctgtcactcagaggaagcacggagcccccagcccaagggtcccctccccttcgcatcgccggggtttttccagccgaccgtcggccactttttcctccgacggctggcagggaagagggggatgggggcgggaccccaagggaggcggtccccagtgggtgggcgaagggggcggccgcaccccccggccgggccgtgcttctgcccctacaaggtttgggccgaggtgggggagggtcctggttgccggccccgcccggtccctccccgccttttaggcgcccgcgtggccgggacgtcccagtcccgctccgtcctcctcgcctgccaccggtgcacccagtccgctcacccagcccagtccgtccggtcctcaccgcctgccggccggcccaccccccaccgcagccatggacgccatcaagaagaagatgcagatgctgaagctggacaaggagaacgccatcgaccgcgccgagcaggccgaagccgacaagaagcaagctgaggaccgctgcaagcagctggaggaggagcagcaggccctccagaagaagctgaaggggacagaggatgaggtggaaaagtattctgaatccgtgaaggaggcccaggagaaactggagcaggccgagaagaaggccactgatgctgaggcagatgtggcctccctgaaccgccgcattcagctggttgaggaggagctggaccgggcccaggagcgcctggctacagccctgcagaagctggaggaggccgagaaggcggctgatgagagcgagagaggaatgaaggtcatcgaaaaccgggccatgaaggatgaggagaagatggaactgcaggagatgcagctgaaggaggccaagcacatcgctgaggattcagaccgcaaatatgaagaggtggccaggaagctggtgatcctggaaggagagctggagcgctcggaggagagggctgaggtggccgagagccgagccagacagctggaggaggaacttcgaaccatggaccaggccctcaagtccctgatggcctcagaggaggagggtagtgacccctctgaacctttctgggcaatggcgccttctctcagctcaccttccctccgtctcagcaccgcaggctgctctttctcagctgctggggatcaggaagggcctggggcttctgagccctgcctgctgtcactctcacaactttgctcttctcttctctcctccacccgtcccctgctgtgccatctccactgtctggcttcgctgtgccctcacaccctgccccccccgccacacaccccctgcagtaaataaatgtggggacctagaggaggagctgaaaattgttaccaacaacttgaaatccctggaggcccaggcggacaagtattccaccaaagaagataaatatgaagaggagatcaaactgttggaggagaagctgaaggaggctgagacccgagcagagtttgccgagaggtctgtggcaaagttggagaaaaccatcgatgacctagaagatgaagtctatgcccagaagatgaagtacaaggccattagcgaggaactggacaacgcactcaatgacatcacctccctctgagccccacgccagcgtggccacctcagctctcttctctcctctcctttccattctctctatggggaggggagcaggcaggaggagcagaaattgccaacattgcacagccaggctgggagcagcctagggagagcccccatcatgcccaccacccactctggcactggcttcatcctttacctatccccttccaccctcctttgctgcttaataaattctgaacttggaaaaaaaaaaaaaaaaagggggcctttggggattgcttttggggggcc

SEQ ID NO: 441739 - DNA, 1835 bp, Homo sapiens
cggggagctgggtcctgagccgccgggtgctcgcaggaagggcctggctccaggggcaggggctgggaggggaggcgaggggatgagaggtcaggccggtcctgggggcagcaagcccggccacactccccaccgcgaccggggctctgggctcgcttcctgcttcagtttccccaagctcccgatgagactccgctactaccaccacgtcgataacgcaaacctagagggactcagggtaaactgaggcactcaaactgccgaggagctccgcctcccgagagacatttaatccggggggatttgcaggaaacttctaaattaagggtagcggctgctgcagctgagggggggcacgccggtccctgcgcccgggcagctgccgtgagctcacgccccgaaatagccccaggggccccagccgcagctgccactgggtccggctgtcactcagaggaagcacggagcccccagcccaagggtcccctccccttcgcatcgccggggtttttccagccgaccgtcggccactttttcctccgacggctggcagggaagagggggatgggggcgggaccccaagggaggcggtccccagtgggtgggcgaagggggcggccgcaccccccggccgggccgtgcttctgcccctacaaggtttgggccgaggtgggggagggtcctggttgccggccccgcccggtccctccccgccttttaggcgcccgcgtggccgggacgtcccagtcccgctccgtcctcctcgcctgccaccggtgcacccagtccgctcacccagcccagtccgtccggtcctcaccgcctgccggccggcccaccccccaccgcagccatggacgccatcaagaagaagatgcagatgctgaagctggacaaggagaacgccatcgaccgcgccgagcaggccgaagccgacaagaagcaagctgaggaccgctgcaagcagctggaggaggagcagcaggccctccagaagaagctgaaggggacagaggatgaggtggaaaagtattctgaatccgtgaaggaggcccaggagaaactggagcaggccgagaagaaggccactgatgctgaggcagatgtggcctccctgaaccgccgcattcagctggttgaggaggagctggaccgggcccaggagcgcctggctacagccctgcagaagctggaggaggccgagaaggcggctgatgagagcgagagaggaatgaaggtcatcgaaaaccgggccatgaaggatgaggagaagatggaactgcaggagatgcagctgaaggaggccaagcacatcgctgaggattcagaccgcaaatatgaagaggtggccaggaagctggtgatcctggaaggagagctggagcgctcggaggagagggctgaggtggccgagagccgagccagacagctggaggaggaacttcgaaccatggaccaggccctcaagtccctgatggcctcagaggaggagtattccaccaaagaagataaatatgaagaggagatcaaactgttggaggagaagctgaaggaggctgagacccgagcagagtttgccgagaggtctgtggcaaagttggagaaaaccatcgatgacctagaagagaccttggccagtgccaaggaggagaacgtcgagattcaccagaccttggaccagaccctgctggaactcaacaacctgtgagggccagccccacccccagccaggctatggttgccaccccaacccaataaaactgatgttactagcctctcaacaggtcggggggggggactggggtgggggtggtgttgtggggggtgtggggtga

SEQ ID NO: 441740 - DNA, 1792 bp, Homo sapiens
cggggagctgggtcctgagccgccgggtgctcgcaggaagggcctggctccaggggcaggggctgggaggggaggcgaggggatgagaggtcaggccggtcctgggggcagcaagcccggccacactccccaccgcgaccggggctctgggctcgcttcctgcttcagtttccccaagctcccgatgagactccgctactaccaccacgtcgataacgcaaacctagagggactcagggtaaactgaggcactcaaactgccgaggagctccgcctcccgagagacatttaatccggggggatttgcaggaaacttctaaattaagggtagcggctgctgcagctgagggggggcacgccggtccctgcgcccgggcagctgccgtgagctcacgccccgaaatagccccaggggccccagccgcagctgccactgggtccggctgtcactcagaggaagcacggagcccccagcccaagggtcccctccccttcgcatcgccggggtttttccagccgaccgtcggccactttttcctccgacggctggcagggaagagggggatgggggcgggaccccaagggaggcggtccccagtgggtgggcgaagggggcggccgcaccccccggccgggccgtgcttctgcccctacaaggtttgggccgaggtgggggagggtcctggttgccggccccgcccggtccctccccgccttttaggcgcccgcgtggccgggacgtcccagtcccgctccgtcctcctcgcctgccaccggtgcacccagtccgctcacccagcccagtccgtccggtcctcaccgcctgccggccggcccaccccccaccgcagccatggacgccatcaagaagaagatgcagatgctgaagctggacaaggagaacgccatcgaccgcgccgagcaggccgaagccgacaagaagcaagctgaggaccgctgcaagcagctggaggaggagcagcaggccctccagaagaagctgaaggggacagaggatgaggtggaaaagtattctgaatccgtgactggaggaggccgagaaggcggctgatgagagcgagagaggaatgaaggtcatcgaaaaccgggccatgaaggatgaggagaagatggaactgcaggagatgcagctgaaggaggccaagcacatcgctgaggattcagaccgcaaatatgaagaggtggccaggaagctggtgatcctggaaggagagctggagcgctcggaggagagggctgaggtggccgagagtaaatgtggggacctagaggaggagctgaaaattgttaccaacaacttgaaatccctggaggcccaggcggacaagtattccaccaaagaagataaatatgaagaggagatcaaactgttggaggagaagctgaaggaggctgagacccgagcagagtttgccgagaggtctgtggcaaagttggagaaaaccatcgatgacctagaagatgaagtctatgcccagaagatgaagtacaaggccattagcgaggaactggacaacgcactcaatgacatcacctccctctgagccccacgccagcgtggccacctcagctctcttctctcctctcctttccattctctctatggggaggggagcaggcaggaggagcagaaattgccaacattgcacagccaggctgggagcagcctagggagagcccccatcatgcccaccacccactctggcactggcttcatcctttacctatccccttccaccctcctttgctgcttaataaattctgaacttgg

SEQ ID NO: 441741 - DNA, 2000 bp, Homo sapiens
cggggagctgggtcctgagccgccgggtgctcgcaggaagggcctggctccaggggcaggggctgggaggggaggcgaggggatgagaggtcaggccggtcctgggggcagcaagcccggccacactccccaccgcgaccggggctctgggctcgcttcctgcttcagtttccccaagctcccgatgagactccgctactaccaccacgtcgataacgcaaacctagagggactcagggtaaactgaggcactcaaactgccgaggagctccgcctcccgagagacatttaatccggggggatttgcaggaaacttctaaattaagggtagcggctgctgcagctgagggggggcacgccggtccctgcgcccgggcagctgccgtgagctcacgccccgaaatagccccaggggccccagccgcagctgccactgggtccggctgtcactcagaggaagcacggagcccccagcccaagggtcccctccccttcgcatcgccggggtttttccagccgaccgtcggccactttttcctccgacggctggcagggaagagggggatgggggcgggaccccaagggaggcggtccccagtgggtgggcgaagggggcggccgcaccccccggccgggccgtgcttctgcccctacaaggtttgggccgaggtgggggagggtcctggttgccggccccgcccggtccctccccgccttttaggcgcccgcgtggccgggacgtcccagtcccgctccgtcctcctcgcctgccaccggtgcacccagtccgctcacccagcccagtccgtccggtcctcaccgcctgccggccggcccaccccccaccgcagccatggacgccatcaagaagaagatgcagatgctgaagctggacaaggagaacgccatcgaccgcgccgagcaggccgaagccgacaagaagcaagctgaggaccgctgcaagcagctggaggaggagcagcaggccctccagaagaagctgaaggggacagaggatgaggtggaaaagtattctgaatccgtgaaggaggcccaggagaaactggagcaggccgagaagaaggccactgatgctgaggcagatgtggcctccctgaaccgccgcattcagctggttgaggaggagctggaccgggcccaggagcgcctggctacagccctgcagaagctggaggaggccgagaaggcggctgatgagagcgagagaggaatgaaggtcatcgaaaaccgggccatgaaggatgaggagaagatggaactgcaggagatgcagctgaaggaggccaagcacatcgctgaggattcagaccgcaaatatgaagaggtggccaggaagctggtgatcctggaaggagagctggagcgctcggaggagagggctgaggtggccgagagccgagccagacagctggaggaggaacttcgaaccatggaccaggccctcaagtccctgatggcctcagaggaggagtattccaccaaagaagataaatatgaagaggagatcaaactgttggaggagaagctgaaggaggctgagacccgagcagagtttgccgagaggtctgtggcaaagttggagaaaaccatcgatgacctagaagatgaagtctatgcccagaagatgaagtacaaggccattagcgaggaactggacaacgcactcaatgacatcacctccctctgagccccacgccagcgtggccacctcagctctcttctctcctctcctttccattctctctatggggaggggagcaggcaggaggagcagaaattgccaacattgcacagccaggctgggagcagcctagggagagcccccatcatgcccaacggtgaccggcgacttcgaagtcgccggtcaccgttggggaagtccccggtcaccgttgggatgtcttaaaaaaaacaaaatttaatagaaaaaattaggtatggtggcgcatgcctgtaatcccaagggtgaccggcgactt

SEQ ID NO: 441742 - DNA, 2522 bp, Homo sapiens
cggggagctgggtcctgagccgccgggtgctcgcaggaagggcctggctccaggggcaggggctgggaggggaggcgaggggatgagaggtcaggccggtcctgggggcagcaagcccggccacactccccaccgcgaccggggctctgggctcgcttcctgcttcagtttccccaagctcccgatgagactccgctactaccaccacgtcgataacgcaaacctagagggactcagggtaaactgaggcactcaaactgccgaggagctccgcctcccgagagacatttaatccggggggatttgcaggaaacttctaaattaagggtagcggctgctgcagctgagggggggcacgccggtccctgcgcccgggcagctgccgtgagctcacgccccgaaatagccccaggggccccagccgcagctgccactgggtccggctgtcactcagaggaagcacggagcccccagcccaagggtcccctccccttcgcatcgccggggtttttccagccgaccgtcggccactttttcctccgacggctggcagggaagagggggatgggggcgggaccccaagggaggcggtccccagtgggtgggcgaagggggcggccgcaccccccggccgggccgtgcttctgcccctacaaggtttgggccgaggtgggggagggtcctggttgccggccccgcccggtccctccccgccttttaggcgcccgcgtggccgggacgtcccagtcccgctccgtcctcctcgcctgccaccggtgcacccagtccgctcacccagcccagtccgtccggtcctcaccgcctgccggccggcccaccccccaccgcagccatggacgccatcaagaagaagatgcagatgctgaagctggacaaggagaacgccatcgaccgcgccgagcaggccgaagccgacaagaagcaagctgaggaccgctgcaagcagctggaggaggagcagcaggccctccagaagaagctgaaggggacagaggatgaggtggaaaagtattctgaatccgtgaaggaggcccaggagaaactggagcaggccgagaagaaggccactgatgctgaggcagatgtggcctccctgaaccgccgcattcagctggttgaggaggagctggaccgggcccaggagcgcctggctacagccctgcagaagctggaggaggccgagaaggcggctgatgagagcgagagaggaatgaaggtcatcgaaaaccgggccatgaaggatgaggagaagatggaactgcaggagatgcagctgaaggaggccaagcacatcgctgaggattcagaccgcaaatatgaagaggtggccaggaagctggtgatcctggaaggagagctggagcgctcggaggagagggctgaggtggccgagagccgagccagacagctggaggaggaacttcgaaccatggaccaggccctcaagtccctgatggcctcagaggaggagtattccaccaaagaagataaatatgaagaggagatcaaactgttggaggagaagctgaaggaggctgagacccgagcagagtttgccgagaggtctgtggcaaagttggagaaaaccatcgatgacctagaagagagcacctctatcgccaccacggagcactggttcactcctgacaccctggcacttactgacacccccagcccctgcactgagcccacccacaaaacaccatggcccacgctgaaacccctctgcacaggcactcccctggctgtcgctctctgattcaccactgcatgtgggcacgtgtggccccatcaaaccatgaccgcctctggtgccaatccctgacctcagagcacttagctggggttccaggatcaaacagagtgactggaaaggaagtagggtggtgaggtgcaggacaggggcaagaaggttgcaaaaggtctggaatggagcttggaaaaatgttggatatcagcaacatggggctttcactgcagcagcaggtctgttttctacctcaagtctgtctgtctggcccttcctttcctggcgcagtctttgtcttaccttctgtctccaacttccttaaaccttctaaagaagaggataaagtagtttatgactcagccctccccaccccacctctatgaccccaaggccttgagtgaggcatccacgtccgtcctgttcccctcatcctagtcagtccatctgtttgtccctgccatggggccctgaggtccgtgaatgcatgtgtcttccttgacccactccatgtctatatgtcaccttcccctggccctgcctccccacgtctcccccttgtgtctcccttctccctcacctgctgcttcccctcacaagaccttggccagtgccaaggaggagaacgtcgagattcaccagaccttggaccagaccctgctggaactcaacaacctgtgagggccagccccacccccagccaggctatggttgccaccccaacccaataaaactgatgttactagcctctcaa

SEQ ID NO: 441743 - DNA, 1867 bp, Homo sapiens
  misc_feature (1734)..(1734): n is a, c, g, or t
  misc_feature (1736)..(1736): n is a, c, g, or t
cggggagctgggtcctgagccgccgggtgctcgcaggaagggcctggctccaggggcaggggctgggaggggaggcgaggggatgagaggtcaggccggtcctgggggcagcaagcccggccacactccccaccgcgaccggggctctgggctcgcttcctgcttcagtttccccaagctcccgatgagactccgctactaccaccacgtcgataacgcaaacctagagggactcagggtaaactgaggcactcaaactgccgaggagctccgcctcccgagagacatttaatccggggggatttgcaggaaacttctaaattaagggtagcggctgctgcagctgagggggggcacgccggtccctgcgcccgggcagctgccgtgagctcacgccccgaaatagccccaggggccccagccgcagctgccactgggtccggctgtcactcagaggaagcacggagcccccagcccaagggtcccctccccttcgcatcgccggggtttttccagccgaccgtcggccactttttcctccgacggctggcagggaagagggggatgggggcgggaccccaagggaggcggtccccagtgggtgggcgaagggggcggccgcaccccccggccgggccgtgcttctgcccctacaaggtttgggccgaggtgggggagggtcctggttgccggccccgcccggtccctccccgccttttaggcgcccgcgtggccgggacgtcccagtcccgctccgtcctcctcgcctgccaccggtgcacccagtccgctcacccagcccagtccgtccggtcctcaccgcctgccggccggcccaccccccaccgcagccatggacgccatcaagaagaagatgcagatgctgaagctggacaaggagaacgccatcgaccgcgccgagcaggccgaagccgacaagaagcaagctgaggaccgctgcaagcagctggaggaggagcagcaggccctccagaagaagctgaaggggacagaggatgaggtggaaaagtattctgaatccgtgaaggaggcccaggagaaactggagcaggccgagaagaaggccactgatgctgaggcagatgtggcctccctgaaccgccgcattcagctggttgaggaggagctggaccgggcccaggagcgcctggctacagccctgcagaagctggaggaggccgagaaggcggctgatgagagcgagagaggaatgaaggtcatcgaaaaccgggccatgaaggatgaggagaagatggaactgcaggagatgcagctgaaggaggccaagcacatcgctgaggattcagaccgcaaatatgaagaggtggccaggaagctggtgatcctggaaggagagctggagcgctcggaggagagggctgaggtggccgagagccgagccagacagctggaggaggaacttcgaaccatggaccaggccctcaagtccctgatggcctcagaggaggagtattccaccaaagaagataaatatgaagaggagatcaaactgttggaggagaagctgaaggaggctgagacccgagcagagtttgccgagaggtctgtggcaaagttggagaaaaccatcgatgacctagaagatgaagtctatgcccagaagatgaagtacaaggccattagcgaggaactggacaacgcactcaatgacatcacctccctctgagccccacgccagcgtggccacctcantntcttctccaagtgctatgcacgcctcaacccggacgtcaccggccgcaaatcttttttggccacccagcaacctgcgtcccaagaagcaggtcaaataaggtggttctttccttgaagggcagcctcctgc

SEQ ID NO: 441744 - DNA, 1865 bp, Homo sapiens
cggggagctgggtcctgagccgccgggtgctcgcaggaagggcctggctccaggggcaggggctgggaggggaggcgaggggatgagaggtcaggccggtcctgggggcagcaagcccggccacactccccaccgcgaccggggctctgggctcgcttcctgcttcagtttccccaagctcccgatgagactccgctactaccaccacgtcgataacgcaaacctagagggactcagggtaaactgaggcactcaaactgccgaggagctccgcctcccgagagacatttaatccggggggatttgcaggaaacttctaaattaagggtagcggctgctgcagctgagggggggcacgccggtccctgcgcccgggcagctgccgtgagctcacgccccgaaatagccccaggggccccagccgcagctgccactgggtccggctgtcactcagaggaagcacggagcccccagcccaagggtcccctccccttcgcatcgccggggtttttccagccgaccgtcggccactttttcctccgacggctggcagggaagagggggatgggggcgggaccccaagggaggcggtccccagtgggtgggcgaagggggcggccgcaccccccggccgggccgtgcttctgcccctacaaggtttgggccgaggtgggggagggtcctggttgccggccccgcccggtccctccccgccttttaggcgcccgcgtggccgggacgtcccagtcccgctccgtcctcctcgcctgccaccggtgcacccagtccgctcacccagcccagtccgtccggtcctcaccgcctgccggccggcccaccccccaccgcagccatggacgccatcaagaagaagatgcagatgctgaagctggacaaggagaacgccatcgaccgcgccgagcaggccgaagccgacaagaagcaagctgaggaccgctgcaagcagctggaggaggagcagcaggccctccagaagaagctgaaggggacagaggatgaggtggaaaagtattctgaatccgtgaaggaggcccaggagaaactggagcaggccgagaagaaggccactgatgctgaggcagatgtggcctccctgaaccgccgcattcagctggttgaggaggagctggaccgggcccaggagcgcctggctacagccctgcagaagctggaggaggccgagaaggcggctgatgagagcgagagaggaatgaaggtcatcgaaaaccgggccatgaaggatgaggagaagatggaactgcaggagatgcagctgaaggaggccaagcacatcgctgaggattcagaccgcaaatatgaagaggtggccaggaagctggtgatcctggaaggagagctggagcgctcggaggagagggctgaggtggccgagagccgagccagacagctggaggaggaacttcgaaccatggaccaggccctcaagtccctgatggcctcagaggaggagtattccaccaaagaagataaatatgaagaggagatcaaactgttggaggagaagctgaaggaggctgagacccgagcagagtttgccgagaggtctgtggcaaagttggagaaaaccatcgatgacctagaaggtaaaagaagcctttataagtaggtccacacctgccgtgattatcagtctgtcctgtaccttctcatcccattttatttgccaccaataaactagggttgggccacctaggaccctaccaactccccaactctgtgggccatgtctacaattcaagtaattgtagctgcccacggcgcaacaactccagtgcttctcaaacttcagcatgcatgagaatcactgggagagttttaaaaac

SEQ ID NO: 441745 - DNA, 1847 bp, Homo sapiens
  misc_feature (1827)..(1827): n is a, c, g, or t
  misc_feature (1833)..(1833): n is a, c, g, or t
  misc_feature (1837)..(1837): n is a, c, g, or t
  misc_feature (1841)..(1841): n is a, c, g, or t
cggggagctgggtcctgagccgccgggtgctcgcaggaagggcctggctccaggggcaggggctgggaggggaggcgaggggatgagaggtcaggccggtcctgggggcagcaagcccggccacactccccaccgcgaccggggctctgggctcgcttcctgcttcagtttccccaagctcccgatgagactccgctactaccaccacgtcgataacgcaaacctagagggactcagggtaaactgaggcactcaaactgccgaggagctccgcctcccgagagacatttaatccggggggatttgcaggaaacttctaaattaagggtagcggctgctgcagctgagggggggcacgccggtccctgcgcccgggcagctgccgtgagctcacgccccgaaatagccccaggggccccagccgcagctgccactgggtccggctgtcactcagaggaagcacggagcccccagcccaagggtcccctccccttcgcatcgccggggtttttccagccgaccgtcggccactttttcctccgacggctggcagggaagagggggatgggggcgggaccccaagggaggcggtccccagtgggtgggcgaagggggcggccgcaccccccggccgggccgtgcttctgcccctacaaggtttgggccgaggtgggggagggtcctggttgccggccccgcccggtccctccccgccttttaggcgcccgcgtggccgggacgtcccagtcccgctccgtcctcctcgcctgccaccggtgcacccagtccgctcacccagcccagtccgtccggtcctcaccgcctgccggccggcccaccccccaccgcagccatggacgccatcaagaagaagatgcagatgctgaagctggacaaggagaacgccatcgaccgcgccgagcaggccgaagccgacaagaagcaagctgaggaccgctgcaagcagctggaggaggagcagcaggccctccagaagaagctgaaggggacagaggatgaggtggaaaagtattctgaatccgtgaaggaggcccaggagaaactggagcaggccgagaagaaggccactgatgctgaggcagatgtggcctccctgaaccgccgcattcagctggttgaggaggagctggaccgggcccaggagcgcctggctacagccctgcagaagctggaggaggccgagaaggcggctgatgagagcgagagaggaatgaaggtcatcgaaaaccgggccatgaaggatgaggagaagatggaactgcaggagatgcagctgaaggaggccaagcacatcgctgaggattcagaccgcaaatatgaagaggtggccaggaagctggtgatcctggaaggagagctggagcgctcggaggagagggctgaggtggccgagagtaaatgtggggacctagaggaggagctgaaaattgttaccaacaacttgaaatccctggaggcccaggcggacaagtattccaccaaagaagataaatatgaagaggagatcaaactgttggaggagaagctgaaggaggctgagacccgagcagagtttgccgagaggtctgtggcaaagttggagaaaaccatcgatgacctagaagagaccttggccagtgccaaggaggagaacgtcgagattcaccagaccttggaccagaccctgctggaactcaacaacctgtgagggccagccccacccccagccaggctatggttgccaccccaacccaataaaactgatgttactagcctctcaaaaaaaaaaaaaaaaaaaaagaaaaaaaaaaaaaagaaaaaaaaaanaaaaangaanaatnaaaaca

SEQ ID NO: 441746 - DNA, 1743 bp, Homo sapiens
cggggagctgggtcctgagccgccgggtgctcgcaggaagggcctggctccaggggcaggggctgggaggggaggcgaggggatgagaggtcaggccggtcctgggggcagcaagcccggccacactccccaccgcgaccggggctctgggctcgcttcctgcttcagtttccccaagctcccgatgagactccgctactaccaccacgtcgataacgcaaacctagagggactcagggtaaactgaggcactcaaactgccgaggagctccgcctcccgagagacatttaatccggggggatttgcaggaaacttctaaattaagggtagcggctgctgcagctgagggggggcacgccggtccctgcgcccgggcagctgccgtgagctcacgccccgaaatagccccaggggccccagccgcagctgccactgggtccggctgtcactcagaggaagcacggagcccccagcccaagggtcccctccccttcgcatcgccggggtttttccagccgaccgtcggccactttttcctccgacggctggcagggaagagggggatgggggcgggaccccaagggaggcggtccccagtgggtgggcgaagggggcggccgcaccccccggccgggccgtgcttctgcccctacaaggtttgggccgaggtgggggagggtcctggttgccggccccgcccggtccctccccgccttttaggcgcccgcgtggccgggacgtcccagtcccgctccgtcctcctcgcctgccaccggtgcacccagtccgctcacccagcccagtccgtccggtcctcaccgcctgccggccggcccaccccccaccgcagccatggacgccatcaagaagaagatgcagatgctgaagctggacaaggagaacgccatcgaccgcgccgagcaggccgaagccgacaagaagcaagctgaggaccgctgcaagcagctggaggaggagcagcaggccctccagaagaagctgaaggggacagaggatgaggtggaaaagtattctgaatccgtgaaggaggcccaggagaaactggagcaggccgagaagaaggccactgatgctgaggcagatgtggcctccctgaaccgccgcattcagctggttgaggaggagctggaccgggcccaggagcgcctggctacagccctgcagaagctggaggaggccgagaaggcggctgatgagagcgagagaggaatgaaggtcatcgaaaaccgggccatgaaggatgaggagaagatggaactgcaggagatgcagctgaaggaggccaagcacatcgctgaggattcagaccgcaaatatgaagaggggctgggtgttcaacggaggcaagatgaccaggagcctacggggtacaatggagaaatgaaggatctgtggtagcgctgtactgatggcgtgtgtgtgtccccaaaagtattccaccaaagaagataaatatgaagaggagatcaaactgttggaggagaagctgaaggaggctgagacccgagcagagtttgccgagaggtctgtggcaaagttggagaaaaccatcgatgacctagaagagaccttggccagtgccaaggaggagaacgtcgagattcaccagaccttggaccagaccctgctggaactcaacaacctgtgagggccagccccacccccagccaggctatggttgccaccccaacccaataaaactgatgttactagcctctcaa

SEQ ID NO: 441747 - DNA, 2191 bp, Homo sapiens
cggggagctgggtcctgagccgccgggtgctcgcaggaagggcctggctccaggggcaggggctgggaggggaggcgaggggatgagaggtcaggccggtcctgggggcagcaagcccggccacactccccaccgcgaccggggctctgggctcgcttcctgcttcagtttccccaagctcccgatgagactccgctactaccaccacgtcgataacgcaaacctagagggactcagggtaaactgaggcactcaaactgccgaggagctccgcctcccgagagacatttaatccggggggatttgcaggaaacttctaaattaagggtagcggctgctgcagctgagggggggcacgccggtccctgcgcccgggcagctgccgtgagctcacgccccgaaatagccccaggggccccagccgcagctgccactgggtccggctgtcactcagaggaagcacggagcccccagcccaagggtcccctccccttcgcatcgccggggtttttccagccgaccgtcggccactttttcctccgacggctggcagggaagagggggatgggggcgggaccccaagggaggcggtccccagtgggtgggcgaagggggcggccgcaccccccggccgggccgtgcttctgcccctacaaggtttgggccgaggtgggggagggtcctggttgccggccccgcccggtccctccccgccttttaggcgcccgcgtggccgggacgtcccagtcccgctccgtcctcctcgcctgccaccggtgcacccagtccgctcacccagcccagtccgtccggtcctcaccgcctgccggccggcccaccccccaccgcagccatggacgccatcaagaagaagatgcagatgctgaagctggacaaggagaacgccatcgaccgcgccgagcaggccgaagccgacaagaagcaagctgaggaccgctgcaagcagctggaggaggagcagcaggccctccagaagaagctgaaggggacagaggatgaggtggaaaagtattctgaatccgtgaaggaggcccaggagaaactggagcaggccgagaagaaggccactgatgctgaggcagatgtggcctccctgaaccgccgcattcagctggttgaggaggagctggaccgggcccaggagcgcctggctacagccctgcagaagctggaggaggccgagaaggcggctgatgagagcgagagaggaatgaaggtcatcgaaaaccgggccatgaaggatgaggagaagatggaactgcaggagatgcagagagcacctctatcgccaccacggagcactggttcactcctgacaccctggcacttactgacacccccagcccctgcactgagcccacccacaaaacaccatggcccacgctgaaacccctctgcacaggcactcccctggctgtcgctctctgattcaccactgcatgtgggcacgtgtggccccatcaaaccatgaccgcctctggtgccaatccctgacctcagagcacttagctggggttccaggatcaaacagagtgactggaaaggaagtagggtggtgaggtgcaggacaggggcaagaaggttgcaaaaggtctggaatggagcttggaaaaatgttggatatcagcaacatggggctttcactgcagcagcaggtctgttttctacctcaagtctgtctgtctggcccttcctttcctggcgcagtctttgtcttaccttctgtctccaacttccttaaaccttctaaagaagaggataaagtagtttatgactcagccctccccaccccacctctatgaccccaaggccttgagtgaggcatccacgtccgtcctgttcccctcatcctagtcagtccatctgtttgtccctgccatggggccctgaggtccgtgaatgcatgtgtcttccttgacccactccatgtctatatgtcaccttcccctggccctgcctccccacgtctcccccttgtgtctcccttctccctcacctgctgcttcccctcacaagaccttggccagtgccaaggaggagaacgtcgagattcaccagaccttggaccagaccctgctggaactcaacaacctgtgagggccagccccacccccagccaggctatggttgccaccccaacccaataaaactgatgttactagcctctcaa

SEQ ID NO: 441748 - DNA, 1197 bp, Homo sapiens
ggagtagggtagcatgagtggtaaagaagagaggagtaagttaattatgccttattgggttgaggtgatgatggaggtggagatttggtgctgtgaaattgttttaggtaatagcttttctagtcaggttaggtctaaggaaggaggtaagggcaaggtttgggagcggagcgcctggctacagccctgcagaagctggaggaggccgagaaggcggctgatgagagcgagagaggaatgaaggtcatcgaaaaccgggccatgaaggatgaggagaagatggaactgcaggagatgcagagagcacctctatcgccaccacggagcactggttcactcctgacaccctggcacttactgacacccccagcccctgcactgagcccacccacaaaacaccatggcccacgctgaaacccctctgcacaggcactcccctggctgtcgctctctgattcaccactgcatgtgggcacgtgtggccccatcaaaccatgaccgcctctggtgccaatccctgacctcagagcacttagctggggttccaggatcaaacagagtgactggaaaggaagtagggtggtgaggtgcaggacaggggcaagaaggttgcaaaaggtctggaatggagcttggaaaaatgttggatatcagcaacatggggctttcactgcagcagcaggtctgttttctacctcaagtctgtctgtctggcccttcctttcctggcgcagtctttgtcttaccttctgtctccaacttccttaaaccttctaaagaagaggataaagtagtttatgactcagccctccccaccccacctctatgaccccaaggccttgagtgaggcatccacgtccgtcctgttcccctcatcctagtcagtccatctgtttgtccctgccatggggccctgaggtccgtgaatgcatgtgtcttccttgacccactccatgtctatatgtcaccttcccctggccctgcctccccacgtctcccccttgtgtctcccttctccctcacctgctgcttcccctcacaagaccttggccagtgccaaggaggagaacgtcgagattcaccagaccttggaccagaccctgctggaactcaacaacctgtgagggccagccccacccccagccaggctatggttgccaccccaacccaataaaactgatgttactagcctctcaa

SEQ ID NO: 441749 - DNA, 6301 bp, Homo sapiens
  misc_feature (304)..(304): n is a, c, g, or t
  misc_feature (309)..(309): n is a, c, g, or t
acttggacgttggaataagatagtaaaactcacaacaaaactttgtagaacttagtcaggaaaagaatctcaagcatagctttaaaaacagaaattgccccgagtactaaggatgagcaataatgaaattaaaacatattgtaataacattacacaaactatattggagattacaaagaagagattattcatagattataaagcttggaaagaatcaaaacaacacatttctggaaacagattgtataaatgctacaaaagagaaaaatatattttctccccacgcaacacaagaccttaaagncaatnctcgcttttcttgcaatattttataccttttcaattcatagaattactcaagaaaactacctcagttggttgctactttttgttgattccttttaccagacatgactaagtttctttttcatcagtagatttctgggctcctatattcactagagattgcaactcctggatttctcttacactagaatcctatttcgagccatatgggagattctgaattccagaacaaaagaattttgtaatttaaaattcgtgattgctcaatggaatcattttaattgttacttcatttctgtcgttatttaaaacttaagtggagagttttctcagggataagaaaaccacaatcaaggtcatacaaaacttttagaggcagtcagtctgctaagaaggctccagcaagagaaacgggatcttctgtttcaacaatcattacttaagaaaaaattaagaaaatgaaataagttttgcagaataactgtgaaatttttattcatgaaatatgtacttacactttgggccacgtgatgtcactctttgccgcgatgttctctctgaatccagacaaatacagcccttttcccatgggaaagaggctcaattctttttcactctctctgtgctgaacgatggcgaacacagcagaatgggactgacgaaatcagatgatttcttctaatttggaggcaattttcactaattagaagaagactgagtatttgaaatgttatactcaagtcgaggagatccagagggtcagcctctactgctctcgcttctgatcctcgcaatgtgggtggtggggagcggccagctccactactccgtcccggaggaagccgaacacggcaccttcgtgggccgcatcgcgcaggacctggggctggagctggcggagctggtgccgcgcctgttccagttggattccaaaggccgcggggaccttctggaggtaaatctgcagaatggcattttgtttgtgaattctcggatcgaccgcgaggagctgtgcgggcggagcgcggagtgcagcatccacctggaggtgatcgtagacaggccgctgcaggttttccatgtggacgtggaggtgaaggacattaacgacaaccctccagtgttcccagcgacacaaaagaatctgttcatcgcggaatccaggccgcttgactctcggtttccactagagggcgcgtccgatgcagatatcggggagaacgccctgctcacttacagactgagccccaatgagtatttcttcctggacgtgccaaccagcaaccagcaggtaaaacctcttggacttgtattacggaaacttttagacagagaagaaactccggagcttcatttattgctcacggccaccgatggaggcaaacccgagctgactggcaccgttcaattactcatcacggtactggacaacaatgacaatgccccagtgttcgacagaaccctgtatacggtgaaattaccagaaaacgtttctatcggaacgctggtgattcaccccaatgcctcagatttagacgaaggcttgaatggggatattatttactccttctccagtgatgtttctccagatataaaatccaagttccacatggaccccttaagtggggcaatcacagtgataggacatatggattttgaagaaagtagagcacacaagatcccagtcgaggctgtcgataaaggcttcccacccctggctggtcattgtacagttcttgtggaagttgtggatgtaaatgacaatgctccacagttgactatcaaaacgctctcggttcctgtaaaagaggacgcacaactggggacagttattgccctgattagtgtgatcgacctagacgcagatgccaacgggcaggttacctgctccctgacgccccacgtccccttcaagctggtgtccacctacaagaattactactcgttggtgctggacagagctctggaccgcgagagtgtgtccgcctacgagctggtggttaccgcgcgggacgggggctcgccttcactgtgggccacggccagggtgtctgtggaggtggccgacgtgaacgacaacgcaccagcgttcgcgcagtccgagtacacggtgttcgtgaaggagaacaacccgccgggctgccacatcttcacggtgtctgcgcgggacgctgacgcgcaggagaacgccctggtgtcctactcgctggtggagcggcggttgggcgagcgctcgctgtcgagctacgtgtcagtgcacgcggagagcggcaaggtgtacgcgctgcagccgttggaccacgaggagctggagctgctacagttccaggtgagcgcgcgcgacgcgggcgtgccgcctctgggcagcaacgtgacgctgcaggtgttcgtgctggacgagaacgacaatgcgccggcgctgctgacacctcggatgaggggcactgacggcgcagtgagcgagatggtgctgcggtcggtgggcgccggcgtagtggtggggaaggtgcgcgcagtggacgccgactcgggctacaacgcgtggctttcatacgagctgcagccagaaacggccagcgcgagcatcccgttccgcgtggggctgtacacgggcgagatcagcacaacgcgtgccctggacgaaacggacgcaccgcgccagcgcctactggtgctggtgaaagaccacggggagccagcgctgacggccacggccactgtgctggtgtcgctggtggagagcggccaggcgccaaagtcatcgtcgcgggcgtcagtgggtgccacgggccccgaggtgacgctggtggatgtcaacgtgtacctgatcatcgccatctgcgcggtgtctagcctgttggttctcacgctgctgctgtacactgtgctgcggtgctcggcgatgcccaccgagggcgagtgcgcgcctggcaagccgacgctggtgtgttctagcgcggtggggagttggtcgtactcgcagcagaggaggcagagggtgtgctctggcgagggtaagcagaagaccgacctcatggccttcagcccgggcctttctccttgtgctggatctacagagcgaacgggagaaccctctgcttcctcagattcaactgggaagccacgacagcccaaccctgactggcgttactctgcctccctgagagcaggcatgcacagctctgtgcacctagaggaggctggcattctacgggctggtccaggagggcctgatcagcagtggccaacagtatccagtgcaacaccagaaccagaggcaggagaagtgtcccctccagtcggtgcgggtgtcaacagcaacagctggacctttaaatacggaccaggcaaccccaaacaatccggtcccggtgagttgcccgacaaattcattatcccaggatctcctgcaatcatctccatccggcaggagcctactaacagccaaattgacaaaagtgacttcataaccttcggcaaaaaggaggagaccaagaaaaagaagaaaaagaagaagggtaacaagacccaggagaaaaaagagaaagggaacagcacgactgacaacagtgaccagtgaggtcctcaaatggaaacaagccacttagccagtttttgtaataatggcaaatctctcccatgtagcaattccctgctcctttttcctatctacatgagccctcttagagacctcagaaatctgcagaaagttccctgtgtctgtctagaacgcatttaacaggttttgtcgtaaaagctttactaagtctggtgttaactctttctctccactctggcttgttttcagaacctaaaaagcagacccaagtttcctttctcctccgccgcaaaggagaggcttcccagccccgccagtgagaggttggactctctgccctgtgctccggggatcctgtcttgatgacacttgcagggcaggctgaaaagttttgagattgagcagcttgggagtttgtggccactgggtatgtgtggctaccgcgggtatgcgagtgccagatattggctgagacgagccagcttagactaattggtacaaggaaggcaagaaaacaaagacaaataaacagcggaagttatcagtatggaggggaagtgtaaacttaaagggaccagactttctaaatcttacaactcaagaggtggcagccaccctctaggagacaaaactacccccactgacaaggctttaggagaccctaaagtctgttggctgtgacgtcattatacctaaaatctgcatcatacctgcaagccaacagttcagtgttttaacagagaaccaccctgggaaacagaagcagatctgatgtgtttcctatacatgtcctgtgctcactttattaaaaattcttttgcacacaatgtttatgaaaaggccagatccttttccaatacttatgcaaaagcaaaagaaaaccccgacacctcacctttcgctgtttgttgtttcatagatttatttaaaaaaagagaaagtctatagctataaatctttaaagagaaatatgaatacaattcccctaaactctcctcaaaagagaattcagtctacagccatttaaatgatcattgctgctacagaagtgctttaagagaattgcctgaaacatctgtattatatcggccacctgccaatcacagctttactctttcaggtcactctggggctgcctcttgcatgtattactaaataaaatgatctctctttctctctctctctctcttttctaagaaacaattatgtgcactttgatacacaaccttctctaaccaactatatatcaagacccaaaaattgaagaaaaatattgttttctcatacagtgagcagatttttcaatctactaattctgtgacttgtcttggtgtgctagcctacaccttctctttggtttagttttccttttctataacactctgaattgctaatcttactaacacctatgatgttacctgaaatcaatctcccatatgtatgctgtatgctatgctaagactcctgaaatatacttactctgtgcttgtgtatgtgaatgttaatgcaactattacctagagtgaactttaagctttattgttgaatgtaattccattatatttccttttgtacacctgtgaaaaagtggagtagtgtttttttaaccattgttaatcagcttttgtgtatgaaagacacagtaaaatttctttcttaaatcaagatactggtgattcaaggaattttatttatggtccagccaagagccatctcgtgccaagacttctgctggcaagggaatggataaagctgttttgttctagtaacaattttggaatgaatactgacaatattccatgagggtgtgcaagcacaaattttaccaatctgacctctttgaagttgcagaatgctttgaaattctaatggtatctgaaatatcagctcatagaaagtaacaaaatttgctgtcaccttaaataagacattttaattttgttataatgtacaatttagaagtttgattaattatattatctatttaggcattaatataaaagaggtaggagtctgttatttaaaaaaagcattaaatttaaaaaaaaactgtcttgtctacttttagcttcattctcccatattttgaagggtgtgtaacttcagctctgcaggattgcatggggtaaaacttgttaccaacacatgtgaaccattgctacattgtaggttgtgatcattttgccccactgaagcccatgtatctgaccttacgtgccttttgaactaggagaatcgggctaatttattaatgatgataattataatgtatctgtacagcactttttacatttgcgaagtgctttccaatccatgttagttactagttattacagctgtaaggataaaacacgtcatgtggattcattttgaattggtgctattggtatttcctctgttattgctaataaatgaaaatggtggtatgaaaaaaaa

SEQ ID NO: 441750 - DNA, 5360 bp, Homo sapiens
tgaaatatggaggatgcagctgcacttgactgaccgattaaaagatttcccttgactttgagaaacgatatttaatcagaacaaaatactgtgcactaaagatggagttttcctggggaagcggccaggaatcccggcgtctgctgctcttacttcttctcctcgcagcctgggaggcagggaacggtcagctccactactcggtctccgaggaggccaaacacggcaccttcgtgggccgcatcgcgcaggacctgggactggagctggcggagctggtgccgcgcctgttccgggtggcgtccaagggccgcggaggccttctggaggtaaatctgcagaatggcattttgtttgtgaattctcggatcgaccgggaggagctgtgccggcggagcgcggagtgcagcatccacctggaggtgatcgtagacaggccgctgcaggttttccatgtggacgtggaggtgagggacattaacgataacccgccggtgttcccagcaacacaaaagaacctgtccatcgcggaatccaggccgcttgactctcggtttccactagagggcgcctcggatgcagatatcggggagaacgccctgctcacttacagactgagcccaaatgaatacttttctctggaaaaaccacctgatgacgagctggtaaaaggtcttgggcttatattacggaaatctttagacagagaagaagctccggagatttttttagtgctcacagccactgatggaggcaaacccgagttgactggcaccgttcagttactcatcacagtactggatgccaatgacaatgccccagcttttgacagaaccatttataaggtgagattactagaaaatgttcctaatggaacattggtaattaaacttaacgcctcagatttagacgaaggattgaatggggacattgtttattcattctcaaatgatatttcgccaaatgtgaaatccaagtttcacatagatccaattactggacaaattattgtaaagggatatattgactttgaagaaagcaaatcctatgaaattattgtagagggcattgataagggacagctcccactttctggccattgtagagttattgtggaagtagaagacaacaacgataatgtcccagatttggaattcaagtctttatcacttccaattagagaggacgctccactgggtacagtcatcgccctgatcagcgtgtccgacaaagacatgggtgtcaatgggctggtcacctgctccttgacgtcccacgtccccttcaagctggtgtccaccttcaagaattactactcgttggtgctggacagtgccctggaccgcgagagcgtgtcagcctatgagctggtggtgaccgcgcgagacgggggctcgccttcgctgtgggccacggccagtgtttctgtggaggtggctgatgtgaacgacaacgctccggcgttcgcgcagcccgagtacacagtgttcgtgaaggagaacaacccgccgggctgccacatcttcactgtgtctgcgtgggacgcggacgcgcaggagaacgcgctggtgtcctactcgctggtagagcggcgggtaggggagcgcgcgctgtcgagctacgtttcggtgcatgcggagagcggcaaggtgtacgcgctgcagccgctggaccacgaggagctagagctgctgcagtttcaggtgaccgctcgcgatgccggcgtgccacctctgggcagcaacgtgacgctgcaggtgttcgtgctggacgaaaacgacaacgcgccagcactgctagcgcctcgggcgggtggcactggtggcgcagtgagcgagctggtgccatggtcggtgggtgtgggccacgtggtggcaaaggtgcgcgcggtggatgctgactcgggctacaacgcgtggctttcgtacgagctgcagccggggactggtggcgcgcgcatcccgttccgcgtggggctgtacactggcgagatcagcacaacgcgtgccctggacgaaacggacgctccgcgccaccgcctactggtactggtgaaggaccacggcgagcccgcgctgacggccacggccactgtgctggtgtcacttgtggagagtggacaggcgccaaaggcctcctcacgggcgttggtgggcgctgtgggtcccgatgctgcgctggtggatgtcaacgtatacctgatcattgccatctgcgcggtgtccagccttttggtgctcacgctgctgctgtacaccgcgctgcggtgctctgcgctgcccaccgagggcgcgtgcgctccgggcaagcccacgctggtgtgctccagtgcggtggggagctggtcatactcgcagcagaggaggccgagggtgtgctctggtgagggcccacccaagaccgacctcatggccttcagccccagtttacctgactctagggacagagaagatcagctgcagacaactgaggaatcctttgcaaagccacgacagcccaaccctgactggcgttactctgcctccctgagagcaggcatgcacagctctgtgcacctagaggaggctggcattctacgggctggtccaggagggcctgatcagcagtggccaacagtatccagtgcaacaccagaaccagaggcaggagaagtgtcccctccagtcggtgcgggtgtcaacagcaacagctggacctttaaatacggaccaggcaaccccaaacaatccggtcccggtgagttgcccgacaaattcattatcccaggatctcctgcaatcatctccatccggcaggagcctactaacagccaaattgacaaaagtgacttcataaccttcggcaaaaaggaggagaccaagaaaaagaagaaaaagaagaagggtaacaagacccaggagaaaaaagagaaagggaacagcacgactgacaacagtgaccagtgaggtcctcaaatggaaacaagccacttagccagtttttgtaataatggcaaatctctcccatgtagcaattccctgctcctttttcctatctacatgagccctcttagagacctcagaaatctgcagaaagttccctgtgtctgtctagaacgcatttaacaggttttgtcgtaaaagctttactaagtctggtgttaactctttctctccactctggcttgttttcagaacctaaaaagcagacccaagtttcctttctcctccgccgcaaaggagaggcttcccagccccgccagtgagaggttggactctctgccctgtgctccggggatcctgtcttgatgacacttgcagggcaggctgaaaagttttgagattgagcagcttgggagtttgtggccactgggtatgtgtggctaccgcgggtatgcgagtgccagatattggctgagacgagccagcttagactaattggtacaaggaaggcaagaaaacaaagacaaataaacagcggaagttatcagtatggaggggaagtgtaaacttaaagggaccagactttctaaatcttacaactcaagaggtggcagccaccctctaggagacaaaactacccccactgacaaggctttaggagaccctaaagtctgttggctgtgacgtcattatacctaaaatctgcatcatacctgcaagccaacagttcagtgttttaacagagaaccaccctgggaaacagaagcagatctgatgtgtttcctatacatgtcctgtgctcactttattaaaaattcttttgcacacaatgtttatgaaaaggccagatccttttccaatacttatgcaaaagcaaaagaaaaccccgacacctcacctttcgctgtttgttgtttcatagatttatttaaaaaaagagaaagtctatagctataaatctttaaagagaaatatgaatacaattcccctaaactctcctcaaaagagaattcagtctacagccatttaaatgatcattgctgctacagaagtgctttaagagaattgcctgaaacatctgtattatatcggccacctgccaatcacagctttactctttcaggtcactctggggctgcctcttgcatgtattactaaataaaatgatctctctttctctctctctctctcttttctaagaaacaattatgtgcactttgatacacaaccttctctaaccaactatatatcaagacccaaaaattgaagaaaaatattgttttctcatacagtgagcagatttttcaatctactaattctgtgacttgtcttggtgtgctagcctacaccttctctttggtttagttttccttttctataacactctgaattgctaatcttactaacacctatgatgttacctgaaatcaatctcccatatgtatgctgtatgctatgctaagactcctgaaatatacttactctgtgcttgtgtatgtgaatgttaatgcaactattacctagagtgaactttaagctttattgttgaatgtaattccattatatttccttttgtacacctgtgaaaaagtggagtagtgtttttttaaccattgttaatcagcttttgtgtatgaaagacacagtaaaatttctttcttaaatcaagatactggtgattcaaggaattttatttatggtccagccaagagccatctcgtgccaagacttctgctggcaagggaatggataaagctgttttgttctagtaacaattttggaatgaatactgacaatattccatgagggtgtgcaagcacaaattttaccaatctgacctctttgaagttgcagaatgctttgaaattctaatggtatctgaaatatcagctcatagaaagtaacaaaatttgctgtcaccttaaataagacattttaattttgttataatgtacaatttagaagtttgattaattatattatctatttaggcattaatataaaagaggtaggagtctgttatttaaaaaaagcattaaatttaaaaaaaaactgtcttgtctacttttagcttcattctcccatattttgaagggtgtgtaacttcagctctgcaggattgcatggggtaaaacttgttaccaacacatgtgaaccattgctacattgtaggttgtgatcattttgccccactgaagcccatgtatctgaccttacgtgccttttgaactaggagaatcgggctaatttattaatgatgataattataatgtatctgtacagcactttttacatttgcgaagtgctttccaatccatgttagttactagttattacagctgtaaggataaaacacgtcatgtggattcattttgaattggtgctattggtatttcctctgttattgctaataaatgaaaatggtggtatgaaaaaaaa

SEQ ID NO: 441751 - DNA, 5387 bp, Homo sapiens
tccctgactgttgaatgatggcggacgcagaagaaatggattaataaattccggaacatacagtattttatctttatgcggaagatcttctaatggaaataaaaccagaggtatttgacatggtgtttaccccggaggatagattgggaaagcaatgtctgctcctcccgcttctgctcctcgcagcctggaaggtggggagcggccagctccactactccgtacccgaggaggccaaacacggcaccttcgtgggccggatcgcgcaggacctggggctggagctggcggagctggtgccgcgcctgttcaggatggcctccaaagaccgcgaggaccttctggaggtaaatctgcagaatggcattttgtttgtgaattctcggatcgaccgcgaggagctgtgcgggcggagcgcggagtgcagcatccacctggaggtgatcgtggacaggccgctgcaggttttccatgtggacgtggaggtgagggacattaacgacaacccgcccttgttcccggtagaggaacaaagagtgctgatttacgaatctaggctgccagattctgtgtttccactggagggcgcgtccgatgcagatgttggctcaaattccatcttaacctataaactcagttctagcgaatacttcgggctagatgtgaaaataaacagtgatgacaataaacaaattgggctcttattaaagaaatccttggacagagaggaagctcctgcacacaacttattcctgacagccacagatgggggcaaacctgagctcacaggcactgttcagctgctggtcacagtgctggatgtgaatgataatgctcccactttcgaacagtctgaatacgaagtaagaatattcgaaaatgcagacaacggaacaacagttatcagactgaatgcttctgatcgggatgaaggagcgaatggggcaatttcatattcttttaatagccttgttgcagccatggttattgaccactttagcatagatcgaaatacgggagaaatagtgattcggggtaatttggattttgaacaagaaaacttatacaaaatcctcattgacgccacggacaaaggccatcctcccatggcgggtcattgcaccgttttagtgagaattttggataaaaatgataacgtccctgagatagcactgacttccttatccttgcctgtacgtgaagacgctcaatttggtactgtcatcgccctaattagcgtgaacgacctcgattcaggtgccaacgggcaggtgaactgctcgctgacgcctcacgtccctttcaagctggtgtccaccttcaagaattactactcgttggtgctggacagtgccctggaccgcgagagcgtgtcggcctatgagttggtggtaaccgcgcgggacgggggctcgccttcgctgtgggccaccgccagcttgtctgtggaggtggccgacatgaatgacaatgctccggcgttcgcgcagcccgagtacacagtgttcgtgaaggagaacaacccgccgggctgccacatcttcacggtgtctgcgcgagacgcggacgcgcaggagaacgcgctggtgtcctactcgctggtggagcggcgggtgggcgagcgcgcgttgtcgagctacatttcggtgcacgcggagagcggcaaggtgtacgcgctgcagccgctggaccacgaggagctagagctgctgcagtttcaggtgagcgcgcgcgacgcgggcgtgccgcctctgggcagcaacgtgacgctgcaggtgttcgtgctggacgagaacgacaacgcgccggcgctgctggcgcctcgggtgggtggtactggtggtgcagtgagcgagctggtgccgcggtcactgggtgcaggccaagtggtggcgaaggtgcgcgcagttgacgccgactcaggctacaacgcgtggctttcgtatgagctgcagcccccggcaagcagcgctcgcttcccgtttcgcgtggggctgtacacgggcgagatcagcaccactcgtgtcctggacgaagcggactctccgcgccaccggctgctggtgctggtgaaagaccacggtgagccggcgctgacagcgacggccacggttctggtgtcgctggtggagagtggccaggctccaaaggcgtcatcacgggcgtcggtgggcgccgcgggcccagaggcggcgctggtggatgtcaacgtgtacctgatcatcgccatctgcgcggtatccagcctgctggtcctcacgctactgctgtacacagcgctgcggtgctcggcgccacccaccgagggcgcgtgcacggcggacaagcccacgctggtgtgctccagcgcagtggggagctggtcgtactcgcagcagaggcggcagagggtgtgctccggggagggcccacccaagatggatctcatggcctttagccccagcctttcaccttgtcctattatgatgggtaaggcggagaatcaggatttaaatgaagatcatgatgccaaaccacgacagcccaaccctgactggcgttactctgcctccctgagagcaggcatgcacagctctgtgcacctagaggaggctggcattctacgggctggtccaggagggcctgatcagcagtggccaacagtatccagtgcaacaccagaaccagaggcaggagaagtgtcccctccagtcggtgcgggtgtcaacagcaacagctggacctttaaatacggaccaggcaaccccaaacaatccggtcccggtgagttgcccgacaaattcattatcccaggatctcctgcaatcatctccatccggcaggagcctactaacagccaaattgacaaaagtgacttcataaccttcggcaaaaaggaggagaccaagaaaaagaagaaaaagaagaagggtaacaagacccaggagaaaaaagagaaagggaacagcacgactgacaacagtgaccagtgaggtcctcaaatggaaacaagccacttagccagtttttgtaataatggcaaatctctcccatgtagcaattccctgctcctttttcctatctacatgagccctcttagagacctcagaaatctgcagaaagttccctgtgtctgtctagaacgcatttaacaggttttgtcgtaaaagctttactaagtctggtgttaactctttctctccactctggcttgttttcagaacctaaaaagcagacccaagtttcctttctcctccgccgcaaaggagaggcttcccagccccgccagtgagaggttggactctctgccctgtgctccggggatcctgtcttgatgacacttgcagggcaggctgaaaagttttgagattgagcagcttgggagtttgtggccactgggtatgtgtggctaccgcgggtatgcgagtgccagatattggctgagacgagccagcttagactaattggtacaaggaaggcaagaaaacaaagacaaataaacagcggaagttatcagtatggaggggaagtgtaaacttaaagggaccagactttctaaatcttacaactcaagaggtggcagccaccctctaggagacaaaactacccccactgacaaggctttaggagaccctaaagtctgttggctgtgacgtcattatacctaaaatctgcatcatacctgcaagccaacagttcagtgttttaacagagaaccaccctgggaaacagaagcagatctgatgtgtttcctatacatgtcctgtgctcactttattaaaaattcttttgcacacaatgtttatgaaaaggccagatccttttccaatacttatgcaaaagcaaaagaaaaccccgacacctcacctttcgctgtttgttgtttcatagatttatttaaaaaaagagaaagtctatagctataaatctttaaagagaaatatgaatacaattcccctaaactctcctcaaaagagaattcagtctacagccatttaaatgatcattgctgctacagaagtgctttaagagaattgcctgaaacatctgtattatatcggccacctgccaatcacagctttactctttcaggtcactctggggctgcctcttgcatgtattactaaataaaatgatctctctttctctctctctctctcttttctaagaaacaattatgtgcactttgatacacaaccttctctaaccaactatatatcaagacccaaaaattgaagaaaaatattgttttctcatacagtgagcagatttttcaatctactaattctgtgacttgtcttggtgtgctagcctacaccttctctttggtttagttttccttttctataacactctgaattgctaatcttactaacacctatgatgttacctgaaatcaatctcccatatgtatgctgtatgctatgctaagactcctgaaatatacttactctgtgcttgtgtatgtgaatgttaatgcaactattacctagagtgaactttaagctttattgttgaatgtaattccattatatttccttttgtacacctgtgaaaaagtggagtagtgtttttttaaccattgttaatcagcttttgtgtatgaaagacacagtaaaatttctttcttaaatcaagatactggtgattcaaggaattttatttatggtccagccaagagccatctcgtgccaagacttctgctggcaagggaatggataaagctgttttgttctagtaacaattttggaatgaatactgacaatattccatgagggtgtgcaagcacaaattttaccaatctgacctctttgaagttgcagaatgctttgaaattctaatggtatctgaaatatcagctcatagaaagtaacaaaatttgctgtcaccttaaataagacattttaattttgttataatgtacaatttagaagtttgattaattatattatctatttaggcattaatataaaagaggtaggagtctgttatttaaaaaaagcattaaatttaaaaaaaaactgtcttgtctacttttagcttcattctcccatattttgaagggtgtgtaacttcagctctgcaggattgcatggggtaaaacttgttaccaacacatgtgaaccattgctacattgtaggttgtgatcattttgccccactgaagcccatgtatctgaccttacgtgccttttgaactaggagaatcgggctaatttattaatgatgataattataatgtatctgtacagcactttttacatttgcgaagtgctttccaatccatgttagttactagttattacagctgtaaggataaaacacgtcatgtggattcattttgaattggtgctattggtatttcctctgttattgctaataaatgaaaatggtggtatgaaaaaaaa

SEQ ID NO: 441752 - DNA, 5229 bp, Homo sapiens
atggtgtgcccgaatggatacgacccagggggccgacatctactgctgtttattataattctagcagcttgggaggcagggagaggccagctccactactcggtccccgaggaggctaaacatggcaacttcgtgggccgcatcgcgcaggacctggggctggagctggcggagctggtgccgcgcctgttccgggcggtgtgcaaattccgtggggatcttctggaggtaaatctgcagaatggcattttgtttgtgaattctcggatcgaccgcgaggagctgtgcgggcggagcgcggagtgcagcatccacctggaggtgatcgtggaaaggccgctgcaggttttccatgtggacgtggaggtgaaggacattaacgacaaccctccggtgttcccagcgacacaaaggaatctgttcatcgcggaatccaggccgcttgactctcggtttccactagagggcgcgtccgatgcagatatcggggagaacgccctgctcacttacagactgagccccaatgagtatttcttcctggacgtgccaaccagcaaccagcaggtaaaacctcttggacttgtattacggaaacttttagacagagaagaaactccggagcttcatttattgctcacggccaccgatggaggcaaacccgagctgactggcaccgttcaattactcatcacggtactggacaacaatgacaatgccccagtgttcgacagaaccctgtatacggtgaaattaccagaaaacgtttctatcggaacgctggtgattcaccccaatgcctcagatttagacgaaggcttgaatggggatattatttactccttctccagtgatgtttctccagatataaaatccaagttccacatggaccccttaagtggggcaatcacagtgataggacatatggattttgaagaaagtagagcacacaagatcccagtcgaggctgtcgataaaggcttcccacccctggctggtcattgtacagttcttgtggaagttgtggatgtaaatgacaatgctccacagttgactctcacttccctgtctctccctattccagaggacgcccaaccaggtaccgtcatcacattgattagcgtgtttgaccgagattttggagtcaacggacaggttacctgctccctgacgccccgcgttcccttcaagttggtgtccaccttcaagaattactattcattggtgctggacagcgctctggaccgcgagagtgtgtccgcctatgagctggtggttaccgcgcgggacgggggctcgccttctctgtgggccactgctagcgtgtccgtggaggtggccgacgtgaacgacaacgccccggcgttcgcgcagcccgagtatacggtgttcgtgaaggagaacaacccgccgggctgccacatcttcactgtgtcggcgggggacgcggacgcgcagaagaacgcgctggtgtcctactcgctggtggagctgcgggtgggcgagcgcgcgctgtcgagctacgtgtcagtgcacgcggagagcggcaaggtgtacgcgctgcagccgttggaccacgaggagctggagctgttgcagttccaggtgagcgcgcgcgatgcgggcgtgccgcctctgggcagcaacgtgacgctgcaggtgttcgtgctggacgagaacgacaacgcgccggcactgctggcgcctcgggtgggtggcactggtggcgcagtgagagagcttgtgccgcggtctgtgggcgcgggccatgtggtggcgaaggtacgtgcagttgacgctgactcaggctacaacgcgtggctttcgtatgagttgcaaccggtggcggccggtgcgagcatcccgttccgcgtggggctgtacactggtgagatcagcacgacacgagccctagatgagacggacgcaccgcgccaccgccttctggtgcttgtgaaggaccacggggagccctcgctgacagccacagccaccgtgctggtgtcgctggtggaaagcggccaggcaccaaaggcgtcgtcgcgggcatcgttgggcattgcaggcccagagaccgagctggtggatgtcaacgtgtacctgatcatcgccatctgcgcggtgtccagtctgttggtgcttaccctgctgctgtacacggcgttgcggtgctcagcgccgtcctctgagggcgcatgtagtttggtaaagcccactctggtgtgctccagcgcggtggggagctggtcattctcccagcagaggcggcagagggtgtgctctggggagggcccacccaagacagacctcatggccttcagtcccagccttcctcagggtccatcctctacagacaatccacgacagcccaaccctgactggcgttactctgcctccctgagagcaggcatgcacagctctgtgcacctagaggaggctggcattctacgggctggtccaggagggcctgatcagcagtggccaacagtatccagtgcaacaccagaaccagaggcaggagaagtgtcccctccagtcggtgcgggtgtcaacagcaacagctggacctttaaatacggaccaggcaaccccaaacaatccggtcccggtgagttgcccgacaaattcattatcccaggatctcctgcaatcatctccatccggcaggagcctactaacagccaaattgacaaaagtgacttcataaccttcggcaaaaaggaggagaccaagaaaaagaagaaaaagaagaagggtaacaagacccaggagaaaaaagagaaagggaacagcacgactgacaacagtgaccagtgaggtcctcaaatggaaacaagccacttagccagtttttgtaataatggcaaatctctcccatgtagcaattccctgctcctttttcctatctacatgagccctcttagagacctcagaaatctgcagaaagttccctgtgtctgtctagaacgcatttaacaggttttgtcgtaaaagctttactaagtctggtgttaactctttctctccactctggcttgttttcagaacctaaaaagcagacccaagtttcctttctcctccgccgcaaaggagaggcttcccagccccgccagtgagaggttggactctctgccctgtgctccggggatcctgtcttgatgacacttgcagggcaggctgaaaagttttgagattgagcagcttgggagtttgtggccactgggtatgtgtggctaccgcgggtatgcgagtgccagatattggctgagacgagccagcttagactaattggtacaaggaaggcaagaaaacaaagacaaataaacagcggaagttatcagtatggaggggaagtgtaaacttaaagggaccagactttctaaatcttacaactcaagaggtggcagccaccctctaggagacaaaactacccccactgacaaggctttaggagaccctaaagtctgttggctgtgacgtcattatacctaaaatctgcatcatacctgcaagccaacagttcagtgttttaacagagaaccaccctgggaaacagaagcagatctgatgtgtttcctatacatgtcctgtgctcactttattaaaaattcttttgcacacaatgtttatgaaaaggccagatccttttccaatacttatgcaaaagcaaaagaaaaccccgacacctcacctttcgctgtttgttgtttcatagatttatttaaaaaaagagaaagtctatagctataaatctttaaagagaaatatgaatacaattcccctaaactctcctcaaaagagaattcagtctacagccatttaaatgatcattgctgctacagaagtgctttaagagaattgcctgaaacatctgtattatatcggccacctgccaatcacagctttactctttcaggtcactctggggctgcctcttgcatgtattactaaataaaatgatctctctttctctctctctctctcttttctaagaaacaattatgtgcactttgatacacaaccttctctaaccaactatatatcaagacccaaaaattgaagaaaaatattgttttctcatacagtgagcagatttttcaatctactaattctgtgacttgtcttggtgtgctagcctacaccttctctttggtttagttttccttttctataacactctgaattgctaatcttactaacacctatgatgttacctgaaatcaatctcccatatgtatgctgtatgctatgctaagactcctgaaatatacttactctgtgcttgtgtatgtgaatgttaatgcaactattacctagagtgaactttaagctttattgttgaatgtaattccattatatttccttttgtacacctgtgaaaaagtggagtagtgtttttttaaccattgttaatcagcttttgtgtatgaaagacacagtaaaatttctttcttaaatcaagatactggtgattcaaggaattttatttatggtccagccaagagccatctcgtgccaagacttctgctggcaagggaatggataaagctgttttgttctagtaacaattttggaatgaatactgacaatattccatgagggtgtgcaagcacaaattttaccaatctgacctctttgaagttgcagaatgctttgaaattctaatggtatctgaaatatcagctcatagaaagtaacaaaatttgctgtcaccttaaataagacattttaattttgttataatgtacaatttagaagtttgattaattatattatctatttaggcattaatataaaagaggtaggagtctgttatttaaaaaaagcattaaatttaaaaaaaaactgtcttgtctacttttagcttcattctcccatattttgaagggtgtgtaacttcagctctgcaggattgcatggggtaaaacttgttaccaacacatgtgaaccattgctacattgtaggttgtgatcattttgccccactgaagcccatgtatctgaccttacgtgccttttgaactaggagaatcgggctaatttattaatgatgataattataatgtatctgtacagcactttttacatttgcgaagtgctttccaatccatgttagttactagttattacagctgtaaggataaaacacgtcatgtggattcattttgaattggtgctattggtatttcctctgttattgctaataaatgaaaatggtggtatgaaaaaaaa

SEQ ID NO: 441753 - DNA, 5268 bp, Homo sapiens
atggtgttttctaggagagggggcctgggagcccgggatctgcttctttggcttctgctcctcgcagcctgggaggtggggagcggccagctccactactcgatcccggaggaagccaaacacggcaccttcgttggccgcgttgctcaggacctgggactggagctggcggagctggtgcctcgcctgttccgggtggcgtccaaaacacacagggaccttctggaggtaaatctgcagaatggcattttgtttgtgaattctcggatcgatcgcgaggagctgtgccagtggagcgcggagtgcagcatccacctggagttgatcgccgacaggccgctgcaggttttccatgtggaggtgaaggtgaaagacattaacgataatccacccgtcttcaggggcagagaacaaataatatttattcctgaatctagactcctgaattcgcgttttccgatagaaggagctgctgatgcagacattggtgctaacgctcttctaacgtacacgctcagcccgagtgattatttctctttggatgtagaggcaagtgatgaactgagtaaatctctttggcttgaattgagaaaatatttggatagagaagaaacaccagaacttcacttattactgactgccactgatgggggcaaaccggagctgcaaggtacagttgagctgctgatcaccgtcctcgacgttaatgataacgccccactgtttgaccaggccgtatacagagtccacttgttagagactacagcaaatggaacattagtgaccacattaaatgcctctgatgctgacgaaggtgtaaatggtgaagtcgtcttttcctttgacagtggtatttctcgtgacattcaagaaaaattcaaagttgattccagctcaggagaaattaggttaattgataaactggattatgaagaaacaaaatcctacgaaattcaagtaaaggcagttgataaaggaagtcctccgatgtcaaatcactgtaaggttttggtgaaagtgctggatgtaaatgataatgctccagaactggcggtcacttcattgtatttgcctatcagagaggacgctccactcagcaccgtcatcgccctcatcaccgtgtctgaccgtgactcaggtgccaacgggcaggtgacttgctccttaatgccccacgtccccttcaagctggtgtccaccttcaagaattactactcgttggtgttggacagcgccctggatcgcgagagcctgtcggtctatgagctggtggtgaccgcgcgggacgggggctcgccttcgctgtgggccacggccagggtgtccgtggaggtggccgacgtgaatgacaacgcgcctgcgttcgcgcagcccgagtacacagtattcgtgaaggagaacaacccgccgggctgccacatcttcacggtgtctgcgcgggacgcggacgcgcaggagaacgcgctggtgtcctattcgctggtggaacggcgggtgggcgagcgcgcgctgtcgaactacgtgtcagtgcacgcggagagcggcaaggtgtacgcactgcagcccctggaccacgaggagctggagctgctgcagttccaggtgagcgcgcgggatgcgggcgtgccgcctctgggcagcaacgtgacgctgcaggtgttcgtgctggacgagaacgacaacgcgccggcgctgctggcgcctcgagtgggtggcactattggtgcagtcagtgagctggtgccgcgattggtgggtgcgggtcatgtggtggcgaaggtgcgcgcagtggacgccgactcgggctacaacgcgtggctgtcctatgaactgcagccggcagcaggcggcgcgcgcatcccgttccgcgtggggctgtacacgggcgagatcagcacgactcgtgtcctggacgaggctgacttgtcgcgctaccgccttctggtgctagtgaaggatcacggtgagccggcgctgacagccacggccactgtgcttgtatctctggtggagagcggccaggcgccaaaggcgtcttcgcgggcgtcggtgggtgtcgcgggcccagaggcggcgctggtggatgtcaacgtgtacctgatcatcgccatctgcgcggtgtccagcctgctggtgctcacactgctgctgtacacggcgctgcggtgctcagtgccgcccactgagggtgcgtatgtgccgggcaagcccactctggtgtgctccagcgcgttggggagctggtcgaactcacagcagaggcggcagagggtgtgctctagcgagggcccacccaagaccgacctcatggccttcagcccaggcctatctccaagtcttaacacgtcagaaagaaatgaacaaccagaagcaaatttggatctttctggtaatccacgacagcccaaccctgactggcgttactctgcctccctgagagcaggcatgcacagctctgtgcacctagaggaggctggcattctacgggctggtccaggagggcctgatcagcagtggccaacagtatccagtgcaacaccagaaccagaggcaggagaagtgtcccctccagtcggtgcgggtgtcaacagcaacagctggacctttaaatacggaccaggcaaccccaaacaatccggtcccggtgagttgcccgacaaattcattatcccaggatctcctgcaatcatctccatccggcaggagcctactaacagccaaattgacaaaagtgacttcataaccttcggcaaaaaggaggagaccaagaaaaagaagaaaaagaagaagggtaacaagacccaggagaaaaaagagaaagggaacagcacgactgacaacagtgaccagtgaggtcctcaaatggaaacaagccacttagccagtttttgtaataatggcaaatctctcccatgtagcaattccctgctcctttttcctatctacatgagccctcttagagacctcagaaatctgcagaaagttccctgtgtctgtctagaacgcatttaacaggttttgtcgtaaaagctttactaagtctggtgttaactctttctctccactctggcttgttttcagaacctaaaaagcagacccaagtttcctttctcctccgccgcaaaggagaggcttcccagccccgccagtgagaggttggactctctgccctgtgctccggggatcctgtcttgatgacacttgcagggcaggctgaaaagttttgagattgagcagcttgggagtttgtggccactgggtatgtgtggctaccgcgggtatgcgagtgccagatattggctgagacgagccagcttagactaattggtacaaggaaggcaagaaaacaaagacaaataaacagcggaagttatcagtatggaggggaagtgtaaacttaaagggaccagactttctaaatcttacaactcaagaggtggcagccaccctctaggagacaaaactacccccactgacaaggctttaggagaccctaaagtctgttggctgtgacgtcattatacctaaaatctgcatcatacctgcaagccaacagttcagtgttttaacagagaaccaccctgggaaacagaagcagatctgatgtgtttcctatacatgtcctgtgctcactttattaaaaattcttttgcacacaatgtttatgaaaaggccagatccttttccaatacttatgcaaaagcaaaagaaaaccccgacacctcacctttcgctgtttgttgtttcatagatttatttaaaaaaagagaaagtctatagctataaatctttaaagagaaatatgaatacaattcccctaaactctcctcaaaagagaattcagtctacagccatttaaatgatcattgctgctacagaagtgctttaagagaattgcctgaaacatctgtattatatcggccacctgccaatcacagctttactctttcaggtcactctggggctgcctcttgcatgtattactaaataaaatgatctctctttctctctctctctctcttttctaagaaacaattatgtgcactttgatacacaaccttctctaaccaactatatatcaagacccaaaaattgaagaaaaatattgttttctcatacagtgagcagatttttcaatctactaattctgtgacttgtcttggtgtgctagcctacaccttctctttggtttagttttccttttctataacactctgaattgctaatcttactaacacctatgatgttacctgaaatcaatctcccatatgtatgctgtatgctatgctaagactcctgaaatatacttactctgtgcttgtgtatgtgaatgttaatgcaactattacctagagtgaactttaagctttattgttgaatgtaattccattatatttccttttgtacacctgtgaaaaagtggagtagtgtttttttaaccattgttaatcagcttttgtgtatgaaagacacagtaaaatttctttcttaaatcaagatactggtgattcaaggaattttatttatggtccagccaagagccatctcgtgccaagacttctgctggcaagggaatggataaagctgttttgttctagtaacaattttggaatgaatactgacaatattccatgagggtgtgcaagcacaaattttaccaatctgacctctttgaagttgcagaatgctttgaaattctaatggtatctgaaatatcagctcatagaaagtaacaaaatttgctgtcaccttaaataagacattttaattttgttataatgtacaatttagaagtttgattaattatattatctatttaggcattaatataaaagaggtaggagtctgttatttaaaaaaagcattaaatttaaaaaaaaactgtcttgtctacttttagcttcattctcccatattttgaagggtgtgtaacttcagctctgcaggattgcatggggtaaaacttgttaccaacacatgtgaaccattgctacattgtaggttgtgatcattttgccccactgaagcccatgtatctgaccttacgtgccttttgaactaggagaatcgggctaatttattaatgatgataattataatgtatctgtacagcactttttacatttgcgaagtgctttccaatccatgttagttactagttattacagctgtaaggataaaacacgtcatgtggattcattttgaattggtgctattggtatttcctctgttattgctaataaatgaaaatggtggtatgaaaaaaaa

SEQ ID NO: 441754 - DNA, 5368 bp, Homo sapiens
gaaaagaaccttccatttttggctgtgccaagaagctcagaaaggcgataatataaaaaatatatagttaattgggaattgaatttacaaaatacattgtgtggtgatgcaatagaaagctcataattggaacgagattgagatggtatattcccggagaggaagtctgggatcccggctcctgctgctctggcttctccttgcctactggaaggcagggagcggccagctccactactcgatcccggaggaagccaaacacggaaccttcgttggccgcatcgcgcaggacctagggctggagctggcggagctggtgccgcgcctgttccgggtggcgtccaagggccgcggggaccttctggaggtaaatctgcagaatggcattttgtttgtgaattctcggatcgaccgggaggagctgtgccggcggagggcggagtgcagcatccacctggaggtgatcgtggacaggccgctgcaggttttccatgtggaggtggcagtgaaggacatcaatgacaatccgcccaggttctccagacaagaacaaagattattcattttagagtcaagaatgccagattcgcggtttccgctagagggcgcgtcggatttggatattggagcaaatgcacaattgagatacaggttaaatccaaacgaatattttgacttagatgttaaaacaaatgaagaagaaacgaactttttagagctggttttgaggaaatccttagatagagaagaaacacaagaacaccgtttattagtgattgcaactgatggaggaaaacccgaactaacaggtacagttcagttgttgatcaatgtattggatgctaatgataacgccccagaatttgataaatccatttataatgtcagattgttggaaaatgcaccaagtgggacattagttattaaactgaacgcctcagatgcagatgagggcatcaataaggaaatagtgtatttctttagtaatcttgttcttgacgatgtaaagtccaaatttataattaattctaatactggtgaaataaaagttaacggggaactggattatgaagactataactcatatgaaattaatattgatgccatggataaaagtacattcccattatcaggacactgtaaagtagtagtgaaactcctggatgtgaatgataataccccagagatggccataaccacccttttcctgcctgtcaaagaggacgctccactcagcacggtcattgctctgatcagcgtgtctgaccgtgactcaggtgccaacgggcaggtgacctgctccctaatgccccacgttcccttcaagctggtgtccaccttcaagaattactactcgttggtgctggacagcgccctggaccgcgagagcgtgtcggtctatgagctggtggtgaccgcgcgggacgggggctcgccttcgctgtgggccaccgccagcgtgtctgtggaagtggccgacgtgaacgacaacgctccggcgttcgcgcagccccagtataccgtgttcgtgaaggagaacaacccgccaggctgccacatcttcacggtgtctgcacgggacgcggacgcgcaggagaacgccctggtgtcctactcgctggtggagcggcgggtgggcgagcgcccgctgtcgagttacgtttcggtgcacgcggagagcggcaaggtgtacgcgctgcagccgctggaccacgaggaagtggagctgctgcagttccaggtgagcgcgcgcgacgcgggcgtgccgcctctgggcagcaacgtgacgctgcaggtgttcgtgctggacgagaacgacaacgcgccggcgctgctggtgcctcgagtgggtggcaccggcggcgcagtgagcgagctggtgccgaggtcagtgggtgcgggccacgtggtggcgaaggtgcgcgcagtggaccctgattcgggctacaacgcttggctttcgtatgagctgcagccagcgcctggcagtgcgcgcatcccgttccgcgtggggctgtacacaggcgagatcagcacaacacgctctctggatgagaccgaagcaccgcgccaccgccttctggtgctggtgaaggaccatggagagcccccgctgacagccacagccacagtgctggtgtcgctggtggaaagtggccaggcgccgaaggcctcatcgcgggcgtcggcgggcgctgtgggtcccgaggctgccctggtggatgtcaacgtgtacctgatcatcgccatctgtgcggtgtccagcctgctggtgctcacgctgctgctgtacaccgcgctgcggtgctcggcgcagcccaccgaggccgtgtgcacacggggcaagcccactctgttgtgctccagcgcggtggggagctggtcgtactcgcagcagaggagacagagggtgtgctctggggaagctccacccaaaacagacctcatggccttcagtccaagccttcctcagggtcccacctctacagacaacccacgacagcccaaccctgactggcgttactctgcctccctgagagcaggcatgcacagctctgtgcacctagaggaggctggcattctacgggctggtccaggagggcctgatcagcagtggccaacagtatccagtgcaacaccagaaccagaggcaggagaagtgtcccctccagtcggtgcgggtgtcaacagcaacagctggacctttaaatacggaccaggcaaccccaaacaatccggtcccggtgagttgcccgacaaattcattatcccaggatctcctgcaatcatctccatccggcaggagcctactaacagccaaattgacaaaagtgacttcataaccttcggcaaaaaggaggagaccaagaaaaagaagaaaaagaagaagggtaacaagacccaggagaaaaaagagaaagggaacagcacgactgacaacagtgaccagtgaggtcctcaaatggaaacaagccacttagccagtttttgtaataatggcaaatctctcccatgtagcaattccctgctcctttttcctatctacatgagccctcttagagacctcagaaatctgcagaaagttccctgtgtctgtctagaacgcatttaacaggttttgtcgtaaaagctttactaagtctggtgttaactctttctctccactctggcttgttttcagaacctaaaaagcagacccaagtttcctttctcctccgccgcaaaggagaggcttcccagccccgccagtgagaggttggactctctgccctgtgctccggggatcctgtcttgatgacacttgcagggcaggctgaaaagttttgagattgagcagcttgggagtttgtggccactgggtatgtgtggctaccgcgggtatgcgagtgccagatattggctgagacgagccagcttagactaattggtacaaggaaggcaagaaaacaaagacaaataaacagcggaagttatcagtatggaggggaagtgtaaacttaaagggaccagactttctaaatcttacaactcaagaggtggcagccaccctctaggagacaaaactacccccactgacaaggctttaggagaccctaaagtctgttggctgtgacgtcattatacctaaaatctgcatcatacctgcaagccaacagttcagtgttttaacagagaaccaccctgggaaacagaagcagatctgatgtgtttcctatacatgtcctgtgctcactttattaaaaattcttttgcacacaatgtttatgaaaaggccagatccttttccaatacttatgcaaaagcaaaagaaaaccccgacacctcacctttcgctgtttgttgtttcatagatttatttaaaaaaagagaaagtctatagctataaatctttaaagagaaatatgaatacaattcccctaaactctcctcaaaagagaattcagtctacagccatttaaatgatcattgctgctacagaagtgctttaagagaattgcctgaaacatctgtattatatcggccacctgccaatcacagctttactctttcaggtcactctggggctgcctcttgcatgtattactaaataaaatgatctctctttctctctctctctctcttttctaagaaacaattatgtgcactttgatacacaaccttctctaaccaactatatatcaagacccaaaaattgaagaaaaatattgttttctcatacagtgagcagatttttcaatctactaattctgtgacttgtcttggtgtgctagcctacaccttctctttggtttagttttccttttctataacactctgaattgctaatcttactaacacctatgatgttacctgaaatcaatctcccatatgtatgctgtatgctatgctaagactcctgaaatatacttactctgtgcttgtgtatgtgaatgttaatgcaactattacctagagtgaactttaagctttattgttgaatgtaattccattatatttccttttgtacacctgtgaaaaagtggagtagtgtttttttaaccattgttaatcagcttttgtgtatgaaagacacagtaaaatttctttcttaaatcaagatactggtgattcaaggaattttatttatggtccagccaagagccatctcgtgccaagacttctgctggcaagggaatggataaagctgttttgttctagtaacaattttggaatgaatactgacaatattccatgagggtgtgcaagcacaaattttaccaatctgacctctttgaagttgcagaatgctttgaaattctaatggtatctgaaatatcagctcatagaaagtaacaaaatttgctgtcaccttaaataagacattttaattttgttataatgtacaatttagaagtttgattaattatattatctatttaggcattaatataaaagaggtaggagtctgttatttaaaaaaagcattaaatttaaaaaaaaactgtcttgtctacttttagcttcattctcccatattttgaagggtgtgtaacttcagctctgcaggattgcatggggtaaaacttgttaccaacacatgtgaaccattgctacattgtaggttgtgatcattttgccccactgaagcccatgtatctgaccttacgtgccttttgaactaggagaatcgggctaatttattaatgatgataattataatgtatctgtacagcactttttacatttgcgaagtgctttccaatccatgttagttactagttattacagctgtaaggataaaacacgtcatgtggattcattttgaattggtgctattggtatttcctctgttattgctaataaatgaaaatggtggtatgaaaaaaaa

SEQ ID NO: 441755 - DNA, 5268 bp, Homo sapiens
atgttgttctcctggcgagaagatcctggagcccagtgcctgctgctttctcttctgctcctcgcagcctcggaggtggggagcggccagctccactactccgtctctgaggaggccaagcatggcaccttcgtgggccgcatcgcgcaggacctggggctggagctggcggagctggtgccgcgcctgttccgggtggcgtccaaaagacacggggaccttctggaggtaaatctgcagaatggcattttgtttgtgaattctcggatagaccgcgaggaactgtgcgggcggagcgcggagtgcagcatccacctggaggtgatcgtggacaggccgctgcaggttttccatgtggaggtggaagtgaaggacattaatgacaacgcgccagtttttccaatggctgtaaagaatctgtttatttccgaatcccgacagcctggctctcggttttcgctagagggcgcatcagatgcagatatcggaacaaattcgttgttgacttacagtcttgattccactgaatattttaccttggacgttaaaagaaatgatgaggaaattaaatcccttggactcgtgttgaaaaaaaatttaaatcgagaggacactcctaagcattatttactaataacagcaattgatggtgggaaaccagagctcactggcacgactcaactaaagatcactgttttagatgtaaacgacaacgccccagcgtttgagaggacgatctataaagtcagattactcgaaaatgcaccaaatggtaccctagtggtgaccgttaacgccaccgatttggatgaaggagtaaataaggatatcgcgtattctttcaatacggacatgtcagcagatattctgtcaaaattccatttagatccagtcaatggacaaatcagtgtaaagggtaacatagatttcgaggaaagtaagtcatatgaaatccaggtagaagccacggataaaggaaatcccccaatgtcagatcactgcacagttctactcgaaattgtggacatcaatgataatgtacctgagttagttattcaatcactatctttacctgtattagaagactctccacttagcacagtcatcgctctgatcagcgtgtccgaccgcgactcaggagtcaatggacaggtcacctgctcgctgacgccccacgtccccttcaagctggtgtccaccttcaagaattactactcattggtgctggacagccctctggaccgcgagagcgtgtcggcctatgagctggtggtgactgctcgggacgggggctcgccttcactgtgggccacggccagcgtgtccgtggaggtggccgacgtgaacgacaatgcgccggcattctcgcagtccgagtacacggtgttcgtgaaggagaacaacccgccgggctgccacatcttcacggtgtctgcgcgggacgcggacgcgcaggagaacgccctggtgtcctactcgctggtggaacggcgggtgggggagcgcgcgctgtcgagctacgtgtcggtacacgcggagagcggcaaggtgtacgcgctgcagccgctggaccacgaggagctagagctgctgcagttccaggtgagtgcgcgcgatgcgggcgtgccgcctctgggcagcaacgtgacgctgcaggtgttcgtgctggacgagaacgacaacgcgccggcactgctgatgcctcgggtgggtggcatcggtggcgcagtgagcgagctggtgccgcggtcagtgggtgcgggccacgtggtagcgaaggtgcgcgcagtggatgcagactcaggctacaacgcgtggctttcgtatgagctgcagcctgggaccggcggtgcgcgcatcccgtttcgcgtggggctgtacacgggagagatcagcacgacccgtgccctggacgaggtggacgccccgcgccatcgcctactggtgctggtgaaggaccacggtgaaccctcattgaccgccacggccactgtgctggtgtcgctggtggagagtggccaggcacccaaggcctcgtcccaggcgtccgctggcgccacgggcccggaagctgcactggtggatgtcaacgtgtacttgatcgtcgccatctgcgcggtgtccagtctgttggtgctcacactgctgctatatactgctctgcggtgctccgcgccgccaaccgaaggcgactgtgggccgggcaagcccacgctggtgtgctccagcgcggtggggagctggtcatactcgcagcagaggcagcagagggtgtgctctggagaggggttgcccaagaccgacctcatggcttttagccctagccttcctccttgtccaattagccgggatagagaggagaaacaggatgtggacgttgatctctcagccaaaccacgacagcccaaccctgactggcgttactctgcctccctgagagcaggcatgcacagctctgtgcacctagaggaggctggcattctacgggctggtccaggagggcctgatcagcagtggccaacagtatccagtgcaacaccagaaccagaggcaggagaagtgtcccctccagtcggtgcgggtgtcaacagcaacagctggacctttaaatacggaccaggcaaccccaaacaatccggtcccggtgagttgcccgacaaattcattatcccaggatctcctgcaatcatctccatccggcaggagcctactaacagccaaattgacaaaagtgacttcataaccttcggcaaaaaggaggagaccaagaaaaagaagaaaaagaagaagggtaacaagacccaggagaaaaaagagaaagggaacagcacgactgacaacagtgaccagtgaggtcctcaaatggaaacaagccacttagccagtttttgtaataatggcaaatctctcccatgtagcaattccctgctcctttttcctatctacatgagccctcttagagacctcagaaatctgcagaaagttccctgtgtctgtctagaacgcatttaacaggttttgtcgtaaaagctttactaagtctggtgttaactctttctctccactctggcttgttttcagaacctaaaaagcagacccaagtttcctttctcctccgccgcaaaggagaggcttcccagccccgccagtgagaggttggactctctgccctgtgctccggggatcctgtcttgatgacacttgcagggcaggctgaaaagttttgagattgagcagcttgggagtttgtggccactgggtatgtgtggctaccgcgggtatgcgagtgccagatattggctgagacgagccagcttagactaattggtacaaggaaggcaagaaaacaaagacaaataaacagcggaagttatcagtatggaggggaagtgtaaacttaaagggaccagactttctaaatcttacaactcaagaggtggcagccaccctctaggagacaaaactacccccactgacaaggctttaggagaccctaaagtctgttggctgtgacgtcattatacctaaaatctgcatcatacctgcaagccaacagttcagtgttttaacagagaaccaccctgggaaacagaagcagatctgatgtgtttcctatacatgtcctgtgctcactttattaaaaattcttttgcacacaatgtttatgaaaaggccagatccttttccaatacttatgcaaaagcaaaagaaaaccccgacacctcacctttcgctgtttgttgtttcatagatttatttaaaaaaagagaaagtctatagctataaatctttaaagagaaatatgaatacaattcccctaaactctcctcaaaagagaattcagtctacagccatttaaatgatcattgctgctacagaagtgctttaagagaattgcctgaaacatctgtattatatcggccacctgccaatcacagctttactctttcaggtcactctggggctgcctcttgcatgtattactaaataaaatgatctctctttctctctctctctctcttttctaagaaacaattatgtgcactttgatacacaaccttctctaaccaactatatatcaagacccaaaaattgaagaaaaatattgttttctcatacagtgagcagatttttcaatctactaattctgtgacttgtcttggtgtgctagcctacaccttctctttggtttagttttccttttctataacactctgaattgctaatcttactaacacctatgatgttacctgaaatcaatctcccatatgtatgctgtatgctatgctaagactcctgaaatatacttactctgtgcttgtgtatgtgaatgttaatgcaactattacctagagtgaactttaagctttattgttgaatgtaattccattatatttccttttgtacacctgtgaaaaagtggagtagtgtttttttaaccattgttaatcagcttttgtgtatgaaagacacagtaaaatttctttcttaaatcaagatactggtgattcaaggaattttatttatggtccagccaagagccatctcgtgccaagacttctgctggcaagggaatggataaagctgttttgttctagtaacaattttggaatgaatactgacaatattccatgagggtgtgcaagcacaaattttaccaatctgacctctttgaagttgcagaatgctttgaaattctaatggtatctgaaatatcagctcatagaaagtaacaaaatttgctgtcaccttaaataagacattttaattttgttataatgtacaatttagaagtttgattaattatattatctatttaggcattaatataaaagaggtaggagtctgttatttaaaaaaagcattaaatttaaaaaaaaactgtcttgtctacttttagcttcattctcccatattttgaagggtgtgtaacttcagctctgcaggattgcatggggtaaaacttgttaccaacacatgtgaaccattgctacattgtaggttgtgatcattttgccccactgaagcccatgtatctgaccttacgtgccttttgaactaggagaatcgggctaatttattaatgatgataattataatgtatctgtacagcactttttacatttgcgaagtgctttccaatccatgttagttactagttattacagctgtaaggataaaacacgtcatgtggattcattttgaattggtgctattggtatttcctctgttattgctaataaatgaaaatggtggtatgaaaaaaaa

SEQ ID NO: 441756 - DNA, 6706 bp, Homo sapiens
  misc_feature (304)..(304): n is a, c, g, or t
  misc_feature (309)..(309): n is a, c, g, or t
acttggacgttggaataagatagtaaaactcacaacaaaactttgtagaacttagtcaggaaaagaatctcaagcatagctttaaaaacagaaattgccccgagtactaaggatgagcaataatgaaattaaaacatattgtaataacattacacaaactatattggagattacaaagaagagattattcatagattataaagcttggaaagaatcaaaacaacacatttctggaaacagattgtataaatgctacaaaagagaaaaatatattttctccccacgcaacacaagaccttaaagncaatnctcgcttttcttgcaatattttataccttttcaattcatagaattactcaagaaaactacctcagttggttgctactttttgttgattccttttaccagacatgactaagtttctttttcatcagtagatttctgggctcctatattcactagagattgcaactcctggatttctcttacactagaatcctatttcgagccatatgggagattctgaattccagaacaaaagaattttgtaatttaaaattcgtgattgctcaatggaatcattttaattgttacttcatttctgtcgttatttaaaacttaagtggagagttttctcagggataagaaaaccacaatcaaggtcatacaaaacttttagaggcagtcagtctgctaagaaggctccagcaagagaaacgggatcttctgtttcaacaatcattacttaagaaaaaattaagaaaatgaaataagttttgcagaataactgtgaaatttttattcatgaaatatgtacttacactttgggccacgtgatgtcactctttgccgcgatgttctctctgaatccagacaaatacagcccttttcccatgggaaagaggctcaattctttttcactctctctgtgctgaacgatggcgaacacagcagaatgggactgacgaaatcagatgatttcttctaatttggaggcaattttcactaattagaagaagactgagtatttgaaatgttatactcaagtcgaggagatccagagggtcagcctctactgctctcgcttctgatcctcgcaatgtgggtggtggggagcggccagctccactactccgtcccggaggaagccgaacacggcaccttcgtgggccgcatcgcgcaggacctggggctggagctggcggagctggtgccgcgcctgttccagttggattccaaaggccgcggggaccttctggaggtaaatctgcagaatggcattttgtttgtgaattctcggatcgaccgcgaggagctgtgcgggcggagcgcggagtgcagcatccacctggaggtgatcgtagacaggccgctgcaggttttccatgtggacgtggaggtgaaggacattaacgacaaccctccagtgttcccagcgacacaaaagaatctgttcatcgcggaatccaggccgcttgactctcggtttccactagagggcgcgtccgatgcagatatcggggagaacgccctgctcacttacagactgagccccaatgagtatttcttcctggacgtgccaaccagcaaccagcaggtaaaacctcttggacttgtattacggaaacttttagacagagaagaaactccggagcttcatttattgctcacggccaccgatggaggcaaacccgagctgactggcaccgttcaattactcatcacggtactggacaacaatgacaatgccccagtgttcgacagaaccctgtatacggtgaaattaccagaaaacgtttctatcggaacgctggtgattcaccccaatgcctcagatttagacgaaggcttgaatggggatattatttactccttctccagtgatgtttctccagatataaaatccaagttccacatggaccccttaagtggggcaatcacagtgataggacatatggattttgaagaaagtagagcacacaagatcccagtcgaggctgtcgataaaggcttcccacccctggctggtcattgtacagttcttgtggaagttgtggatgtaaatgacaatgctccacagttgactatcaaaacgctctcggttcctgtaaaagaggacgcacaactggggacagttattgccctgattagtgtgatcgacctagacgcagatgccaacgggcaggttacctgctccctgacgccccacgtccccttcaagctggtgtccacctacaagaattactactcgttggtgctggacagagctctggaccgcgagagtgtgtccgcctacgagctggtggttaccgcgcgggacgggggctcgccttcactgtgggccacggccagggtgtctgtggaggtggccgacgtgaacgacaacgcaccagcgttcgcgcagtccgagtacacggtgttcgtgaaggagaacaacccgccgggctgccacatcttcacggtgtctgcgcgggacgctgacgcgcaggagaacgccctggtgtcctactcgctggtggagcggcggttgggcgagcgctcgctgtcgagctacgtgtcagtgcacgcggagagcggcaaggtgtacgcgctgcagccgttggaccacgaggagctggagctgctacagttccaggtgagcgcgcgcgacgcgggcgtgccgcctctgggcagcaacgtgacgctgcaggtgttcgtgctggacgagaacgacaatgcgccggcgctgctgacacctcggatgaggggcactgacggcgcagtgagcgagatggtgctgcggtcggtgggcgccggcgtagtggtggggaaggtgcgcgcagtggacgccgactcgggctacaacgcgtggctttcatacgagctgcagccagaaacggccagcgcgagcatcccgttccgcgtggggctgtacacgggcgagatcagcacaacgcgtgccctggacgaaacggacgcaccgcgccagcgcctactggtgctggtgaaagaccacggggagccagcgctgacggccacggccactgtgctggtgtcgctggtggagagcggccaggcgccaaagtcatcgtcgcgggcgtcagtgggtgccacgggccccgaggtgacgctggtggatgtcaacgtgtacctgatcatcgccatctgcgcggtgtctagcctgttggttctcacgctgctgctgtacactgtgctgcggtgctcggcgatgcccaccgagggcgagtgcgcgcctggcaagccgacgctggtgtgttctagcgcggtggggagttggtcgtactcgcagcagaggaggcagagggtgtgctctggcgagggtaagcagaagaccgacctcatggccttcagcccgggcctttctccttgtgctggatctacagagcgaacgggagaaccctctgcttcctcagattcaactgggaaggtgggtttttctagcattttatttatttatataattttttttcttgaaagatattatcgattactcccaggggccgttcaaatagttttattcatttttctagaaatccagcagattttttttctgataaagtaaaccccttaacattggagccgactttgtcttgacttctagtgagaattataaactgtatattaaatagatattttttgggtgctgaatcaattttatttaaatttgtgattaaagtgacattgaatttctgatgctatgctgccataacacttgaaaaccaatttagttgttagtcattcattaaacattaacatcactatcatttatttattgctaaatgatgcatagtattttagtctacttgtattgtttataagaaacccaagcaaaaatatatagcaattgttaccttgttaagtttgtagttctctacatttctctggatggagactgtgaacatctgattgttcagcaaccttcagtatctattattttaataagaaagaaacttcccctaaactttagaaaacagttgctccactttaggaatcaaattatgtcaataaatgttataaacacagccttcatttcaacttatataaaatatgttttaaaatgcctgacaatgtagataattcaagaaatgttgactgaaattttgtctacacttagaacattttttgaaattcagtttacagaaattggagaaaatgctttttaaacaagtgtttcctttcttcaagaagacattctccttttaattgaaattttctccattcagtgataaaatgatcagccatgtgaagattcgaaacttcgagttcttttgaaattcagagtctgtaacttaaaacattacccttatgaatttagatgagaattcacttgttctgtcagtaatccataagacagaaatctgtttttttaaaaatatctttttctcctctcagctcatacataacacaaggcagaaatctggatatgagatttgcctctttaatgtcactacatgttatgtttcctgaattgtagtatgtgactttcaaaatggtggttttccacactctacctttagtgcaagctatttgtttgttttctaatttatagttttaaaaacttcgcttattgagtttttgttatgtggtttatatttttctttctctttcagctattttatttaatattgtgtcagatattttacaaggtatgacctaattaaaaactcagtagagaaagatcagaatggccttgagaatagagccacaaaaataactatgaaaatgccagtaacgtttatttaaaacaaaatattttaatttttaaattttcccttaaaacacacttttggaatatgctacaatattacatgttttttgtctttttatttttctgagacggagtcgttttctgccacccaggctggagtacagtggcatgatcttggctcactgcaacgtctgcctcctgggttcaagcaattctcctgcctcagcctcctgagtagctgggattataggcacatgccaccgcgcccagctaatttttgtatttttagtagagatggggtttcatcatgttggccaggttggtctcgaactcctgaccttgtgatgctcccacctcggcctcccaaagtgctgggattaaagctgtgagccactgtgccaaggcttttttatttttttttttttgtcattttctttcaaaacttgagtggtctctgagctcctgtcattaaacctatctatatctgtctatcagcacaactcaccttgaatatagtcttatactttcaagtatctttgtctttgcacgtttttcaagtttcatgtgccatttaaacttggacccaggtatctgattatttgatgtgaatagagggatgctacagatgtcatttgtctcccgccctaagtcctccagtctccttagagctagtacttactaagcatttactatgtcatcaataatcataaaacgtatttttttttttgagtcagagtctcgctctgttgcccaggctggagtgcagtggtgccatcttggctcactccaagctccccctcccgtgttcacgccattctcctgcctcagcctcccgagtagctgggactacaggcgcctgccaccatgcccgcctaatttttttgtatttttagtagagatggggtttcaccgtgttagtcaggatggtctcgatctcctgacctcatgatcctcccgcctcagcctcccaaaatgctgggattacaggcgtgagccaccgcgcctggcctaaaatgtgttctttattattgacggctgtattgatgggattggtaatttagtccttcatattaatctctattctctctcagagtacaagctctcatcatatgcaaattctcagaagggctgtgaacaccttagtaataaatttatcttttgaggtcattagcaaacatgaactcacagggatccagagatggtaaaattcaaaacagcctgtcaagttcaaaacagagaggtgaaagcagaagagacactttcctattttgcctaataggtctccttatatgcatctgtagttaacattcctcaattcaagttagaatcatgaaacaataatgaagctcctcctatgtctcttttcaagttgtaattactatataggaaaaactaagttgtcacccaatatcttagacactttgagagcaaagggggtgctgtaaataagtatacaagatcacagacctaaattgagcctgttccagacaaattggggcctatggtcaacctatccttagacctgctaacgcattagcattagcagcacctaagtcctcattgaatgttctggttcaaggctccacctcagaaattctgaaatgggtagtaagagcaaattttcattttaaagcacacctgagatgattctcatacaaccgaaattttagatccatagccctatttgatacttgacagtgcaagtttctgtaatttaaaaagatgtggtggcctgacacctgcaatcccaacattttgggaggccaaggtgggagggtcccttccttgagcccagcagtttgagaccaatgtagtgagactcatctctgccaaaaaaaaaaaattagccgggcatggtggcacacatctctagtcccaattactcaggaggctgaggcgagagaatcgcttgagcctgggacattgaggctgcagtgaactgtgatggcacaactgcatttcagcccgggtgacagcaagattctgtctcaaaaaaaa

SEQ ID NO: 441757 - DNA, 4476 bp, Homo sapiens
atggtgttttctaggagagggggcctgggagcccgggatctgcttctttggcttctgctcctcgcagcctgggaggtggggagcggccagctccactactcgatcccggaggaagccaaacacggcaccttcgttggccgcgttgctcaggacctgggactggagctggcggagctggtgcctcgcctgttccgggtggcgtccaaaacacacagggaccttctggaggtaaatctgcagaatggcattttgtttgtgaattctcggatcgatcgcgaggagctgtgccagtggagcgcggagtgcagcatccacctggagttgatcgccgacaggccgctgcaggttttccatgtggaggtgaaggtgaaagacattaacgataatccacccgtcttcaggggcagagaacaaataatatttattcctgaatctagactcctgaattcgcgttttccgatagaaggagctgctgatgcagacattggtgctaacgctcttctaacgtacacgctcagcccgagtgattatttctctttggatgtagaggcaagtgatgaactgagtaaatctctttggcttgaattgagaaaatatttggatagagaagaaacaccagaacttcacttattactgactgccactgatgggggcaaaccggagctgcaaggtacagttgagctgctgatcaccgtcctcgacgttaatgataacgccccactgtttgaccaggccgtatacagagtccacttgttagagactacagcaaatggaacattagtgaccacattaaatgcctctgatgctgacgaaggtgtaaatggtgaagtcgtcttttcctttgacagtggtatttctcgtgacattcaagaaaaattcaaagttgattccagctcaggagaaattaggttaattgataaactggattatgaagaaacaaaatcctacgaaattcaagtaaaggcagttgataaaggaagtcctccgatgtcaaatcactgtaaggttttggtgaaagtgctggatgtaaatgataatgctccagaactggcggtcacttcattgtatttgcctatcagagaggacgctccactcagcaccgtcatcgccctcatcaccgtgtctgaccgtgactcaggtgccaacgggcaggtgacttgctccttaatgccccacgtccccttcaagctggtgtccaccttcaagaattactactcgttggtgttggacagcgccctggatcgcgagagcctgtcggtctatgagctggtggtgaccgcgcgggacgggggctcgccttcgctgtgggccacggccagggtgtccgtggaggtggccgacgtgaatgacaacgcgcctgcgttcgcgcagcccgagtacacagtattcgtgaaggagaacaacccgccgggctgccacatcttcacggtgtctgcgcgggacgcggacgcgcaggagaacgcgctggtgtcctattcgctggtggaacggcgggtgggcgagcgcgcgctgtcgaactacgtgtcagtgcacgcggagagcggcaaggtgtacgcactgcagcccctggaccacgaggagctggagctgctgcagttccagccacgacagcccaaccctgactggcgttactctgcctccctgagagcaggcatgcacagctctgtgcacctagaggaggctggcattctacgggctggtccaggagggcctgatcagcagtggccaacagtatccagtgcaacaccagaaccagaggcaggagaagtgtcccctccagtcggtgcgggtgtcaacagcaacagctggacctttaaatacggaccaggcaaccccaaacaatccggtcccggtgagttgcccgacaaattcattatcccaggatctcctgcaatcatctccatccggcaggagcctactaacagccaaattgacaaaagtgacttcataaccttcggcaaaaaggaggagaccaagaaaaagaagaaaaagaagaagggtaacaagacccaggagaaaaaagagaaagggaacagcacgactgacaacagtgaccagtgaggtcctcaaatggaaacaagccacttagccagtttttgtaataatggcaaatctctcccatgtagcaattccctgctcctttttcctatctacatgagccctcttagagacctcagaaatctgcagaaagttccctgtgtctgtctagaacgcatttaacaggttttgtcgtaaaagctttactaagtctggtgttaactctttctctccactctggcttgttttcagaacctaaaaagcagacccaagtttcctttctcctccgccgcaaaggagaggcttcccagccccgccagtgagaggttggactctctgccctgtgctccggggatcctgtcttgatgacacttgcagggcaggctgaaaagttttgagattgagcagcttgggagtttgtggccactgggtatgtgtggctaccgcgggtatgcgagtgccagatattggctgagacgagccagcttagactaattggtacaaggaaggcaagaaaacaaagacaaataaacagcggaagttatcagtatggaggggaagtgtaaacttaaagggaccagactttctaaatcttacaactcaagaggtggcagccaccctctaggagacaaaactacccccactgacaaggctttaggagaccctaaagtctgttggctgtgacgtcattatacctaaaatctgcatcatacctgcaagccaacagttcagtgttttaacagagaaccaccctgggaaacagaagcagatctgatgtgtttcctatacatgtcctgtgctcactttattaaaaattcttttgcacacaatgtttatgaaaaggccagatccttttccaatacttatgcaaaagcaaaagaaaaccccgacacctcacctttcgctgtttgttgtttcatagatttatttaaaaaaagagaaagtctatagctataaatctttaaagagaaatatgaatacaattcccctaaactctcctcaaaagagaattcagtctacagccatttaaatgatcattgctgctacagaagtgctttaagagaattgcctgaaacatctgtattatatcggccacctgccaatcacagctttactctttcaggtcactctggggctgcctcttgcatgtattactaaataaaatgatctctctttctctctctctctctcttttctaagaaacaattatgtgcactttgatacacaaccttctctaaccaactatatatcaagacccaaaaattgaagaaaaatattgttttctcatacagtgagcagatttttcaatctactaattctgtgacttgtcttggtgtgctagcctacaccttctctttggtttagttttccttttctataacactctgaattgctaatcttactaacacctatgatgttacctgaaatcaatctcccatatgtatgctgtatgctatgctaagactcctgaaatatacttactctgtgcttgtgtatgtgaatgttaatgcaactattacctagagtgaactttaagctttattgttgaatgtaattccattatatttccttttgtacacctgtgaaaaagtggagtagtgtttttttaaccattgttaatcagcttttgtgtatgaaagacacagtaaaatttctttcttaaatcaagatactggtgattcaaggaattttatttatggtccagccaagagccatctcgtgccaagacttctgctggcaagggaatggataaagctgttttgttctagtaacaattttggaatgaatactgacaatattccatgagggtgtgcaagcacaaattttaccaatctgacctctttgaagttgcagaatgctttgaaattctaatggtatctgaaatatcagctcatagaaagtaacaaaatttgctgtcaccttaaataagacattttaattttgttataatgtacaatttagaagtttgattaattatattatctatttaggcattaatataaaagaggtaggagtctgttatttaaaaaaagcattaaatttaaaaaaaaactgtcttgtctacttttagcttcattctcccatattttgaagggtgtgtaacttcagctctgcaggattgcatggggtaaaacttgttaccaacacatgtgaaccattgctacattgtaggttgtgatcattttgccccactgaagcccatgtatctgaccttacgtgccttttgaactaggagaatcgggctaatttattaatgatgataattataatgtatctgtacagcactttttacatttgcgaagtgctttccaatccatgttagttactagttattacagctgtaaggataaaacacgtcatgtggattcattttgaattggtgctattggtatttcctctgttattgctaataaatgaaaatggtggtatgaaaaaaaa

SEQ ID NO: 441758 - DNA, 4473 bp, Homo sapiens
atggtttccagatgtagctgcctgggggtccagtgtctgctgctctcgcttcttctcctcgcagcctgggaggtggggagcggccagctccactactcagtctacgaggaggccagacacggcaccttcgtgggccgcatcgcgcaggacctggggctggagctggcggagctggtgcagcgcctgttccgggtggcgtccaaaagacacggggaccttctggaggtaaatctgcagaatggcattttgtttgtgaattctcggattgaccgcgaggagctgtgcgggcggagcgtggagtgcagcatccacctggaggtgatcgtggacaggccgctgcaggttttccatgtggacgtggaagtgaaggacattaacgacaacccgcccaggttctccgtaacagaacaaaagctctcaatacctgaatccagactgcttgactctcgatttccactagaaggcgcatctgatgcggatgttggagagaacgcattgcttacttacaaactcagtccaaatgagtattttgttcttgatattataaacaaaaaagacaaagacaaattcccagtgcttgttctgcggaagctgctggatcgtgaagaaaatcctcagctaaagttgttgttgacagcaactgatggaggcaaacctgaatttaccggatctgtttctctgctgatcctggtgttagatgccaatgataacgcccctatctttgacagaccggtttatgaagttaagatgtatgaaaatcaagtgaaccaaacattagtaatacggctcaacgcttctgattcggatgaaggaataaacaaggaaatgatgtattcatttagctctttggtcccacccacgataagaaggaaattttggataaacgaaaggacgggagaaataaaagtaaatgatgctattgactttgaggacagtaacacttatgaaattcatgtagatgttacagataagggaaacccacctatggttggtcactgcacggtcctagtggaactactggatgaaaatgataattcacctgaggtgattgtcacttctctgtctctcccagtgaaagaagatgctcaagtgggcaccgtcattgccctaatcagcgtttctgaccatgattcaggagccaacggacaggtcacctgctctctgacgcctcacgttccgttcaagctggtgtccacctacaagaattactactcattggtgctggacagcgctctggaccgcgagagggtgtcggcctatgagctggtggtgaccgcgcgggacgggggctcgcctccgctgtgggccacggccagcgtgtctgtggaggtggccgacgtgaacgacaacgcgcctgcgttcgcgcagtccgagtacacggtgttcgtgaaggagaacaacccgccaggctgccacatcttcacggtgtctgcgtgggacgcggacgcgcaggagaacgccctggtgtcctactctctggtggagcggcggttgggcgagcgctcgctgtcgagctacgtgtcggtgcacgcggagagcggcaaggtgtacgcgctgcagccgctggaccacgaggagctggagctgctacagttccagccacgacagcccaaccctgactggcgttactctgcctccctgagagcaggcatgcacagctctgtgcacctagaggaggctggcattctacgggctggtccaggagggcctgatcagcagtggccaacagtatccagtgcaacaccagaaccagaggcaggagaagtgtcccctccagtcggtgcgggtgtcaacagcaacagctggacctttaaatacggaccaggcaaccccaaacaatccggtcccggtgagttgcccgacaaattcattatcccaggatctcctgcaatcatctccatccggcaggagcctactaacagccaaattgacaaaagtgacttcataaccttcggcaaaaaggaggagaccaagaaaaagaagaaaaagaagaagggtaacaagacccaggagaaaaaagagaaagggaacagcacgactgacaacagtgaccagtgaggtcctcaaatggaaacaagccacttagccagtttttgtaataatggcaaatctctcccatgtagcaattccctgctcctttttcctatctacatgagccctcttagagacctcagaaatctgcagaaagttccctgtgtctgtctagaacgcatttaacaggttttgtcgtaaaagctttactaagtctggtgttaactctttctctccactctggcttgttttcagaacctaaaaagcagacccaagtttcctttctcctccgccgcaaaggagaggcttcccagccccgccagtgagaggttggactctctgccctgtgctccggggatcctgtcttgatgacacttgcagggcaggctgaaaagttttgagattgagcagcttgggagtttgtggccactgggtatgtgtggctaccgcgggtatgcgagtgccagatattggctgagacgagccagcttagactaattggtacaaggaaggcaagaaaacaaagacaaataaacagcggaagttatcagtatggaggggaagtgtaaacttaaagggaccagactttctaaatcttacaactcaagaggtggcagccaccctctaggagacaaaactacccccactgacaaggctttaggagaccctaaagtctgttggctgtgacgtcattatacctaaaatctgcatcatacctgcaagccaacagttcagtgttttaacagagaaccaccctgggaaacagaagcagatctgatgtgtttcctatacatgtcctgtgctcactttattaaaaattcttttgcacacaatgtttatgaaaaggccagatccttttccaatacttatgcaaaagcaaaagaaaaccccgacacctcacctttcgctgtttgttgtttcatagatttatttaaaaaaagagaaagtctatagctataaatctttaaagagaaatatgaatacaattcccctaaactctcctcaaaagagaattcagtctacagccatttaaatgatcattgctgctacagaagtgctttaagagaattgcctgaaacatctgtattatatcggccacctgccaatcacagctttactctttcaggtcactctggggctgcctcttgcatgtattactaaataaaatgatctctctttctctctctctctctcttttctaagaaacaattatgtgcactttgatacacaaccttctctaaccaactatatatcaagacccaaaaattgaagaaaaatattgttttctcatacagtgagcagatttttcaatctactaattctgtgacttgtcttggtgtgctagcctacaccttctctttggtttagttttccttttctataacactctgaattgctaatcttactaacacctatgatgttacctgaaatcaatctcccatatgtatgctgtatgctatgctaagactcctgaaatatacttactctgtgcttgtgtatgtgaatgttaatgcaactattacctagagtgaactttaagctttattgttgaatgtaattccattatatttccttttgtacacctgtgaaaaagtggagtagtgtttttttaaccattgttaatcagcttttgtgtatgaaagacacagtaaaatttctttcttaaatcaagatactggtgattcaaggaattttatttatggtccagccaagagccatctcgtgccaagacttctgctggcaagggaatggataaagctgttttgttctagtaacaattttggaatgaatactgacaatattccatgagggtgtgcaagcacaaattttaccaatctgacctctttgaagttgcagaatgctttgaaattctaatggtatctgaaatatcagctcatagaaagtaacaaaatttgctgtcaccttaaataagacattttaattttgttataatgtacaatttagaagtttgattaattatattatctatttaggcattaatataaaagaggtaggagtctgttatttaaaaaaagcattaaatttaaaaaaaaactgtcttgtctacttttagcttcattctcccatattttgaagggtgtgtaacttcagctctgcaggattgcatggggtaaaacttgttaccaacacatgtgaaccattgctacattgtaggttgtgatcattttgccccactgaagcccatgtatctgaccttacgtgccttttgaactaggagaatcgggctaatttattaatgatgataattataatgtatctgtacagcactttttacatttgcgaagtgctttccaatccatgttagttactagttattacagctgtaaggataaaacacgtcatgtggattcattttgaattggtgctattggtatttcctctgttattgctaataaatgaaaatggtggtatgaaaaaaaa

SEQ ID NO: 441759 - DNA, 3291 bp, Homo sapiens
ttttcctttgtggattcttttttaaaactaccaagtttgagaatatgaatatatttgtttttcatattgttctgcaatgaatataaagtcacttataatcagaaagcaattaaatgtaaataacagtaaagaatgagaactatagaaaatagatatgaaaatgcaagcccacagagatgagaatagatcatgtggaacataaacactaaagagctgcttttataaaacttcaattttttctttgagttccctagcagccaaagtaacaagggagactgaaagtaaaacaattcaaatttgatagtatttttatatgaggaacaacactttcaggaaatgtttaaccctagtttttcatgaggccaccttaacaactgaattctctttctctctcactctgtgtataagtattttagataagtaaaagaacaatgttataatgttaagtcaaacatagacacaataatttaaatttgatgttaatcgagaaatacaatgccatttccatatatatttagtttcaatatgacttataatctgaatattccataaataagcacgttggaaatatttgggggaagaaacccaaaacacgtgaaattctgtggtggtaaatgcagtgcacagtactcacagttttaggcgcaaggtgtcgctctttacttggtggaaagttcatttaaaggttggtctgaacagtgaggcactcccatacaaaggaactccatcataccggatgccaccgtttaaggatcctttgaaacttcttaagaattcaacgagatttttaacctgaaactgaagaatctggtactgtaagtgtaaagaagcttattttggaagccaatttcgtatgcgatgtttggttttcagagaaggggattgggcaccccacgactacagctctggcttctcctcctcgaattctgggaggtggggagcggccagctccactactccgtctcggaggaggccaaacacggcaccttcgtgggccgcatcgcgcaggacctggggctggagctggcggagctggtgcagcgcctgttccgggtggcgtccaaaacacatggggaccttctggaggtaaatctgcagaatggcattttgtttgtgaattctcggatcgaccgcgaggagctgtgcgggcagagcgcggagtgcagcatccacctggaggtgatcgtggacaggccgctgcaggttttccatgtgaacgtggaggtgaaggacattaacgacaacccgccggtgttctcgctcagagaacaaaagctgctgattgcggaatctaagcaatcggactcgcgttttccactagagggagcttctgatgctgacattgaagagaatgctctattgacctacaggctaagtaaaaatgagtatttttctttagattcaccaacaaatggtaagcagattaaaagactgtcacttattttaaagaagtctctggatagagagaaaactccggaacttaatttgctgctaacagctacagacgggggaaaaccagagcttactggcaccgttcggctgttagtccaagtcttggatgtcaacgacaatgatccagagtttgataaatcagaatataaggtgagccttatggaaaatgctgctaaagaaactcttgtgctcaaactaaacgccacagaccgagacgaaggagtcaatggagaggtaacatactccttaatgtcaattaagcccaatggaagacacttatttacactagatcaaaataatggagaagtgagggtcaatggaactttagattatgaagaaaacaagttttataaaattgaagtacaggctacagataaggggactcccccaatggcaggtcactgtacagtctgggtggaaatcttggacaccaacgataactctcctgaagtcgccgtgacttccttgtccctcccagtacgagaggacgctcagcccagcacggtcattgccctgatcagcgtgtctgaccgtgactcaggtgtcaacggacaggtgacctgctcgctgacgccccacgttcccttcaagctggtgtccaccttcaagaattactactcgttggtgctggacagcgccctggaccgcgagaacgtgtgggcctatgaactggtggtgactgcgcgggatgggggttcgccttctctgtgggccacggccagggtatccgtggaggtggccgacgtgaacgacaatgcgcctgcgttcgcacagcccgagtacaccgtgttcgtgaaggagaacaacccaccaggctgccacatcttcacagtgtcggcgcgggacgcggacgcgcaggagaacgcgctggtgtcctactcgctggtggagcggcggttgggcgaccgcgcgctgtcgagctacgtgtcggtgcacgcggagagcggcaaggtgtacgcgctgcagccgttggaccacgaggagctggagctgctacagttccaggtgagcgcgcgcgatgcgggcgtgccgcctctgagcagcaacgtgacgctgcaggtgttcgtgctggacgagaacgacaacgcgccggcactgctggcgactcaggctggcagcgcgggaggcgcagttaacaagctagtaccgcggtcggtgggtgcgggccacgtggtggcgaaggtgcgcgcagtggatgcggactcaggctacaacgcgtggctttcatatgaattgcagccggcggcgggcggctcgcgcatcccgttccgcgtggggctgtacacgggcgagataagcacaacgcgtgccctggacgaggcagactcgccgcgccaccgacttctagtactggtgaaggatcacggtgagccggcgctgacggccacggccaccgtgctggtgtcgttggtggagagcggacaggcgccaaaggcctcttcccggactttggcgggcgccgcgagcccagaggctgcgctggtggatgtcaacgtgtacctgatcatcgccatctgcgtggtgtccagcctcctggtactcacgctgctgctgtatacggcgctgtggtggtcggcaacgcccactgagggcgcgtgcgcgccggggaagcccacgctggtgtgctcccgcgcggtggggagctggtcatactcgcagcagaggcggcagagggtgtgctctgaggagggcccacctaagacggacctcatggccttcagccccagtcttcctctaggtctgaataaagaggaggaaggggaaagacaggagccagggtcaaatcaccccggacaggtgagttttctacagattccacctatcaggaagtgtatgtga

SEQ ID NO: 441760 - DNA, 2571 bp, Homo sapiens
atggtgttttctaggagagggggcctgggagcccgggatctgcttctttggcttctgctcctcgcagcctgggaggtggggagcggccagctccactactcgatcccggaggaagccaaacacggcaccttcgttggccgcgttgctcaggacctgggactggagctggcggagctggtgcctcgcctgttccgggtggcgtccaaaacacacagggaccttctggaggtaaatctgcagaatggcattttgtttgtgaattctcggatcgatcgcgaggagctgtgccagtggagcgcggagtgcagcatccacctggagttgatcgccgacaggccgctgcaggttttccatgtggaggtgaaggtgaaagacattaacgataatccacccgtcttcaggggcagagaacaaataatatttattcctgaatctagactcctgaattcgcgttttccgatagaaggagctgctgatgcagacattggtgctaacgctcttctaacgtacacgctcagcccgagtgattatttctctttggatgtagaggcaagtgatgaactgagtaaatctctttggcttgaattgagaaaatatttggatagagaagaaacaccagaacttcacttattactgactgccactgatgggggcaaaccggagctgcaaggtacagttgagctgctgatcaccgtcctcgacgttaatgataacgccccactgtttgaccaggccgtatacagagtccacttgttagagactacagcaaatggaacattagtgaccacattaaatgcctctgatgctgacgaaggtgtaaatggtgaagtcgtcttttcctttgacagtggtatttctcgtgacattcaagaaaaattcaaagttgattccagctcaggagaaattaggttaattgataaactggattatgaagaaacaaaatcctacgaaattcaagtaaaggcagttgataaaggaagtcctccgatgtcaaatcactgtaaggttttggtgaaagtgctggatgtaaatgataatgctccagaactggcggtcacttcattgtatttgcctatcagagaggacgctccactcagcaccgtcatcgccctcatcaccgtgtctgaccgtgactcaggtgccaacgggcaggtgacttgctccttaatgccccacgtccccttcaagctggtgtccaccttcaagaattactactcgttggtgttggacagcgccctggatcgcgagagcctgtcggtctatgagctggtggtgaccgcgcgggacgggggctcgccttcgctgtgggccacggccagggtgtccgtggaggtggccgacgtgaatgacaacgcgcctgcgttcgcgcagcccgagtacacagtattcgtgaaggagaacaacccgccgggctgccacatcttcacggtgtctgcgcgggacgcggacgcgcaggagaacgcgctggtgtcctattcgctggtggaacggcgggtgggcgagcgcgcgctgtcgaactacgtgtcagtgcacgcggagagcggcaaggtgtacgcactgcagcccctggaccacgaggagctggagctgctgcagttccaggtgagcgcgcgggatgcgggcgtgccgcctctgggcagcaacgtgacgctgcaggtgttcgtgctggacgagaacgacaacgcgccggcgctgctggcgcctcgagtgggtggcactattggtgcagtcagtgagctggtgccgcgattggtgggtgcgggtcatgtggtggcgaaggtgcgcgcagtggacgccgactcgggctacaacgcgtggctgtcctatgaactgcagccggcagcaggcggcgcgcgcatcccgttccgcgtggggctgtacacgggcgagatcagcacgactcgtgtcctggacgaggctgacttgtcgcgctaccgccttctggtgctagtgaaggatcacggtgagccggcgctgacagccacggccactgtgcttgtatctctggtggagagcggccaggcgccaaaggcgtcttcgcgggcgtcggtgggtgtcgcgggcccagaggcggcgctggtggatgtcaacgtgtacctgatcatcgccatctgcgcggtgtccagcctgctggtgctcacactgctgctgtacacggcgctgcggtgctcagtgccgcccactgagggtgcgtatgtgccgggcaagcccactctggtgtgctccagcgcgttggggagctggtcgaactcacagcagaggcggcagagggtgtgctctagcgagggcccacccaagaccgacctcatggccttcagcccaggcctatctccaagtcttaacacgtcagaaagaaatgaacaaccagaagcaaatttggatctttctggtaatgtaagtccaactttcgagttttggctttaaatatttttcatatttaacttgtctaatcatcttttcaaatatcactttaaaaaatgtcttcaaggtgttcactaacgttgaaataaatcataccattgaatgtagatatcctattaatggcagttttgtcttgaatggaactagaaa

SEQ ID NO: 441761 - DNA, 2427 bp, Homo sapiens
atgctgtcttcctggcaaggaggcccaagaccgcggcaactactgctctggcttctgatcctcgcagcctgggagacgggtagtggccagctccactactccgtccccgaggaagcaaaacacggcaccttcgtgggccgcatcgctcaggacctggggctggagctggcggagctggtgccgcgcctgttccgggtggcgtccaaaagacacggggaccttctggaggtaaatctgcagaatggcattttgtttgtgaattctcggatcgaccgcgaggagctgtgtgggcggagcgcggagtgcagcatccacctggaggtgatcgtggacaggcctctgcaggttttccatgtggaggtgaaggtgagggacattaacgacaacccgcccatattccctgaaagcaagaaacgaataatcattgcagaatctagacctccggaaactcgatttccactagatggcgcatccgatgcagatattggagtaaactcggcattgacctaccgactggatcccaacgattatttcactttggacgcacaaaacagtcttgagcaaatgtcttcattatcacttgtactgaggaaaacactggacagagaggaaattcaggaacatagtttattactgacagccagtgatggaggtaaacccgagctgactggcacagttcagctgctcatcacgattctggacgtgaatgacaacgccccggaattttaccaatccgtttataaagtgacggtgttagagaacgccttcaatggaacattagtgatcaagctaaatgccacagatcctgatgatggtacaaatggagatatagtttactcatttagaaggcctgtatggcctgcagtggtatatgcatttaccataaatccgaacaatggagaaattaggacaaaaggcaaactagatttcgaagaaaagaaattatatgaaatatccgtggaggcagttgacaaaggaaatattccaatggcgggtcattgtacccttttggtggaagtactagatgtaaatgataacgccccagaggttaccatcacttctttgtcactccccatcagagaagacactcagcctagcgccattattgccctaatcagtgtgtccgatcgtgactctggctcaaatggacaggtcacctgcaccttgacgccgcatgtccccttcaagctggtgtccacctacaagaactactactcattagtgctggacagcgccctggaccgcgagagcgtatcagcctatgaactggtggtgaccgcgcgggacgggggctcgccttcgctgtgggccacggccagcgtgtcggtgggggtggccgacgtgaacgacaacgcgccggcgttcgcgcagcccgagtacacggtgttcgtgaaggaaaacaatccgccgggctgccacatcttcacggtgtctgctcaggacgcggacgcacaggagaacgcgctggtctcctactcgctggtggagcggcgggtgggcgagcgtgcgctgtcgagctacgtgtcggtgcacgcggagagcggcaaggtgtacgcgctgcagccgttggaccacgaggagctggagctgttgcagttccaggtgagcgcgcgcgactctggcgtgccgcctctgggcagcaacgtgacgctgcaggtgttcgtgctggacgagaacgacaacgctccggcgctgctgacgcccggggctggcagcgcgggaggcacagtgagcgagctgatgccgcggtcggtgggtgcaggccacgtggtggcgaaggtgcgcgcggtggacgccgattcgggctacaatgcgtggctttcgtatgaattgcagctggcggcggtcggcgcgcgcatcccgttccgcgtggggctgtacactggcgagatcagcacgacgcgccctctggacgaggtggacgcgccgcaccaccgccttctggtgctggtgaaggaccacggtgagcccgcgctgacggccacggcaacggtgctgttgtcgctggtggagagcggccaagcgccacaggcttcgtcgagggcgtcggcaggcgctgtgggtccagaagcggcgctggtggatgtcaatgtttacttgatcattgccatctgcgcggtgtccagcctgttggtgctcacgttgctgctgtatactgcgctgcggtgctcggcaccgcccaccgagggcgcgtgcgcgccgggcaagcccactctagtgtgctccagcgcggcagggagttggtcgtactcgcagcagaggcggccgagggtgtgctctggggagggcccgcataagacggacctcatggccttcagtcccagccttcctccttgtctgggttctgcagagggaacaggccagagggaggaggactcagaatgcttgaaagaggtaagcttatattttaaaaaattgtcttagtaa

SEQ ID NO: 441762 - DNA, 2475 bp, Homo sapiens
atgttgttctcctggcgagaagatcctggagcccagtgcctgctgctttctcttctgctcctcgcagcctcggaggtggggagcggccagctccactactccgtctctgaggaggccaagcatggcaccttcgtgggccgcatcgcgcaggacctggggctggagctggcggagctggtgccgcgcctgttccgggtggcgtccaaaagacacggggaccttctggaggtaaatctgcagaatggcattttgtttgtgaattctcggatagaccgcgaggaactgtgcgggcggagcgcggagtgcagcatccacctggaggtgatcgtggacaggccgctgcaggttttccatgtggaggtggaagtgaaggacattaatgacaacgcgccagtttttccaatggctgtaaagaatctgtttatttccgaatcccgacagcctggctctcggttttcgctagagggcgcatcagatgcagatatcggaacaaattcgttgttgacttacagtcttgattccactgaatattttaccttggacgttaaaagaaatgatgaggaaattaaatcccttggactcgtgttgaaaaaaaatttaaatcgagaggacactcctaagcattatttactaataacagcaattgatggtgggaaaccagagctcactggcacgactcaactaaagatcactgttttagatgtaaacgacaacgccccagcgtttgagaggacgatctataaagtcagattactcgaaaatgcaccaaatggtaccctagtggtgaccgttaacgccaccgatttggatgaaggagtaaataaggatatcgcgtattctttcaatacggacatgtcagcagatattctgtcaaaattccatttagatccagtcaatggacaaatcagtgtaaagggtaacatagatttcgaggaaagtaagtcatatgaaatccaggtagaagccacggataaaggaaatcccccaatgtcagatcactgcacagttctactcgaaattgtggacatcaatgataatgtacctgagttagttattcaatcactatctttacctgtattagaagactctccacttagcacagtcatcgctctgatcagcgtgtccgaccgcgactcaggagtcaatggacaggtcacctgctcgctgacgccccacgtccccttcaagctggtgtccaccttcaagaattactactcattggtgctggacagccctctggaccgcgagagcgtgtcggcctatgagctggtggtgactgctcgggacgggggctcgccttcactgtgggccacggccagcgtgtccgtggaggtggccgacgtgaacgacaatgcgccggcattctcgcagtccgagtacacggtgttcgtgaaggagaacaacccgccgggctgccacatcttcacggtgtctgcgcgggacgcggacgcgcaggagaacgccctggtgtcctactcgctggtggaacggcgggtgggggagcgcgcgctgtcgagctacgtgtcggtacacgcggagagcggcaaggtgtacgcgctgcagccgctggaccacgaggagctagagctgctgcagttccaggtgagtgcgcgcgatgcgggcgtgccgcctctgggcagcaacgtgacgctgcaggtgttcgtgctggacgagaacgacaacgcgccggcactgctgatgcctcgggtgggtggcatcggtggcgcagtgagcgagctggtgccgcggtcagtgggtgcgggccacgtggtagcgaaggtgcgcgcagtggatgcagactcaggctacaacgcgtggctttcgtatgagctgcagcctgggaccggcggtgcgcgcatcccgtttcgcgtggggctgtacacgggagagatcagcacgacccgtgccctggacgaggtggacgccccgcgccatcgcctactggtgctggtgaaggaccacggtgaaccctcattgaccgccacggccactgtgctggtgtcgctggtggagagtggccaggcacccaaggcctcgtcccaggcgtccgctggcgccacgggcccggaagctgcactggtggatgtcaacgtgtacttgatcgtcgccatctgcgcggtgtccagtctgttggtgctcacactgctgctatatactgctctgcggtgctccgcgccgccaaccgaaggcgactgtgggccgggcaagcccacgctggtgtgctccagcgcggtggggagctggtcatactcgcagcagaggcagcagagggtgtgctctggagaggggttgcccaagaccgacctcatggcttttagccctagccttcctccttgtccaattagccgggatagagaggagaaacaggatgtggacgttgatctctcagccaaagtgagtaatttttatttattctttccaaaatgtctttgtttttcattcctcaatgtttccactcctctggaaatacattaa

SEQ ID NO: 441763 - DNA, 2655 bp, Homo sapiens
atggagcaggcgggcaccagacctgcggcgacagagcatccacggctccggcggcccatgccctggctgctgctactgcctctcctgctgctgttgctgctgctgctacctggccctgcggcctcccagctgcgatactctgtgccagaggagcaggcacccggcgcgctcgtgggcaacgtggctcgcgcgctggggcttgagctgcggcgcttggggccgggttgcttgcgcatcaaccatctgggtgcgcccagtccgcgctacctggagctggacctgacgagtggagcgctcttcgtcaacgagcgcattgatcgggaggcgctgtgtgagcagcggcctcgctgcctgctcagcttggaagtgctggcgcacaaccccgtggcggtgagcgccgttgaggtggaaatattggacatcaacgacaactcaccgcgtttcccgcggcccaactaccagcttcaggtaagcgaatcggtggcgcctggagcgcgctttcacatagagagtgcgcaggaccccgacgtgggcgccaactcagtacagacctacgagctcagccccagcgagcacttcgagctggaccttaagcccctgcaggagaacagtaaagtgcttgagctggtgctgcgtaagggcctagaccgggagcaggcagccttgcaccacctggttctcacagccgtggatgggggcatcccagcccgctcgggtacggcacagatctctgtgcgtgtcctggacactaacgacaactctcctgcctttgaccagtccacttatcgcgtccagctacgggaggactcacccccaggcacattggtggtgaagctgaatgcctcagacccggatgagggctccaatggtgagctcaggtactccttgagcagctacacgtcggaccgggagaggcagctcttcagcatagatgccagtaccggggaagtgcgagtaattggggggctggattatgaggaagcctcctcctaccagatctatgtgcaggcgactgaccggggtccagtgcccatggcaggtcactgcaaggtgctggtggacatcgtggacgtgaatgacaatgccccagaggtggtgctcacggacctgtatagcccagtgcctgagaatgctacacccaacaccattgtggccgttctcagtgtcaatgaccaagactcaggccccaaccggaaagtgagcctgggtctggaggccacactgcctttccgactgaatggctttggaaactcctatacactggtggtgagcggcccactggaccgagagcgggtggctgtctacaacatcacggtgacagccacagatgggggaataccgcagctcacatccctgcgtacactgaaggttgagatctctgacatcaatgacaatccaccaagcttcctggaggactcctattccatctacatacaggagaacaatttgccaggtgtgttgctctgtactgtgcaagccacagacccagatgaaaaggagaatgcagaggtgacctactcccttctggagagggagattcaagggctgccagtcacctcctatgtctccattaacagtgccagtggcagcctttatgctgtcaactcctttgactatgagaagtttcgggagttctttgtgactgtggaggctcaggacaaggggagcccaccactgagcagcactgtgactgccaacgtatatgtggtggacatgaatgaccatgcccctcacattctgtaccctacctcaaccaactcgtcagcagccttcgagatggtgcctcgaactgcccctgctggctacctggtcaccaaagtcatagctatggactcagactctgggcaaaatgcttggcttttttaccatctagcccagacttctgacctggacctctttaaggtagagctgcacacaggagaaattaggactaccaggaagatgggagatgagagtggtagcactttcaacctgaccgtggtggtccgagataatggagagccatcactatcagcctctgtggccattacagtagctgtggtggatagggtttccaaaatcctccctgacactcagaggcatgttaagagccctcggacatactctgaaattaccctttatctaataatagcattaagcacagtgtcttttatatttcttttgacaatcatcattttgagcatcatcaagtgctaccgctacactgcgtatggcactgcatgctgtggaggcttctgtggagtaagggaaaggtcccctgcagaactgtacaaacaagccaacaacaatattgatgccaggataccgcatggcctcaaagtgcagcctcacttcattgaagttcgagggaatggctccctcaccaagacctactgctacaaggcctgtctgacagcaggctcagggagtgacactttcatgttttacaatacaggggcccagacaggaccagggccttcgggagcccaagcagcagtgactgacagcaggaatctcacaggccaaagtggtcagaatgctgggaacctgattattctcaaaaatgaggctgtttctcaaaatgaggtgagacagtggtcagggggtcttctacaaactcatgcatttgttacacatcccccaatatcctgtgatttggctttattgagtcattaa

SEQ ID NO: 441764 - DNA, 3269 bp, Homo sapiens
ccagagtaaaaaagggtaaaaaggtaatatattttagggcttaaaatagttatttttttccaagatgaaagctatgagtaaacttaaaccagaaaatcgactagttttaaatctacagaataaacagtagagccttccttttagccacatgatgtcgctgtccaccatagagtgttctctaggaaggaaaatacccagagcccctttgttacttcagagaagcggaggaataagagaagcagcaggactttaacagagactagaatatttaaatttttgcaaaacatgctcttctaatttgatcaaaacattgaggattggtaatggcgtcttctatcagaaggggccgaggggcctggacacggctgctctcgcttctgctcctcgcagcctgggaggtggggagcggccagctccgctactccgtccccgaggaggccaaacacggcaccttcgtgggccgcatcgcgcaggacctggggctggagctggaggagctggtgccgcgcctgttccgggtggcgtccaaaagacacggggaccttctggaggtaaatctgcagaatggcattttgtttgtgaattctcggatcgaccgggaggagctgtgcgggcggagcgcggaatgtagcatccacgtggaggtgatcgtggacaggccgctgcaggttttccatgtggaagtggaggtgaaggacattaacgacaacccgccaatatttccaatgacagtaaagactatccggtttcccgaatcaaggctgcttgattctcggtttcctctagagggagcatctgatgcagatataggagtaaatgctcttctctcctacaagctcagctccagtgagtttttcttcctagatatacaggcaaatgatgaactaagcgaatctttgtctctcgtgctggggaaatcgctggacagagaggaaactgctgaggttaatttgttactggtggctactgatgggggcaaacctgagctcacgggcaccgttcaaatacttattaaggtattagatgtaaatgacaatgaaccaacttttgcccaatcagtttacaaagtaaaattgttagagaatacggcaaatgggaccttagtggttaagttaaacgcttctgatgcagatgaaggaccgaacagcgagattgtgtattcactcggtagtgatgtgtcctccactatacagactaagtttaccatagatcccatctcaggggaaatcagaactaagggaaaattagattatgaagaagcaaagtcctacgagattcaggtcactgcaactgacaaaggaaccccttcaatgtcaggacattgtaaaatttcattaaaacttgtggacatcaatgataacacaccagaagtctcaataacgtctctctcacttcccatctcagagaacgcttccctgggcactgtcattgctctcatcacggtgtcggatcgcgactctggtacgaatggacatgtcacctgctccctgacgccccacgtccctttcaagctggtgtccaccttcaagaattactactcgttggtgctggacagcgccctggaccgcgagagcgtgtcagcctatgagctggtggtgaccgcacgggacgggggctcgccttcactgtgggccaccaccagcgtgtccatcgaggtggccgacgtgaacgacaacgcgccggcgttcgcacagcctgagtacacagtattcgtgaaggagaacaacccgccgggctgccacatcttcacggtgtcagcgtgggatgcggacgcgcaggagaacgcgctggtgtcctactcgctggtggagcggcgggtgggcgagcgcgcgttgtcgagctacgtttcggtgcacgcggagagcggcaaggtgtacgcgctgcagccgctggaccacgaggaagtggagctgctgcagttccaggtgagcgcgcgggatgcgggcgtgccgcctctgggcagcaacgtgacgctgcaggtgttcgtgctggacgagaacgacaacgcgccggcactgttggcgcctagggctggcaccgctgctggcgcagtgagtgagctggtgccgtggtcggtgggtgcagggcacgtggtggcgaaggtgcgcgcagtggacgctgactcaggctacaacgcgtggctttcgtacgagcttcagctgggtactggcagcgctcgcatcccgttccgcgtggggctatacacgggtgagatcagcacgacacgtgccctagacgaggctgactcccctcgacaccgcctactcgtgctggtgaaggaccacggcgaaccagcgttgacagccacggccaccgtgttagtgtcgttggtggaaagtggccaggcacccaaggcctcgtcgcgggcgtgggtgggcgccgcgggctcagaggctacgctggtggatgtcaacgtgtacctgatcatcgccatctgcgcggtatccagcctgttggtgctcacggtgctgctgtacactgcgctgcggtgctcggtgccacccaccgagggtgcgcgcgcgccaggaaagcccacgctggtgtgctccagcgccgtggggagctggtcttactcgcagcagaggcggcagagggtgtgctctggggaggacccccccaagacggacctcatggccttcagccctagcttatctcaaggtccagactccgcagaagagaaacagctctcagaatcagaatacgtaggaaagatatggaacttcaatcttcaaatccagcttgcctcttgaaactattgtctaacaagactcttggcaaagacattttgaagactttggaattttcacttcacagatgtactgatgctatgccaaataaatattgaatagctaccaaataaacattgttttctattctgctgcattccccatctgtacattaaaatacctggtaaatgaaaatattacaaatgaaatgggtgaaaatggaattcttcctccttttttccaatgtgcttgatgtcaatgatcattttgtaaaaatatagtttgggtccccacatagtgaaagtactctggtttctgtttgattcagaaatttggtgggttttttgttgttgttttggtttttgtgtgtgtgtgtttgtgtgagtgtagttcttcaatagagagggagcgtaaagctattttcactagattgattttttgtttagacaaacaggatgaaaataactttatggatataggaggcaaggaaagtttttaaatggctaccattatgtctttatatattaaatttctttatgtaag

SEQ ID NO: 441765 - DNA, 5369 bp, Homo sapiens
atgactgtgatgctggaaaaaatttactaaatatgtacttacagaaaagggtgactgctcataaaatacctcaggcaagcgatcccttaaaactgattgtcccaactcagaggccctcattttctgcaatggtgattatcggaccaagaggcccgggatcccagcgtctgctgctctcgcttctgctccttgcagcctgggaggtggggagcggccagctccactactccgtctacgaggaggccaaacacggcaccttcgtgggccgcatcgctcaggacctggggctggagctggcggagctggtgccgcgcctgttccgggtggcgtccaaaagacacggggaccttctggaggtaaatctgcagaatggcattttgtttgtgaattctcggatcgaccgcgagaagctgtgcgggcggagcgcggagtgcagtatccacctggaggtgatcgtggacaggccgctgcaggttttccatgtggacgtggaggtgaaggacattaacgacaacccgccggtgttcagagaaagggaacaaaaggtacctgtttctgaatctgcgcctctggactctcattttcctctagagggcgcttctgatgcggatatcggcgtaaactctcttttgacctatgcgttaagtctaaatgagaattttgagcttaaaataaaaacaaaaaaagataaaagtatattgcctgaattagttcttcggaagttattggacagagagcaaacgccaaaactcaatttattgctgatggtaatcgatggcggtaaaccagaactaacagggtctgtccagattcaaataaccgtcctggatgtgaatgacaatggtccggcgtttgataagcccagctataaagtagtgttgtctgaaaatgtccaaaacgacacaagagtgatccaactaaatgcttccgatccagacgaaggacttaatggagaaatttcctatgggatcaaaatgattttgccagtgagtgagaaatgtatgttttcaataaatccagacacaggtgaaattagaatttatggtgaactggattttgaagagaataatgcctatgaaattcaggttaacgccattgataaagggattccttccatggcaggtcacagcatggtcctggtggaagttctggacgtgaatgacaatgtccctgaagtaatggttacttcactgtcgctccctgtgcaagaggatgctcaggtgggtaccgtcattgccctgattagcgtgtcggatcgtgactctggagccaatggacaggtcatctgctcactgacacctcatgttcccttcaagctggtgtccacctacaagaattactactcgttggtgctggacagcgccctggaccgcgagagcgtgtcggcctatgagctggtggtgactgcgcgggatgggggctcgccttcgctgtgggccacggctagagtgtccgtggaggtggccgacgtgaacgacaatgcgcctgcgttcgcgcagcccgagtacacagtgttcgtgaaggagaacaacccgccgggctgccacatcttcacggtgtcggcatgggacgcggacgcgcagaagaacgcgctggtgtcctactcgctggtggagcggcgggtgggcgagcacgcactgtcgagctacgtgtcggtgcacgcggagagcggcaaggtgtacgcgctgcagccgctagaccacgaggagctggagctgctgcagttccaggtgagcgcgcgcgacgccggcgtgccgcctctgggcagcaacgtgacgctgcaggtgttcgtgctggacgagaacgacaacgcgccggcactgctggcgactccggctggcagcgcaggaggcgcagttagcgagttggtaccgcggtcggtgggtgcgggccacgtggtggcgaaagtgcgcgcggtggacgctgactccggctataacgcttggctgtcctacgagttgcaaccggcggcggtcggcgcgcacatcccgttccacgtggggctgtacactggcgagatcagcacgacacgcatcctggatgaggcggacgctccgcgccaccgcctgctggtgctggtgaaggaccacggtgagcccgcgctgacgtccacggccacggtgctggtgtcgctggtggagaacggccaggccccaaagacgtcgtcgcgggcctcagtgggcgctgtggatcccgaagcggctctggtggatattaacgtgtacctcatcatcgccatctgtgcggtgtccagcctgctggtgctcacgctgctgctgtacactgcgctgcgttgctcagcgccgcccaccgtgagccggtgcgcgccgggcaagcccacgctggtgtgctccagcgccgtggggagttggtcttactcgcagcagaggaggcagagggtgtgctctgcagagagcccgcccaagacggacctcatggccttcagcccaagccttcagctgtctcgagaagattgtttaaatcctcccagtgaaccacgacagcccaaccctgactggcgttactctgcctccctgagagcaggcatgcacagctctgtgcacctagaggaggctggcattctacgggctggtccaggagggcctgatcagcagtggccaacagtatccagtgcaacaccagaaccagaggcaggagaagtgtcccctccagtcggtgcgggtgtcaacagcaacagctggacctttaaatacggaccaggcaaccccaaacaatccggtcccggtgagttgcccgacaaattcattatcccaggatctcctgcaatcatctccatccggcaggagcctactaacagccaaattgacaaaagtgacttcataaccttcggcaaaaaggaggagaccaagaaaaagaagaaaaagaagaagggtaacaagacccaggagaaaaaagagaaagggaacagcacgactgacaacagtgaccagtgaggtcctcaaatggaaacaagccacttagccagtttttgtaataatggcaaatctctcccatgtagcaattccctgctcctttttcctatctacatgagccctcttagagacctcagaaatctgcagaaagttccctgtgtctgtctagaacgcatttaacaggttttgtcgtaaaagctttactaagtctggtgttaactctttctctccactctggcttgttttcagaacctaaaaagcagacccaagtttcctttctcctccgccgcaaaggagaggcttcccagccccgccagtgagaggttggactctctgccctgtgctccggggatcctgtcttgatgacacttgcagggcaggctgaaaagttttgagattgagcagcttgggagtttgtggccactgggtatgtgtggctaccgcgggtatgcgagtgccagatattggctgagacgagccagcttagactaattggtacaaggaaggcaagaaaacaaagacaaataaacagcggaagttatcagtatggaggggaagtgtaaacttaaagggaccagactttctaaatcttacaactcaagaggtggcagccaccctctaggagacaaaactacccccactgacaaggctttaggagaccctaaagtctgttggctgtgacgtcattatacctaaaatctgcatcatacctgcaagccaacagttcagtgttttaacagagaaccaccctgggaaacagaagcagatctgatgtgtttcctatacatgtcctgtgctcactttattaaaaattcttttgcacacaatgtttatgaaaaggccagatccttttccaatacttatgcaaaagcaaaagaaaaccccgacacctcacctttcgctgtttgttgtttcatagatttatttaaaaaaagagaaagtctatagctataaatctttaaagagaaatatgaatacaattcccctaaactctcctcaaaagagaattcagtctacagccatttaaatgatcattgctgctacagaagtgctttaagagaattgcctgaaacatctgtattatatcggccacctgccaatcacagctttactctttcaggtcactctggggctgcctcttgcatgtattactaaataaaatgatctctctttctctctctctctctcttttctaagaaacaattatgtgcactttgatacacaaccttctctaaccaactatatatcaagacccaaaaattgaagaaaaatattgttttctcatacagtgagcagatttttcaatctactaattctgtgacttgtcttggtgtgctagcctacaccttctctttggtttagttttccttttctataacactctgaattgctaatcttactaacacctatgatgttacctgaaatcaatctcccatatgtatgctgtatgctatgctaagactcctgaaatatacttactctgtgcttgtgtatgtgaatgttaatgcaactattacctagagtgaactttaagctttattgttgaatgtaattccattatatttccttttgtacacctgtgaaaaagtggagtagtgtttttttaaccattgttaatcagcttttgtgtatgaaagacacagtaaaatttctttcttaaatcaagatactggtgattcaaggaattttatttatggtccagccaagagccatctcgtgccaagacttctgctggcaagggaatggataaagctgttttgttctagtaacaattttggaatgaatactgacaatattccatgagggtgtgcaagcacaaattttaccaatctgacctctttgaagttgcagaatgctttgaaattctaatggtatctgaaatatcagctcatagaaagtaacaaaatttgctgtcaccttaaataagacattttaattttgttataatgtacaatttagaagtttgattaattatattatctatttaggcattaatataaaagaggtaggagtctgttatttaaaaaaagcattaaatttaaaaaaaaactgtcttgtctacttttagcttcattctcccatattttgaagggtgtgtaacttcagctctgcaggattgcatggggtaaaacttgttaccaacacatgtgaaccattgctacattgtaggttgtgatcattttgccccactgaagcccatgtatctgaccttacgtgccttttgaactaggagaatcgggctaatttattaatgatgataattataatgtatctgtacagcactttttacatttgcgaagtgctttccaatccatgttagttactagttattacagctgtaaggataaaacacgtcatgtggattcattttgaattggtgctattggtatttcctctgttattgctaataaatgaaaatggtggtatgaaaaaaaa

SEQ ID NO: 441766 - DNA, 6123 bp, Homo sapiens
ttttcctttgtggattcttttttaaaactaccaagtttgagaatatgaatatatttgtttttcatattgttctgcaatgaatataaagtcacttataatcagaaagcaattaaatgtaaataacagtaaagaatgagaactatagaaaatagatatgaaaatgcaagcccacagagatgagaatagatcatgtggaacataaacactaaagagctgcttttataaaacttcaattttttctttgagttccctagcagccaaagtaacaagggagactgaaagtaaaacaattcaaatttgatagtatttttatatgaggaacaacactttcaggaaatgtttaaccctagtttttcatgaggccaccttaacaactgaattctctttctctctcactctgtgtataagtattttagataagtaaaagaacaatgttataatgttaagtcaaacatagacacaataatttaaatttgatgttaatcgagaaatacaatgccatttccatatatatttagtttcaatatgacttataatctgaatattccataaataagcacgttggaaatatttgggggaagaaacccaaaacacgtgaaattctgtggtggtaaatgcagtgcacagtactcacagttttaggcgcaaggtgtcgctctttacttggtggaaagttcatttaaaggttggtctgaacagtgaggcactcccatacaaaggaactccatcataccggatgccaccgtttaaggatcctttgaaacttcttaagaattcaacgagatttttaacctgaaactgaagaatctggtactgtaagtgtaaagaagcttattttggaagccaatttcgtatgcgatgtttggttttcagagaaggggattgggcaccccacgactacagctctggcttctcctcctcgaattctgggaggtggggagcggccagctccactactccgtctcggaggaggccaaacacggcaccttcgtgggccgcatcgcgcaggacctggggctggagctggcggagctggtgcagcgcctgttccgggtggcgtccaaaacacatggggaccttctggaggtaaatctgcagaatggcattttgtttgtgaattctcggatcgaccgcgaggagctgtgcgggcagagcgcggagtgcagcatccacctggaggtgatcgtggacaggccgctgcaggttttccatgtgaacgtggaggtgaaggacattaacgacaacccgccggtgttctcgctcagagaacaaaagctgctgattgcggaatctaagcaatcggactcgcgttttccactagagggagcttctgatgctgacattgaagagaatgctctattgacctacaggctaagtaaaaatgagtatttttctttagattcaccaacaaatggtaagcagattaaaagactgtcacttattttaaagaagtctctggatagagagaaaactccggaacttaatttgctgctaacagctacagacgggggaaaaccagagcttactggcaccgttcggctgttagtccaagtcttggatgtcaacgacaatgatccagagtttgataaatcagaatataaggtgagccttatggaaaatgctgctaaagaaactcttgtgctcaaactaaacgccacagaccgagacgaaggagtcaatggagaggtaacatactccttaatgtcaattaagcccaatggaagacacttatttacactagatcaaaataatggagaagtgagggtcaatggaactttagattatgaagaaaacaagttttataaaattgaagtacaggctacagataaggggactcccccaatggcaggtcactgtacagtctgggtggaaatcttggacaccaacgataactctcctgaagtcgccgtgacttccttgtccctcccagtacgagaggacgctcagcccagcacggtcattgccctgatcagcgtgtctgaccgtgactcaggtgtcaacggacaggtgacctgctcgctgacgccccacgttcccttcaagctggtgtccaccttcaagaattactactcgttggtgctggacagcgccctggaccgcgagaacgtgtgggcctatgaactggtggtgactgcgcgggatgggggttcgccttctctgtgggccacggccagggtatccgtggaggtggccgacgtgaacgacaatgcgcctgcgttcgcacagcccgagtacaccgtgttcgtgaaggagaacaacccaccaggctgccacatcttcacagtgtcggcgcgggacgcggacgcgcaggagaacgcgctggtgtcctactcgctggtggagcggcggttgggcgaccgcgcgctgtcgagctacgtgtcggtgcacgcggagagcggcaaggtgtacgcgctgcagccgttggaccacgaggagctggagctgctacagttccaggtgagcgcgcgcgatgcgggcgtgccgcctctgagcagcaacgtgacgctgcaggtgttcgtgctggacgagaacgacaacgcgccggcactgctggcgactcaggctggcagcgcgggaggcgcagttaacaagctagtaccgcggtcggtgggtgcgggccacgtggtggcgaaggtgcgcgcagtggatgcggactcaggctacaacgcgtggctttcatatgaattgcagccggcggcgggcggctcgcgcatcccgttccgcgtggggctgtacacgggcgagataagcacaacgcgtgccctggacgaggcagactcgccgcgccaccgacttctagtactggtgaaggatcacggtgagccggcgctgacggccacggccaccgtgctggtgtcgttggtggagagcggacaggcgccaaaggcctcttcccggactttggcgggcgccgcgagcccagaggctgcgctggtggatgtcaacgtgtacctgatcatcgccatctgcgtggtgtccagcctcctggtactcacgctgctgctgtatacggcgctgtggtggtcggcaacgcccactgagggcgcgtgcgcgccggggaagcccacgctggtgtgctcccgcgcggtggggagctggtcatactcgcagcagaggcggcagagggtgtgctctgaggagggcccacctaagacggacctcatggccttcagccccagtcttcctctaggtctgaataaagaggaggaaggggaaagacaggagccagggtcaaatcaccccggacagccacgacagcccaaccctgactggcgttactctgcctccctgagagcaggcatgcacagctctgtgcacctagaggaggctggcattctacgggctggtccaggagggcctgatcagcagtggccaacagtatccagtgcaacaccagaaccagaggcaggagaagtgtcccctccagtcggtgcgggtgtcaacagcaacagctggacctttaaatacggaccaggcaaccccaaacaatccggtcccggtgagttgcccgacaaattcattatcccaggatctcctgcaatcatctccatccggcaggagcctactaacagccaaattgacaaaagtgacttcataaccttcggcaaaaaggaggagaccaagaaaaagaagaaaaagaagaagggtaacaagacccaggagaaaaaagagaaagggaacagcacgactgacaacagtgaccagtgaggtcctcaaatggaaacaagccacttagccagtttttgtaataatggcaaatctctcccatgtagcaattccctgctcctttttcctatctacatgagccctcttagagacctcagaaatctgcagaaagttccctgtgtctgtctagaacgcatttaacaggttttgtcgtaaaagctttactaagtctggtgttaactctttctctccactctggcttgttttcagaacctaaaaagcagacccaagtttcctttctcctccgccgcaaaggagaggcttcccagccccgccagtgagaggttggactctctgccctgtgctccggggatcctgtcttgatgacacttgcagggcaggctgaaaagttttgagattgagcagcttgggagtttgtggccactgggtatgtgtggctaccgcgggtatgcgagtgccagatattggctgagacgagccagcttagactaattggtacaaggaaggcaagaaaacaaagacaaataaacagcggaagttatcagtatggaggggaagtgtaaacttaaagggaccagactttctaaatcttacaactcaagaggtggcagccaccctctaggagacaaaactacccccactgacaaggctttaggagaccctaaagtctgttggctgtgacgtcattatacctaaaatctgcatcatacctgcaagccaacagttcagtgttttaacagagaaccaccctgggaaacagaagcagatctgatgtgtttcctatacatgtcctgtgctcactttattaaaaattcttttgcacacaatgtttatgaaaaggccagatccttttccaatacttatgcaaaagcaaaagaaaaccccgacacctcacctttcgctgtttgttgtttcatagatttatttaaaaaaagagaaagtctatagctataaatctttaaagagaaatatgaatacaattcccctaaactctcctcaaaagagaattcagtctacagccatttaaatgatcattgctgctacagaagtgctttaagagaattgcctgaaacatctgtattatatcggccacctgccaatcacagctttactctttcaggtcactctggggctgcctcttgcatgtattactaaataaaatgatctctctttctctctctctctctcttttctaagaaacaattatgtgcactttgatacacaaccttctctaaccaactatatatcaagacccaaaaattgaagaaaaatattgttttctcatacagtgagcagatttttcaatctactaattctgtgacttgtcttggtgtgctagcctacaccttctctttggtttagttttccttttctataacactctgaattgctaatcttactaacacctatgatgttacctgaaatcaatctcccatatgtatgctgtatgctatgctaagactcctgaaatatacttactctgtgcttgtgtatgtgaatgttaatgcaactattacctagagtgaactttaagctttattgttgaatgtaattccattatatttccttttgtacacctgtgaaaaagtggagtagtgtttttttaaccattgttaatcagcttttgtgtatgaaagacacagtaaaatttctttcttaaatcaagatactggtgattcaaggaattttatttatggtccagccaagagccatctcgtgccaagacttctgctggcaagggaatggataaagctgttttgttctagtaacaattttggaatgaatactgacaatattccatgagggtgtgcaagcacaaattttaccaatctgacctctttgaagttgcagaatgctttgaaattctaatggtatctgaaatatcagctcatagaaagtaacaaaatttgctgtcaccttaaataagacattttaattttgttataatgtacaatttagaagtttgattaattatattatctatttaggcattaatataaaagaggtaggagtctgttatttaaaaaaagcattaaatttaaaaaaaaactgtcttgtctacttttagcttcattctcccatattttgaagggtgtgtaacttcagctctgcaggattgcatggggtaaaacttgttaccaacacatgtgaaccattgctacattgtaggttgtgatcattttgccccactgaagcccatgtatctgaccttacgtgccttttgaactaggagaatcgggctaatttattaatgatgataattataatgtatctgtacagcactttttacatttgcgaagtgctttccaatccatgttagttactagttattacagctgtaaggataaaacacgtcatgtggattcattttgaattggtgctattggtatttcctctgttattgctaataaatgaaaatggtggtatgaaaaaaaa

SEQ ID NO: 441767 - DNA, 5262 bp, Homo sapiens
atggtttccagatgtagctgcctgggggtccagtgtctgctgctctcgcttcttctcctcgcagcctgggaggtggggagcggccagctccactactcagtctacgaggaggccagacacggcaccttcgtgggccgcatcgcgcaggacctggggctggagctggcggagctggtgcagcgcctgttccgggtggcgtccaaaagacacggggaccttctggaggtaaatctgcagaatggcattttgtttgtgaattctcggattgaccgcgaggagctgtgcgggcggagcgtggagtgcagcatccacctggaggtgatcgtggacaggccgctgcaggttttccatgtggacgtggaagtgaaggacattaacgacaacccgcccaggttctccgtaacagaacaaaagctctcaatacctgaatccagactgcttgactctcgatttccactagaaggcgcatctgatgcggatgttggagagaacgcattgcttacttacaaactcagtccaaatgagtattttgttcttgatattataaacaaaaaagacaaagacaaattcccagtgcttgttctgcggaagctgctggatcgtgaagaaaatcctcagctaaagttgttgttgacagcaactgatggaggcaaacctgaatttaccggatctgtttctctgctgatcctggtgttagatgccaatgataacgcccctatctttgacagaccggtttatgaagttaagatgtatgaaaatcaagtgaaccaaacattagtaatacggctcaacgcttctgattcggatgaaggaataaacaaggaaatgatgtattcatttagctctttggtcccacccacgataagaaggaaattttggataaacgaaaggacgggagaaataaaagtaaatgatgctattgactttgaggacagtaacacttatgaaattcatgtagatgttacagataagggaaacccacctatggttggtcactgcacggtcctagtggaactactggatgaaaatgataattcacctgaggtgattgtcacttctctgtctctcccagtgaaagaagatgctcaagtgggcaccgtcattgccctaatcagcgtttctgaccatgattcaggagccaacggacaggtcacctgctctctgacgcctcacgttccgttcaagctggtgtccacctacaagaattactactcattggtgctggacagcgctctggaccgcgagagggtgtcggcctatgagctggtggtgaccgcgcgggacgggggctcgcctccgctgtgggccacggccagcgtgtctgtggaggtggccgacgtgaacgacaacgcgcctgcgttcgcgcagtccgagtacacggtgttcgtgaaggagaacaacccgccaggctgccacatcttcacggtgtctgcgtgggacgcggacgcgcaggagaacgccctggtgtcctactctctggtggagcggcggttgggcgagcgctcgctgtcgagctacgtgtcggtgcacgcggagagcggcaaggtgtacgcgctgcagccgctggaccacgaggagctggagctgctacagttccaggtgagcgcgcgcgatgggggcgtgccgcctctgggcagcaacttgacgctgcaggtgttcgtgctggacgagaacgacaacgctcccgcgctgctggcgtctcccgctggcagcgcgggcggtgcagtcagtgagctggtgctgcggtcggtggttgcgggtcacgtggtggctaaggtgcgcgcagtggacgctgactctggatacaacgcgtggctgtcgtatgaattgcagtcggcggcggttggtgcacgcatcccgtttcgcgtggggctgtacacgggcgagatcagtacgacgcgcgctctggatgagactgactcgccacgccagcgcctactggtgctggtgaaggaccatggcgagccgtcgctgacggccacggccactgtgcttgtgtcgcttgtggagggcagccaggcacccaaggcctcgtcgcgggcttcagtgggcgtggcgcccgaggtggccctggtggatgtcaacgtgtacctgatcatcgccatctgcgcggtgtccagcttgctggtgctcacgctgctgctgtacactgcactgaggtgctcggcggcgcccaccgagggcgcatgtgggccggtgaagcccacgctggtgtgctctagcgcggtggggagctggtcttactcgcagcagaggcggcagagggtgtgttctggggagggcctgcccaaggcggacctcatggccttcagccccagccttccaccatgcccaatggtagatgtggacggggaagatcagtctattggaggggaccactctaggaagccacgacagcccaaccctgactggcgttactctgcctccctgagagcaggcatgcacagctctgtgcacctagaggaggctggcattctacgggctggtccaggagggcctgatcagcagtggccaacagtatccagtgcaacaccagaaccagaggcaggagaagtgtcccctccagtcggtgcgggtgtcaacagcaacagctggacctttaaatacggaccaggcaaccccaaacaatccggtcccggtgagttgcccgacaaattcattatcccaggatctcctgcaatcatctccatccggcaggagcctactaacagccaaattgacaaaagtgacttcataaccttcggcaaaaaggaggagaccaagaaaaagaagaaaaagaagaagggtaacaagacccaggagaaaaaagagaaagggaacagcacgactgacaacagtgaccagtgaggtcctcaaatggaaacaagccacttagccagtttttgtaataatggcaaatctctcccatgtagcaattccctgctcctttttcctatctacatgagccctcttagagacctcagaaatctgcagaaagttccctgtgtctgtctagaacgcatttaacaggttttgtcgtaaaagctttactaagtctggtgttaactctttctctccactctggcttgttttcagaacctaaaaagcagacccaagtttcctttctcctccgccgcaaaggagaggcttcccagccccgccagtgagaggttggactctctgccctgtgctccggggatcctgtcttgatgacacttgcagggcaggctgaaaagttttgagattgagcagcttgggagtttgtggccactgggtatgtgtggctaccgcgggtatgcgagtgccagatattggctgagacgagccagcttagactaattggtacaaggaaggcaagaaaacaaagacaaataaacagcggaagttatcagtatggaggggaagtgtaaacttaaagggaccagactttctaaatcttacaactcaagaggtggcagccaccctctaggagacaaaactacccccactgacaaggctttaggagaccctaaagtctgttggctgtgacgtcattatacctaaaatctgcatcatacctgcaagccaacagttcagtgttttaacagagaaccaccctgggaaacagaagcagatctgatgtgtttcctatacatgtcctgtgctcactttattaaaaattcttttgcacacaatgtttatgaaaaggccagatccttttccaatacttatgcaaaagcaaaagaaaaccccgacacctcacctttcgctgtttgttgtttcatagatttatttaaaaaaagagaaagtctatagctataaatctttaaagagaaatatgaatacaattcccctaaactctcctcaaaagagaattcagtctacagccatttaaatgatcattgctgctacagaagtgctttaagagaattgcctgaaacatctgtattatatcggccacctgccaatcacagctttactctttcaggtcactctggggctgcctcttgcatgtattactaaataaaatgatctctctttctctctctctctctcttttctaagaaacaattatgtgcactttgatacacaaccttctctaaccaactatatatcaagacccaaaaattgaagaaaaatattgttttctcatacagtgagcagatttttcaatctactaattctgtgacttgtcttggtgtgctagcctacaccttctctttggtttagttttccttttctataacactctgaattgctaatcttactaacacctatgatgttacctgaaatcaatctcccatatgtatgctgtatgctatgctaagactcctgaaatatacttactctgtgcttgtgtatgtgaatgttaatgcaactattacctagagtgaactttaagctttattgttgaatgtaattccattatatttccttttgtacacctgtgaaaaagtggagtagtgtttttttaaccattgttaatcagcttttgtgtatgaaagacacagtaaaatttctttcttaaatcaagatactggtgattcaaggaattttatttatggtccagccaagagccatctcgtgccaagacttctgctggcaagggaatggataaagctgttttgttctagtaacaattttggaatgaatactgacaatattccatgagggtgtgcaagcacaaattttaccaatctgacctctttgaagttgcagaatgctttgaaattctaatggtatctgaaatatcagctcatagaaagtaacaaaatttgctgtcaccttaaataagacattttaattttgttataatgtacaatttagaagtttgattaattatattatctatttaggcattaatataaaagaggtaggagtctgttatttaaaaaaagcattaaatttaaaaaaaaactgtcttgtctacttttagcttcattctcccatattttgaagggtgtgtaacttcagctctgcaggattgcatggggtaaaacttgttaccaacacatgtgaaccattgctacattgtaggttgtgatcattttgccccactgaagcccatgtatctgaccttacgtgccttttgaactaggagaatcgggctaatttattaatgatgataattataatgtatctgtacagcactttttacatttgcgaagtgctttccaatccatgttagttactagttattacagctgtaaggataaaacacgtcatgtggattcattttgaattggtgctattggtatttcctctgttattgctaataaatgaaaatggtggtatgaaaaaaaa

SEQ ID NO: 441768 - DNA, 5268 bp, Homo sapiens
atgctgtcttcctggcaaggaggcccaagaccgcggcaactactgctctggcttctgatcctcgcagcctgggagacgggtagtggccagctccactactccgtccccgaggaagcaaaacacggcaccttcgtgggccgcatcgctcaggacctggggctggagctggcggagctggtgccgcgcctgttccgggtggcgtccaaaagacacggggaccttctggaggtaaatctgcagaatggcattttgtttgtgaattctcggatcgaccgcgaggagctgtgtgggcggagcgcggagtgcagcatccacctggaggtgatcgtggacaggcctctgcaggttttccatgtggaggtgaaggtgagggacattaacgacaacccgcccatattccctgaaagcaagaaacgaataatcattgcagaatctagacctccggaaactcgatttccactagatggcgcatccgatgcagatattggagtaaactcggcattgacctaccgactggatcccaacgattatttcactttggacgcacaaaacagtcttgagcaaatgtcttcattatcacttgtactgaggaaaacactggacagagaggaaattcaggaacatagtttattactgacagccagtgatggaggtaaacccgagctgactggcacagttcagctgctcatcacgattctggacgtgaatgacaacgccccggaattttaccaatccgtttataaagtgacggtgttagagaacgccttcaatggaacattagtgatcaagctaaatgccacagatcctgatgatggtacaaatggagatatagtttactcatttagaaggcctgtatggcctgcagtggtatatgcatttaccataaatccgaacaatggagaaattaggacaaaaggcaaactagatttcgaagaaaagaaattatatgaaatatccgtggaggcagttgacaaaggaaatattccaatggcgggtcattgtacccttttggtggaagtactagatgtaaatgataacgccccagaggttaccatcacttctttgtcactccccatcagagaagacactcagcctagcgccattattgccctaatcagtgtgtccgatcgtgactctggctcaaatggacaggtcacctgcaccttgacgccgcatgtccccttcaagctggtgtccacctacaagaactactactcattagtgctggacagcgccctggaccgcgagagcgtatcagcctatgaactggtggtgaccgcgcgggacgggggctcgccttcgctgtgggccacggccagcgtgtcggtgggggtggccgacgtgaacgacaacgcgccggcgttcgcgcagcccgagtacacggtgttcgtgaaggaaaacaatccgccgggctgccacatcttcacggtgtctgctcaggacgcggacgcacaggagaacgcgctggtctcctactcgctggtggagcggcgggtgggcgagcgtgcgctgtcgagctacgtgtcggtgcacgcggagagcggcaaggtgtacgcgctgcagccgttggaccacgaggagctggagctgttgcagttccaggtgagcgcgcgcgactctggcgtgccgcctctgggcagcaacgtgacgctgcaggtgttcgtgctggacgagaacgacaacgctccggcgctgctgacgcccggggctggcagcgcgggaggcacagtgagcgagctgatgccgcggtcggtgggtgcaggccacgtggtggcgaaggtgcgcgcggtggacgccgattcgggctacaatgcgtggctttcgtatgaattgcagctggcggcggtcggcgcgcgcatcccgttccgcgtggggctgtacactggcgagatcagcacgacgcgccctctggacgaggtggacgcgccgcaccaccgccttctggtgctggtgaaggaccacggtgagcccgcgctgacggccacggcaacggtgctgttgtcgctggtggagagcggccaagcgccacaggcttcgtcgagggcgtcggcaggcgctgtgggtccagaagcggcgctggtggatgtcaatgtttacttgatcattgccatctgcgcggtgtccagcctgttggtgctcacgttgctgctgtatactgcgctgcggtgctcggcaccgcccaccgagggcgcgtgcgcgccgggcaagcccactctagtgtgctccagcgcggcagggagttggtcgtactcgcagcagaggcggccgagggtgtgctctggggagggcccgcataagacggacctcatggccttcagtcccagccttcctccttgtctgggttctgcagagggaacaggccagagggaggaggactcagaatgcttgaaagagccacgacagcccaaccctgactggcgttactctgcctccctgagagcaggcatgcacagctctgtgcacctagaggaggctggcattctacgggctggtccaggagggcctgatcagcagtggccaacagtatccagtgcaacaccagaaccagaggcaggagaagtgtcccctccagtcggtgcgggtgtcaacagcaacagctggacctttaaatacggaccaggcaaccccaaacaatccggtcccggtgagttgcccgacaaattcattatcccaggatctcctgcaatcatctccatccggcaggagcctactaacagccaaattgacaaaagtgacttcataaccttcggcaaaaaggaggagaccaagaaaaagaagaaaaagaagaagggtaacaagacccaggagaaaaaagagaaagggaacagcacgactgacaacagtgaccagtgaggtcctcaaatggaaacaagccacttagccagtttttgtaataatggcaaatctctcccatgtagcaattccctgctcctttttcctatctacatgagccctcttagagacctcagaaatctgcagaaagttccctgtgtctgtctagaacgcatttaacaggttttgtcgtaaaagctttactaagtctggtgttaactctttctctccactctggcttgttttcagaacctaaaaagcagacccaagtttcctttctcctccgccgcaaaggagaggcttcccagccccgccagtgagaggttggactctctgccctgtgctccggggatcctgtcttgatgacacttgcagggcaggctgaaaagttttgagattgagcagcttgggagtttgtggccactgggtatgtgtggctaccgcgggtatgcgagtgccagatattggctgagacgagccagcttagactaattggtacaaggaaggcaagaaaacaaagacaaataaacagcggaagttatcagtatggaggggaagtgtaaacttaaagggaccagactttctaaatcttacaactcaagaggtggcagccaccctctaggagacaaaactacccccactgacaaggctttaggagaccctaaagtctgttggctgtgacgtcattatacctaaaatctgcatcatacctgcaagccaacagttcagtgttttaacagagaaccaccctgggaaacagaagcagatctgatgtgtttcctatacatgtcctgtgctcactttattaaaaattcttttgcacacaatgtttatgaaaaggccagatccttttccaatacttatgcaaaagcaaaagaaaaccccgacacctcacctttcgctgtttgttgtttcatagatttatttaaaaaaagagaaagtctatagctataaatctttaaagagaaatatgaatacaattcccctaaactctcctcaaaagagaattcagtctacagccatttaaatgatcattgctgctacagaagtgctttaagagaattgcctgaaacatctgtattatatcggccacctgccaatcacagctttactctttcaggtcactctggggctgcctcttgcatgtattactaaataaaatgatctctctttctctctctctctctcttttctaagaaacaattatgtgcactttgatacacaaccttctctaaccaactatatatcaagacccaaaaattgaagaaaaatattgttttctcatacagtgagcagatttttcaatctactaattctgtgacttgtcttggtgtgctagcctacaccttctctttggtttagttttccttttctataacactctgaattgctaatcttactaacacctatgatgttacctgaaatcaatctcccatatgtatgctgtatgctatgctaagactcctgaaatatacttactctgtgcttgtgtatgtgaatgttaatgcaactattacctagagtgaactttaagctttattgttgaatgtaattccattatatttccttttgtacacctgtgaaaaagtggagtagtgtttttttaaccattgttaatcagcttttgtgtatgaaagacacagtaaaatttctttcttaaatcaagatactggtgattcaaggaattttatttatggtccagccaagagccatctcgtgccaagacttctgctggcaagggaatggataaagctgttttgttctagtaacaattttggaatgaatactgacaatattccatgagggtgtgcaagcacaaattttaccaatctgacctctttgaagttgcagaatgctttgaaattctaatggtatctgaaatatcagctcatagaaagtaacaaaatttgctgtcaccttaaataagacattttaattttgttataatgtacaatttagaagtttgattaattatattatctatttaggcattaatataaaagaggtaggagtctgttatttaaaaaaagcattaaatttaaaaaaaaactgtcttgtctacttttagcttcattctcccatattttgaagggtgtgtaacttcagctctgcaggattgcatggggtaaaacttgttaccaacacatgtgaaccattgctacattgtaggttgtgatcattttgccccactgaagcccatgtatctgaccttacgtgccttttgaactaggagaatcgggctaatttattaatgatgataattataatgtatctgtacagcactttttacatttgcgaagtgctttccaatccatgttagttactagttattacagctgtaaggataaaacacgtcatgtggattcattttgaattggtgctattggtatttcctctgttattgctaataaatgaaaatggtggtatgaaaaaaaa

SEQ ID NO: 441769 - DNA, 5268 bp, Homo sapiens
atggattatcactggcgaggagagctgggatcctggcgactactactcttgcttctgctcctcgcagcctggaaggtggggagcggccagctccactactccgtccccgaggaggccaaacacggcaccttcgtgggccggatcgcgcaggacctggggctggagctggcggagctggtgccgcgcctgttccgggtggcgtccaaaagacaccgggaccttctggaggtaagtctgcagaatggcattttgtttgtgaattctcggatcgaccgcgaggagctgtgcgggcggagcgcggagtgcagcatccacctggaggtgatcgtggacaggccgctgcaggttttccatgtggacgtggaggtgaaggatgttaatgacaacccgccagtgttccgggtaaaagaccaaaagctgtttgtttcagaatccagaatgccagactctcggtttccgctagagggcgcgtccgatgcagatgttggagctaactccgtgttaacctacaggcttagctctcatgattacttcatgctagatgtgaattcaaagaacgatgagaataaactggttgagctcgtattaagaaaatccttggacagagaggacgctcctgcgcaccacttattcctgacagccacagatgggggcaaacctgagctcacaggcactgttcagctgctggtcacagtgctggatgtgaatgataatgctcccactttcgaacagtctgaatacgaagtaagaatattcgaaaacgcagacaacggaacaacagttatcaaactgaatgcttctgatccggatgaaggagccaatggggcaatttcatattcttttaatagccttgttgaaactatggttattgaccactttagcatagatcgaaatacgggagaaatagtgattcggggtaatttggattttgaacaagaaaacttatacaaaatcctcattgacgccacggacaaaggccatcctcccatggcgggtcattgcaccgttttagtgagaattttggataaaaatgataacgtccctgagatagcactgacttccttatccttgcctgtacgtgaagacgctcaatttggtactgtcatcgccctaattagcgtgaacgacctcgattcaggtgccaacgggcaggtgacctgctccctgatgccccatgtccccttcaagctggtgtccaccttcaagaattactactcgttggtgctggacagcgccctggaccgcgagagagtgtcggcctatgagttggtggtaaccgcgcgggacgggggctcgccttcgctgtgggccaccgccagcttgtctgtggaggtggccgacgtgaacgacaatgctccggcgttcgcgcagcccgagtacacggtgttcgtgaaggagaacaacccgccgggctgccacatcttcacggtgtctgcgcgagacgcggacgcgcaggagaacgcgctggtgtcctactcgcttgtggagcggcgggtgggcgagcgctcgctgtcgagctacatttcggtgcacacggagagcggcaaggtgtacgcgctgcagccgctggaccacgaggagctagagctgctgcagttccaggtgagcgcgcgcgacgcgggcgtgccgcctctgggcagcaacgtgacgctgcaggtgttcgtgctggacgagaatgacaacgcgccggcactgctggagcctcgggtgggtggcactggtggcgcagcgagcaagctggtgccgcggtctgtgggcgcgggccacgtggtagcgaaggtgcgcgcagtggacgccgactcgggctacaacgcgtggctttcgtatgagctgcagccagctgcaagcagccctcgcatcccgttccgcgtggggctgtacacgggcgagatcagcaccactcgtgtcctggacgaagcggactctccgcgccaccgtctgctggtcctggtgaaggatcatggtgaacctgcgctgaccgccacggccacggttctggtgtcgctggtggagagcggccaggctccaaaagcgtcatcgaggcagtcggctggcgttttgggtccggaagcggcgctggtggatgtcaacgtgtacctgatcatcgccatctgcgcggtatccagcctgctggtgctcacgctgctgctgtacactgcgctgcggtgctcagcactgcccactgagggcgggtgccgggcgggcaagcccactctggtgtgctccagtgcggtggggagctggtcatactcgcaacaacagccgcagagggtgtgctctggtgaggggccaccgaagacggacctcatggccttcagcccctgccttcctcctgatctgggatcagttgatgtaggcgaagagcaagatttaaatgttgatcatggcctcaaaccacgacagcccaaccctgactggcgttactctgcctccctgagagcaggcatgcacagctctgtgcacctagaggaggctggcattctacgggctggtccaggagggcctgatcagcagtggccaacagtatccagtgcaacaccagaaccagaggcaggagaagtgtcccctccagtcggtgcgggtgtcaacagcaacagctggacctttaaatacggaccaggcaaccccaaacaatccggtcccggtgagttgcccgacaaattcattatcccaggatctcctgcaatcatctccatccggcaggagcctactaacagccaaattgacaaaagtgacttcataaccttcggcaaaaaggaggagaccaagaaaaagaagaaaaagaagaagggtaacaagacccaggagaaaaaagagaaagggaacagcacgactgacaacagtgaccagtgaggtcctcaaatggaaacaagccacttagccagtttttgtaataatggcaaatctctcccatgtagcaattccctgctcctttttcctatctacatgagccctcttagagacctcagaaatctgcagaaagttccctgtgtctgtctagaacgcatttaacaggttttgtcgtaaaagctttactaagtctggtgttaactctttctctccactctggcttgttttcagaacctaaaaagcagacccaagtttcctttctcctccgccgcaaaggagaggcttcccagccccgccagtgagaggttggactctctgccctgtgctccggggatcctgtcttgatgacacttgcagggcaggctgaaaagttttgagattgagcagcttgggagtttgtggccactgggtatgtgtggctaccgcgggtatgcgagtgccagatattggctgagacgagccagcttagactaattggtacaaggaaggcaagaaaacaaagacaaataaacagcggaagttatcagtatggaggggaagtgtaaacttaaagggaccagactttctaaatcttacaactcaagaggtggcagccaccctctaggagacaaaactacccccactgacaaggctttaggagaccctaaagtctgttggctgtgacgtcattatacctaaaatctgcatcatacctgcaagccaacagttcagtgttttaacagagaaccaccctgggaaacagaagcagatctgatgtgtttcctatacatgtcctgtgctcactttattaaaaattcttttgcacacaatgtttatgaaaaggccagatccttttccaatacttatgcaaaagcaaaagaaaaccccgacacctcacctttcgctgtttgttgtttcatagatttatttaaaaaaagagaaagtctatagctataaatctttaaagagaaatatgaatacaattcccctaaactctcctcaaaagagaattcagtctacagccatttaaatgatcattgctgctacagaagtgctttaagagaattgcctgaaacatctgtattatatcggccacctgccaatcacagctttactctttcaggtcactctggggctgcctcttgcatgtattactaaataaaatgatctctctttctctctctctctctcttttctaagaaacaattatgtgcactttgatacacaaccttctctaaccaactatatatcaagacccaaaaattgaagaaaaatattgttttctcatacagtgagcagatttttcaatctactaattctgtgacttgtcttggtgtgctagcctacaccttctctttggtttagttttccttttctataacactctgaattgctaatcttactaacacctatgatgttacctgaaatcaatctcccatatgtatgctgtatgctatgctaagactcctgaaatatacttactctgtgcttgtgtatgtgaatgttaatgcaactattacctagagtgaactttaagctttattgttgaatgtaattccattatatttccttttgtacacctgtgaaaaagtggagtagtgtttttttaaccattgttaatcagcttttgtgtatgaaagacacagtaaaatttctttcttaaatcaagatactggtgattcaaggaattttatttatggtccagccaagagccatctcgtgccaagacttctgctggcaagggaatggataaagctgttttgttctagtaacaattttggaatgaatactgacaatattccatgagggtgtgcaagcacaaattttaccaatctgacctctttgaagttgcagaatgctttgaaattctaatggtatctgaaatatcagctcatagaaagtaacaaaatttgctgtcaccttaaataagacattttaattttgttataatgtacaatttagaagtttgattaattatattatctatttaggcattaatataaaagaggtaggagtctgttatttaaaaaaagcattaaatttaaaaaaaaactgtcttgtctacttttagcttcattctcccatattttgaagggtgtgtaacttcagctctgcaggattgcatggggtaaaacttgttaccaacacatgtgaaccattgctacattgtaggttgtgatcattttgccccactgaagcccatgtatctgaccttacgtgccttttgaactaggagaatcgggctaatttattaatgatgataattataatgtatctgtacagcactttttacatttgcgaagtgctttccaatccatgttagttactagttattacagctgtaaggataaaacacgtcatgtggattcattttgaattggtgctattggtatttcctctgttattgctaataaatgaaaatggtggtatgaaaaaaaa

SEQ ID NO: 441770 - DNA, 4595 bp, Homo sapiens
tccctgactgttgaatgatggcggacgcagaagaaatggattaataaattccggaacatacagtattttatctttatgcggaagatcttctaatggaaataaaaccagaggtatttgacatggtgtttaccccggaggatagattgggaaagcaatgtctgctcctcccgcttctgctcctcgcagcctggaaggtggggagcggccagctccactactccgtacccgaggaggccaaacacggcaccttcgtgggccggatcgcgcaggacctggggctggagctggcggagctggtgccgcgcctgttcaggatggcctccaaagaccgcgaggaccttctggaggtaaatctgcagaatggcattttgtttgtgaattctcggatcgaccgcgaggagctgtgcgggcggagcgcggagtgcagcatccacctggaggtgatcgtggacaggccgctgcaggttttccatgtggacgtggaggtgagggacattaacgacaacccgcccttgttcccggtagaggaacaaagagtgctgatttacgaatctaggctgccagattctgtgtttccactggagggcgcgtccgatgcagatgttggctcaaattccatcttaacctataaactcagttctagcgaatacttcgggctagatgtgaaaataaacagtgatgacaataaacaaattgggctcttattaaagaaatccttggacagagaggaagctcctgcacacaacttattcctgacagccacagatgggggcaaacctgagctcacaggcactgttcagctgctggtcacagtgctggatgtgaatgataatgctcccactttcgaacagtctgaatacgaagtaagaatattcgaaaatgcagacaacggaacaacagttatcagactgaatgcttctgatcgggatgaaggagcgaatggggcaatttcatattcttttaatagccttgttgcagccatggttattgaccactttagcatagatcgaaatacgggagaaatagtgattcggggtaatttggattttgaacaagaaaacttatacaaaatcctcattgacgccacggacaaaggccatcctcccatggcgggtcattgcaccgttttagtgagaattttggataaaaatgataacgtccctgagatagcactgacttccttatccttgcctgtacgtgaagacgctcaatttggtactgtcatcgccctaattagcgtgaacgacctcgattcaggtgccaacgggcaggtgaactgctcgctgacgcctcacgtccctttcaagctggtgtccaccttcaagaattactactcgttggtgctggacagtgccctggaccgcgagagcgtgtcggcctatgagttggtggtaaccgcgcgggacgggggctcgccttcgctgtgggccaccgccagcttgtctgtggaggtggccgacatgaatgacaatgctccggcgttcgcgcagcccgagtacacagtgttcgtgaaggagaacaacccgccgggctgccacatcttcacggtgtctgcgcgagacgcggacgcgcaggagaacgcgctggtgtcctactcgctggtggagcggcgggtgggcgagcgcgcgttgtcgagctacatttcggtgcacgcggagagcggcaaggtgtacgcgctgcagccgctggaccacgaggagctagagctgctgcagtttcagccacgacagcccaaccctgactggcgttactctgcctccctgagagcaggcatgcacagctctgtgcacctagaggaggctggcattctacgggctggtccaggagggcctgatcagcagtggccaacagtatccagtgcaacaccagaaccagaggcaggagaagtgtcccctccagtcggtgcgggtgtcaacagcaacagctggacctttaaatacggaccaggcaaccccaaacaatccggtcccggtgagttgcccgacaaattcattatcccaggatctcctgcaatcatctccatccggcaggagcctactaacagccaaattgacaaaagtgacttcataaccttcggcaaaaaggaggagaccaagaaaaagaagaaaaagaagaagggtaacaagacccaggagaaaaaagagaaagggaacagcacgactgacaacagtgaccagtgaggtcctcaaatggaaacaagccacttagccagtttttgtaataatggcaaatctctcccatgtagcaattccctgctcctttttcctatctacatgagccctcttagagacctcagaaatctgcagaaagttccctgtgtctgtctagaacgcatttaacaggttttgtcgtaaaagctttactaagtctggtgttaactctttctctccactctggcttgttttcagaacctaaaaagcagacccaagtttcctttctcctccgccgcaaaggagaggcttcccagccccgccagtgagaggttggactctctgccctgtgctccggggatcctgtcttgatgacacttgcagggcaggctgaaaagttttgagattgagcagcttgggagtttgtggccactgggtatgtgtggctaccgcgggtatgcgagtgccagatattggctgagacgagccagcttagactaattggtacaaggaaggcaagaaaacaaagacaaataaacagcggaagttatcagtatggaggggaagtgtaaacttaaagggaccagactttctaaatcttacaactcaagaggtggcagccaccctctaggagacaaaactacccccactgacaaggctttaggagaccctaaagtctgttggctgtgacgtcattatacctaaaatctgcatcatacctgcaagccaacagttcagtgttttaacagagaaccaccctgggaaacagaagcagatctgatgtgtttcctatacatgtcctgtgctcactttattaaaaattcttttgcacacaatgtttatgaaaaggccagatccttttccaatacttatgcaaaagcaaaagaaaaccccgacacctcacctttcgctgtttgttgtttcatagatttatttaaaaaaagagaaagtctatagctataaatctttaaagagaaatatgaatacaattcccctaaactctcctcaaaagagaattcagtctacagccatttaaatgatcattgctgctacagaagtgctttaagagaattgcctgaaacatctgtattatatcggccacctgccaatcacagctttactctttcaggtcactctggggctgcctcttgcatgtattactaaataaaatgatctctctttctctctctctctctcttttctaagaaacaattatgtgcactttgatacacaaccttctctaaccaactatatatcaagacccaaaaattgaagaaaaatattgttttctcatacagtgagcagatttttcaatctactaattctgtgacttgtcttggtgtgctagcctacaccttctctttggtttagttttccttttctataacactctgaattgctaatcttactaacacctatgatgttacctgaaatcaatctcccatatgtatgctgtatgctatgctaagactcctgaaatatacttactctgtgcttgtgtatgtgaatgttaatgcaactattacctagagtgaactttaagctttattgttgaatgtaattccattatatttccttttgtacacctgtgaaaaagtggagtagtgtttttttaaccattgttaatcagcttttgtgtatgaaagacacagtaaaatttctttcttaaatcaagatactggtgattcaaggaattttatttatggtccagccaagagccatctcgtgccaagacttctgctggcaagggaatggataaagctgttttgttctagtaacaattttggaatgaatactgacaatattccatgagggtgtgcaagcacaaattttaccaatctgacctctttgaagttgcagaatgctttgaaattctaatggtatctgaaatatcagctcatagaaagtaacaaaatttgctgtcaccttaaataagacattttaattttgttataatgtacaatttagaagtttgattaattatattatctatttaggcattaatataaaagaggtaggagtctgttatttaaaaaaagcattaaatttaaaaaaaaactgtcttgtctacttttagcttcattctcccatattttgaagggtgtgtaacttcagctctgcaggattgcatggggtaaaacttgttaccaacacatgtgaaccattgctacattgtaggttgtgatcattttgccccactgaagcccatgtatctgaccttacgtgccttttgaactaggagaatcgggctaatttattaatgatgataattataatgtatctgtacagcactttttacatttgcgaagtgctttccaatccatgttagttactagttattacagctgtaaggataaaacacgtcatgtggattcattttgaattggtgctattggtatttcctctgttattgctaataaatgaaaatggtggtatgaaaaaaaa

SEQ ID NO: 441771 - DNA, 5439 bp, Homo sapiens
atggagcaggcgggcaccagacctgcggcgacagagcatccacggctccggcggcccatgccctggctgctgctactgcctctcctgctgctgttgctgctgctgctacctggccctgcggcctcccagctgcgatactctgtgccagaggagcaggcacccggcgcgctcgtgggcaacgtggctcgcgcgctggggcttgagctgcggcgcttggggccgggttgcttgcgcatcaaccatctgggtgcgcccagtccgcgctacctggagctggacctgacgagtggagcgctcttcgtcaacgagcgcattgatcgggaggcgctgtgtgagcagcggcctcgctgcctgctcagcttggaagtgctggcgcacaaccccgtggcggtgagcgccgttgaggtggaaatattggacatcaacgacaactcaccgcgtttcccgcggcccaactaccagcttcaggtaagcgaatcggtggcgcctggagcgcgctttcacatagagagtgcgcaggaccccgacgtgggcgccaactcagtacagacctacgagctcagccccagcgagcacttcgagctggaccttaagcccctgcaggagaacagtaaagtgcttgagctggtgctgcgtaagggcctagaccgggagcaggcagccttgcaccacctggttctcacagccgtggatgggggcatcccagcccgctcgggtacggcacagatctctgtgcgtgtcctggacactaacgacaactctcctgcctttgaccagtccacttatcgcgtccagctacgggaggactcacccccaggcacattggtggtgaagctgaatgcctcagacccggatgagggctccaatggtgagctcaggtactccttgagcagctacacgtcggaccgggagaggcagctcttcagcatagatgccagtaccggggaagtgcgagtaattggggggctggattatgaggaagcctcctcctaccagatctatgtgcaggcgactgaccggggtccagtgcccatggcaggtcactgcaaggtgctggtggacatcgtggacgtgaatgacaatgccccagaggtggtgctcacggacctgtatagcccagtgcctgagaatgctacacccaacaccattgtggccgttctcagtgtcaatgaccaagactcaggccccaaccggaaagtgagcctgggtctggaggccacactgcctttccgactgaatggctttggaaactcctatacactggtggtgagcggcccactggaccgagagcgggtggctgtctacaacatcacggtgacagccacagatgggggaataccgcagctcacatccctgcgtacactgaaggttgagatctctgacatcaatgacaatccaccaagcttcctggaggactcctattccatctacatacaggagaacaatttgccaggtgtgttgctctgtactgtgcaagccacagacccagatgaaaaggagaatgcagaggtgacctactcccttctggagagggagattcaagggctgccagtcacctcctatgtctccattaacagtgccagtggcagcctttatgctgtcaactcctttgactatgagaagtttcgggagttctttgtgactgtggaggctcaggacaaggggagcccaccactgagcagcactgtgactgccaacgtatatgtggtggacatgaatgaccatgcccctcacattctgtaccctacctcaaccaactcgtcagcagccttcgagatggtgcctcgaactgcccctgctggctacctggtcaccaaagtcatagctatggactcagactctgggcaaaatgcttggcttttttaccatctagcccagacttctgacctggacctctttaaggtagagctgcacacaggagaaattaggactaccaggaagatgggagatgagagtggtagcactttcaacctgaccgtggtggtccgagataatggagagccatcactatcagcctctgtggccattacagtagctgtggtggatagggtttccaaaatcctccctgacactcagaggcatgttaagagccctcggacatactctgaaattaccctttatctaataatagcattaagcacagtgtcttttatatttcttttgacaatcatcattttgagcatcatcaagtgctaccgctacactgcgtatggcactgcatgctgtggaggcttctgtggagtaagggaaaggtcccctgcagaactgtacaaacaagccaacaacaatattgatgccaggataccgcatggcctcaaagtgcagcctcacttcattgaagttcgagggaatggctccctcaccaagacctactgctacaaggcctgtctgacagcaggctcagggagtgacactttcatgttttacaatacaggggcccagacaggaccagggccttcgggagcccaagcagcagtgactgacagcaggaatctcacaggccaaagtggtcagaatgctgggaacctgattattctcaaaaatgaggctgtttctcaaaatgagccacgacagcccaaccctgactggcgttactctgcctccctgagagcaggcatgcacagctctgtgcacctagaggaggctggcattctacgggctggtccaggagggcctgatcagcagtggccaacagtatccagtgcaacaccagaaccagaggcaggagaagtgtcccctccagtcggtgcgggtgtcaacagcaacagctggacctttaaatacggaccaggcaaccccaaacaatccggtcccggtgagttgcccgacaaattcattatcccaggatctcctgcaatcatctccatccggcaggagcctactaacagccaaattgacaaaagtgacttcataaccttcggcaaaaaggaggagaccaagaaaaagaagaaaaagaagaagggtaacaagacccaggagaaaaaagagaaagggaacagcacgactgacaacagtgaccagtgaggtcctcaaatggaaacaagccacttagccagtttttgtaataatggcaaatctctcccatgtagcaattccctgctcctttttcctatctacatgagccctcttagagacctcagaaatctgcagaaagttccctgtgtctgtctagaacgcatttaacaggttttgtcgtaaaagctttactaagtctggtgttaactctttctctccactctggcttgttttcagaacctaaaaagcagacccaagtttcctttctcctccgccgcaaaggagaggcttcccagccccgccagtgagaggttggactctctgccctgtgctccggggatcctgtcttgatgacacttgcagggcaggctgaaaagttttgagattgagcagcttgggagtttgtggccactgggtatgtgtggctaccgcgggtatgcgagtgccagatattggctgagacgagccagcttagactaattggtacaaggaaggcaagaaaacaaagacaaataaacagcggaagttatcagtatggaggggaagtgtaaacttaaagggaccagactttctaaatcttacaactcaagaggtggcagccaccctctaggagacaaaactacccccactgacaaggctttaggagaccctaaagtctgttggctgtgacgtcattatacctaaaatctgcatcatacctgcaagccaacagttcagtgttttaacagagaaccaccctgggaaacagaagcagatctgatgtgtttcctatacatgtcctgtgctcactttattaaaaattcttttgcacacaatgtttatgaaaaggccagatccttttccaatacttatgcaaaagcaaaagaaaaccccgacacctcacctttcgctgtttgttgtttcatagatttatttaaaaaaagagaaagtctatagctataaatctttaaagagaaatatgaatacaattcccctaaactctcctcaaaagagaattcagtctacagccatttaaatgatcattgctgctacagaagtgctttaagagaattgcctgaaacatctgtattatatcggccacctgccaatcacagctttactctttcaggtcactctggggctgcctcttgcatgtattactaaataaaatgatctctctttctctctctctctctcttttctaagaaacaattatgtgcactttgatacacaaccttctctaaccaactatatatcaagacccaaaaattgaagaaaaatattgttttctcatacagtgagcagatttttcaatctactaattctgtgacttgtcttggtgtgctagcctacaccttctctttggtttagttttccttttctataacactctgaattgctaatcttactaacacctatgatgttacctgaaatcaatctcccatatgtatgctgtatgctatgctaagactcctgaaatatacttactctgtgcttgtgtatgtgaatgttaatgcaactattacctagagtgaactttaagctttattgttgaatgtaattccattatatttccttttgtacacctgtgaaaaagtggagtagtgtttttttaaccattgttaatcagcttttgtgtatgaaagacacagtaaaatttctttcttaaatcaagatactggtgattcaaggaattttatttatggtccagccaagagccatctcgtgccaagacttctgctggcaagggaatggataaagctgttttgttctagtaacaattttggaatgaatactgacaatattccatgagggtgtgcaagcacaaattttaccaatctgacctctttgaagttgcagaatgctttgaaattctaatggtatctgaaatatcagctcatagaaagtaacaaaatttgctgtcaccttaaataagacattttaattttgttataatgtacaatttagaagtttgattaattatattatctatttaggcattaatataaaagaggtaggagtctgttatttaaaaaaagcattaaatttaaaaaaaaactgtcttgtctacttttagcttcattctcccatattttgaagggtgtgtaacttcagctctgcaggattgcatggggtaaaacttgttaccaacacatgtgaaccattgctacattgtaggttgtgatcattttgccccactgaagcccatgtatctgaccttacgtgccttttgaactaggagaatcgggctaatttattaatgatgataattataatgtatctgtacagcactttttacatttgcgaagtgctttccaatccatgttagttactagttattacagctgtaaggataaaacacgtcatgtggattcattttgaattggtgctattggtatttcctctgttattgctaataaatgaaaatggtggtatgaaaaaaaa

SEQ ID NO: 441772 - DNA, 2535 bp, Homo sapiens
atggtttccagatgtagctgcctgggggtccagtgtctgctgctctcgcttcttctcctcgcagcctgggaggtggggagcggccagctccactactcagtctacgaggaggccagacacggcaccttcgtgggccgcatcgcgcaggacctggggctggagctggcggagctggtgcagcgcctgttccgggtggcgtccaaaagacacggggaccttctggaggtaaatctgcagaatggcattttgtttgtgaattctcggattgaccgcgaggagctgtgcgggcggagcgtggagtgcagcatccacctggaggtgatcgtggacaggccgctgcaggttttccatgtggacgtggaagtgaaggacattaacgacaacccgcccaggttctccgtaacagaacaaaagctctcaatacctgaatccagactgcttgactctcgatttccactagaaggcgcatctgatgcggatgttggagagaacgcattgcttacttacaaactcagtccaaatgagtattttgttcttgatattataaacaaaaaagacaaagacaaattcccagtgcttgttctgcggaagctgctggatcgtgaagaaaatcctcagctaaagttgttgttgacagcaactgatggaggcaaacctgaatttaccggatctgtttctctgctgatcctggtgttagatgccaatgataacgcccctatctttgacagaccggtttatgaagttaagatgtatgaaaatcaagtgaaccaaacattagtaatacggctcaacgcttctgattcggatgaaggaataaacaaggaaatgatgtattcatttagctctttggtcccacccacgataagaaggaaattttggataaacgaaaggacgggagaaataaaagtaaatgatgctattgactttgaggacagtaacacttatgaaattcatgtagatgttacagataagggaaacccacctatggttggtcactgcacggtcctagtggaactactggatgaaaatgataattcacctgaggtgattgtcacttctctgtctctcccagtgaaagaagatgctcaagtgggcaccgtcattgccctaatcagcgtttctgaccatgattcaggagccaacggacaggtcacctgctctctgacgcctcacgttccgttcaagctggtgtccacctacaagaattactactcattggtgctggacagcgctctggaccgcgagagggtgtcggcctatgagctggtggtgaccgcgcgggacgggggctcgcctccgctgtgggccacggccagcgtgtctgtggaggtggccgacgtgaacgacaacgcgcctgcgttcgcgcagtccgagtacacggtgttcgtgaaggagaacaacccgccaggctgccacatcttcacggtgtctgcgtgggacgcggacgcgcaggagaacgccctggtgtcctactctctggtggagcggcggttgggcgagcgctcgctgtcgagctacgtgtcggtgcacgcggagagcggcaaggtgtacgcgctgcagccgctggaccacgaggagctggagctgctacagttccaggtgagcgcgcgcgatgggggcgtgccgcctctgggcagcaacttgacgctgcaggtgttcgtgctggacgagaacgacaacgctcccgcgctgctggcgtctcccgctggcagcgcgggcggtgcagtcagtgagctggtgctgcggtcggtggttgcgggtcacgtggtggctaaggtgcgcgcagtggacgctgactctggatacaacgcgtggctgtcgtatgaattgcagtcggcggcggttggtgcacgcatcccgtttcgcgtggggctgtacacgggcgagatcagtacgacgcgcgctctggatgagactgactcgccacgccagcgcctactggtgctggtgaaggaccatggcgagccgtcgctgacggccacggccactgtgcttgtgtcgcttgtggagggcagccaggcacccaaggcctcgtcgcgggcttcagtgggcgtggcgcccgaggtggccctggtggatgtcaacgtgtacctgatcatcgccatctgcgcggtgtccagcttgctggtgctcacgctgctgctgtacactgcactgaggtgctcggcggcgcccaccgagggcgcatgtgggccggtgaagcccacgctggtgtgctctagcgcggtggggagctggtcttactcgcagcagaggcggcagagggtgtgttctggggagggcctgcccaaggcggacctcatggccttcagccccagccttccaccatgcccaatggtagatgtggacggggaagatcagtctattggaggggaccactctaggaaggtgggttattacgttttcattttccttttgtgctttatgaataatattttctcttaccgcattttctcaaatatgtatcagaatatttcatttttgtctacattccatttatgcttgaatatttctagtgatacctttgtaatataa

SEQ ID NO: 441773 - DNA, 2593 bp, Homo sapiens
gaaaagaaccttccatttttggctgtgccaagaagctcagaaaggcgataatataaaaaatatatagttaattgggaattgaatttacaaaatacattgtgtggtgatgcaatagaaagctcataattggaacgagattgagatggtatattcccggagaggaagtctgggatcccggctcctgctgctctggcttctccttgcctactggaaggcagggagcggccagctccactactcgatcccggaggaagccaaacacggaaccttcgttggccgcatcgcgcaggacctagggctggagctggcggagctggtgccgcgcctgttccgggtggcgtccaagggccgcggggaccttctggaggtaaatctgcagaatggcattttgtttgtgaattctcggatcgaccgggaggagctgtgccggcggagggcggagtgcagcatccacctggaggtgatcgtggacaggccgctgcaggttttccatgtggaggtggcagtgaaggacatcaatgacaatccgcccaggttctccagacaagaacaaagattattcattttagagtcaagaatgccagattcgcggtttccgctagagggcgcgtcggatttggatattggagcaaatgcacaattgagatacaggttaaatccaaacgaatattttgacttagatgttaaaacaaatgaagaagaaacgaactttttagagctggttttgaggaaatccttagatagagaagaaacacaagaacaccgtttattagtgattgcaactgatggaggaaaacccgaactaacaggtacagttcagttgttgatcaatgtattggatgctaatgataacgccccagaatttgataaatccatttataatgtcagattgttggaaaatgcaccaagtgggacattagttattaaactgaacgcctcagatgcagatgagggcatcaataaggaaatagtgtatttctttagtaatcttgttcttgacgatgtaaagtccaaatttataattaattctaatactggtgaaataaaagttaacggggaactggattatgaagactataactcatatgaaattaatattgatgccatggataaaagtacattcccattatcaggacactgtaaagtagtagtgaaactcctggatgtgaatgataataccccagagatggccataaccacccttttcctgcctgtcaaagaggacgctccactcagcacggtcattgctctgatcagcgtgtctgaccgtgactcaggtgccaacgggcaggtgacctgctccctaatgccccacgttcccttcaagctggtgtccaccttcaagaattactactcgttggtgctggacagcgccctggaccgcgagagcgtgtcggtctatgagctggtggtgaccgcgcgggacgggggctcgccttcgctgtgggccaccgccagcgtgtctgtggaagtggccgacgtgaacgacaacgctccggcgttcgcgcagccccagtataccgtgttcgtgaaggagaacaacccgccaggctgccacatcttcacggtgtctgcacgggacgcggacgcgcaggagaacgccctggtgtcctactcgctggtggagcggcgggtgggcgagcgcccgctgtcgagttacgtttcggtgcacgcggagagcggcaaggtgtacgcgctgcagccgctggaccacgaggaagtggagctgctgcagttccaggtgagcgcgcgcgacgcgggcgtgccgcctctgggcagcaacgtgacgctgcaggtgttcgtgctggacgagaacgacaacgcgccggcgctgctggtgcctcgagtgggtggcaccggcggcgcagtgagcgagctggtgccgaggtcagtgggtgcgggccacgtggtggcgaaggtgcgcgcagtggaccctgattcgggctacaacgcttggctttcgtatgagctgcagccagcgcctggcagtgcgcgcatcccgttccgcgtggggctgtacacaggcgagatcagcacaacacgctctctggatgagaccgaagcaccgcgccaccgccttctggtgctggtgaaggaccatggagagcccccgctgacagccacagccacagtgctggtgtcgctggtggaaagtggccaggcgccgaaggcctcatcgcgggcgtcggcgggcgctgtgggtcccgaggctgccctggtggatgtcaacgtgtacctgatcatcgccatctgtgcggtgtccagcctgctggtgctcacgctgctgctgtacaccgcgctgcggtgctcggcgcagcccaccgaggccgtgtgcacacggggcaagcccactctgttgtgctccagcgcggtggggagctggtcgtactcgcagcagaggagacagagggtgtgctctggggaagctccacccaaaacagacctcatggccttcagtccaagccttcctcagggtcccacctctacagacaacgtgagttttctaatattaacatccatctttccctcccaattttcaaatattaaatgtcacattcacccactttttttgtatttaaaaattatgtcttag

SEQ ID NO: 441774 - DNA, 2445 bp, Homo sapiens
atggattatcactggcgaggagagctgggatcctggcgactactactcttgcttctgctcctcgcagcctggaaggtggggagcggccagctccactactccgtccccgaggaggccaaacacggcaccttcgtgggccggatcgcgcaggacctggggctggagctggcggagctggtgccgcgcctgttccgggtggcgtccaaaagacaccgggaccttctggaggtaagtctgcagaatggcattttgtttgtgaattctcggatcgaccgcgaggagctgtgcgggcggagcgcggagtgcagcatccacctggaggtgatcgtggacaggccgctgcaggttttccatgtggacgtggaggtgaaggatgttaatgacaacccgccagtgttccgggtaaaagaccaaaagctgtttgtttcagaatccagaatgccagactctcggtttccgctagagggcgcgtccgatgcagatgttggagctaactccgtgttaacctacaggcttagctctcatgattacttcatgctagatgtgaattcaaagaacgatgagaataaactggttgagctcgtattaagaaaatccttggacagagaggacgctcctgcgcaccacttattcctgacagccacagatgggggcaaacctgagctcacaggcactgttcagctgctggtcacagtgctggatgtgaatgataatgctcccactttcgaacagtctgaatacgaagtaagaatattcgaaaacgcagacaacggaacaacagttatcaaactgaatgcttctgatccggatgaaggagccaatggggcaatttcatattcttttaatagccttgttgaaactatggttattgaccactttagcatagatcgaaatacgggagaaatagtgattcggggtaatttggattttgaacaagaaaacttatacaaaatcctcattgacgccacggacaaaggccatcctcccatggcgggtcattgcaccgttttagtgagaattttggataaaaatgataacgtccctgagatagcactgacttccttatccttgcctgtacgtgaagacgctcaatttggtactgtcatcgccctaattagcgtgaacgacctcgattcaggtgccaacgggcaggtgacctgctccctgatgccccatgtccccttcaagctggtgtccaccttcaagaattactactcgttggtgctggacagcgccctggaccgcgagagagtgtcggcctatgagttggtggtaaccgcgcgggacgggggctcgccttcgctgtgggccaccgccagcttgtctgtggaggtggccgacgtgaacgacaatgctccggcgttcgcgcagcccgagtacacggtgttcgtgaaggagaacaacccgccgggctgccacatcttcacggtgtctgcgcgagacgcggacgcgcaggagaacgcgctggtgtcctactcgcttgtggagcggcgggtgggcgagcgctcgctgtcgagctacatttcggtgcacacggagagcggcaaggtgtacgcgctgcagccgctggaccacgaggagctagagctgctgcagttccaggtgagcgcgcgcgacgcgggcgtgccgcctctgggcagcaacgtgacgctgcaggtgttcgtgctggacgagaatgacaacgcgccggcactgctggagcctcgggtgggtggcactggtggcgcagcgagcaagctggtgccgcggtctgtgggcgcgggccacgtggtagcgaaggtgcgcgcagtggacgccgactcgggctacaacgcgtggctttcgtatgagctgcagccagctgcaagcagccctcgcatcccgttccgcgtggggctgtacacgggcgagatcagcaccactcgtgtcctggacgaagcggactctccgcgccaccgtctgctggtcctggtgaaggatcatggtgaacctgcgctgaccgccacggccacggttctggtgtcgctggtggagagcggccaggctccaaaagcgtcatcgaggcagtcggctggcgttttgggtccggaagcggcgctggtggatgtcaacgtgtacctgatcatcgccatctgcgcggtatccagcctgctggtgctcacgctgctgctgtacactgcgctgcggtgctcagcactgcccactgagggcgggtgccgggcgggcaagcccactctggtgtgctccagtgcggtggggagctggtcatactcgcaacaacagccgcagagggtgtgctctggtgaggggccaccgaagacggacctcatggccttcagcccctgccttcctcctgatctgggatcagttgatgtaggcgaagagcaagatttaaatgttgatcatggcctcaaagtaagtccatttaaatttagaactcataaattctatttgtggaaattgtag

SEQ ID NO: 441775 - DNA, 5585 bp, Homo sapiens
ccagagtaaaaaagggtaaaaaggtaatatattttagggcttaaaatagttatttttttccaagatgaaagctatgagtaaacttaaaccagaaaatcgactagttttaaatctacagaataaacagtagagccttccttttagccacatgatgtcgctgtccaccatagagtgttctctaggaaggaaaatacccagagcccctttgttacttcagagaagcggaggaataagagaagcagcaggactttaacagagactagaatatttaaatttttgcaaaacatgctcttctaatttgatcaaaacattgaggattggtaatggcgtcttctatcagaaggggccgaggggcctggacacggctgctctcgcttctgctcctcgcagcctgggaggtggggagcggccagctccgctactccgtccccgaggaggccaaacacggcaccttcgtgggccgcatcgcgcaggacctggggctggagctggaggagctggtgccgcgcctgttccgggtggcgtccaaaagacacggggaccttctggaggtaaatctgcagaatggcattttgtttgtgaattctcggatcgaccgggaggagctgtgcgggcggagcgcggaatgtagcatccacgtggaggtgatcgtggacaggccgctgcaggttttccatgtggaagtggaggtgaaggacattaacgacaacccgccaatatttccaatgacagtaaagactatccggtttcccgaatcaaggctgcttgattctcggtttcctctagagggagcatctgatgcagatataggagtaaatgctcttctctcctacaagctcagctccagtgagtttttcttcctagatatacaggcaaatgatgaactaagcgaatctttgtctctcgtgctggggaaatcgctggacagagaggaaactgctgaggttaatttgttactggtggctactgatgggggcaaacctgagctcacgggcaccgttcaaatacttattaaggtattagatgtaaatgacaatgaaccaacttttgcccaatcagtttacaaagtaaaattgttagagaatacggcaaatgggaccttagtggttaagttaaacgcttctgatgcagatgaaggaccgaacagcgagattgtgtattcactcggtagtgatgtgtcctccactatacagactaagtttaccatagatcccatctcaggggaaatcagaactaagggaaaattagattatgaagaagcaaagtcctacgagattcaggtcactgcaactgacaaaggaaccccttcaatgtcaggacattgtaaaatttcattaaaacttgtggacatcaatgataacacaccagaagtctcaataacgtctctctcacttcccatctcagagaacgcttccctgggcactgtcattgctctcatcacggtgtcggatcgcgactctggtacgaatggacatgtcacctgctccctgacgccccacgtccctttcaagctggtgtccaccttcaagaattactactcgttggtgctggacagcgccctggaccgcgagagcgtgtcagcctatgagctggtggtgaccgcacgggacgggggctcgccttcactgtgggccaccaccagcgtgtccatcgaggtggccgacgtgaacgacaacgcgccggcgttcgcacagcctgagtacacagtattcgtgaaggagaacaacccgccgggctgccacatcttcacggtgtcagcgtgggatgcggacgcgcaggagaacgcgctggtgtcctactcgctggtggagcggcgggtgggcgagcgcgcgttgtcgagctacgtttcggtgcacgcggagagcggcaaggtgtacgcgctgcagccgctggaccacgaggaagtggagctgctgcagttccaggtgagcgcgcgggatgcgggcgtgccgcctctgggcagcaacgtgacgctgcaggtgttcgtgctggacgagaacgacaacgcgccggcactgttggcgcctagggctggcaccgctgctggcgcagtgagtgagctggtgccgtggtcggtgggtgcagggcacgtggtggcgaaggtgcgcgcagtggacgctgactcaggctacaacgcgtggctttcgtacgagcttcagctgggtactggcagcgctcgcatcccgttccgcgtggggctatacacgggtgagatcagcacgacacgtgccctagacgaggctgactcccctcgacaccgcctactcgtgctggtgaaggaccacggcgaaccagcgttgacagccacggccaccgtgttagtgtcgttggtggaaagtggccaggcacccaaggcctcgtcgcgggcgtgggtgggcgccgcgggctcagaggctacgctggtggatgtcaacgtgtacctgatcatcgccatctgcgcggtatccagcctgttggtgctcacggtgctgctgtacactgcgctgcggtgctcggtgccacccaccgagggtgcgcgcgcgccaggaaagcccacgctggtgtgctccagcgccgtggggagctggtcttactcgcagcagaggcggcagagggtgtgctctggggaggacccccccaagacggacctcatggccttcagccctagcttatctcaaggtccagactccgcagaagagaaacagctctcagaatcagaatacgtaggaaagccacgacagcccaaccctgactggcgttactctgcctccctgagagcaggcatgcacagctctgtgcacctagaggaggctggcattctacgggctggtccaggagggcctgatcagcagtggccaacagtatccagtgcaacaccagaaccagaggcaggagaagtgtcccctccagtcggtgcgggtgtcaacagcaacagctggacctttaaatacggaccaggcaaccccaaacaatccggtcccggtgagttgcccgacaaattcattatcccaggatctcctgcaatcatctccatccggcaggagcctactaacagccaaattgacaaaagtgacttcataaccttcggcaaaaaggaggagaccaagaaaaagaagaaaaagaagaagggtaacaagacccaggagaaaaaagagaaagggaacagcacgactgacaacagtgaccagtgaggtcctcaaatggaaacaagccacttagccagtttttgtaataatggcaaatctctcccatgtagcaattccctgctcctttttcctatctacatgagccctcttagagacctcagaaatctgcagaaagttccctgtgtctgtctagaacgcatttaacaggttttgtcgtaaaagctttactaagtctggtgttaactctttctctccactctggcttgttttcagaacctaaaaagcagacccaagtttcctttctcctccgccgcaaaggagaggcttcccagccccgccagtgagaggttggactctctgccctgtgctccggggatcctgtcttgatgacacttgcagggcaggctgaaaagttttgagattgagcagcttgggagtttgtggccactgggtatgtgtggctaccgcgggtatgcgagtgccagatattggctgagacgagccagcttagactaattggtacaaggaaggcaagaaaacaaagacaaataaacagcggaagttatcagtatggaggggaagtgtaaacttaaagggaccagactttctaaatcttacaactcaagaggtggcagccaccctctaggagacaaaactacccccactgacaaggctttaggagaccctaaagtctgttggctgtgacgtcattatacctaaaatctgcatcatacctgcaagccaacagttcagtgttttaacagagaaccaccctgggaaacagaagcagatctgatgtgtttcctatacatgtcctgtgctcactttattaaaaattcttttgcacacaatgtttatgaaaaggccagatccttttccaatacttatgcaaaagcaaaagaaaaccccgacacctcacctttcgctgtttgttgtttcatagatttatttaaaaaaagagaaagtctatagctataaatctttaaagagaaatatgaatacaattcccctaaactctcctcaaaagagaattcagtctacagccatttaaatgatcattgctgctacagaagtgctttaagagaattgcctgaaacatctgtattatatcggccacctgccaatcacagctttactctttcaggtcactctggggctgcctcttgcatgtattactaaataaaatgatctctctttctctctctctctctcttttctaagaaacaattatgtgcactttgatacacaaccttctctaaccaactatatatcaagacccaaaaattgaagaaaaatattgttttctcatacagtgagcagatttttcaatctactaattctgtgacttgtcttggtgtgctagcctacaccttctctttggtttagttttccttttctataacactctgaattgctaatcttactaacacctatgatgttacctgaaatcaatctcccatatgtatgctgtatgctatgctaagactcctgaaatatacttactctgtgcttgtgtatgtgaatgttaatgcaactattacctagagtgaactttaagctttattgttgaatgtaattccattatatttccttttgtacacctgtgaaaaagtggagtagtgtttttttaaccattgttaatcagcttttgtgtatgaaagacacagtaaaatttctttcttaaatcaagatactggtgattcaaggaattttatttatggtccagccaagagccatctcgtgccaagacttctgctggcaagggaatggataaagctgttttgttctagtaacaattttggaatgaatactgacaatattccatgagggtgtgcaagcacaaattttaccaatctgacctctttgaagttgcagaatgctttgaaattctaatggtatctgaaatatcagctcatagaaagtaacaaaatttgctgtcaccttaaataagacattttaattttgttataatgtacaatttagaagtttgattaattatattatctatttaggcattaatataaaagaggtaggagtctgttatttaaaaaaagcattaaatttaaaaaaaaactgtcttgtctacttttagcttcattctcccatattttgaagggtgtgtaacttcagctctgcaggattgcatggggtaaaacttgttaccaacacatgtgaaccattgctacattgtaggttgtgatcattttgccccactgaagcccatgtatctgaccttacgtgccttttgaactaggagaatcgggctaatttattaatgatgataattataatgtatctgtacagcactttttacatttgcgaagtgctttccaatccatgttagttactagttattacagctgtaaggataaaacacgtcatgtggattcattttgaattggtgctattggtatttcctctgttattgctaataaatgaaaatggtggtatgaaaaaaaa

SEQ ID NO: 441776 - DNA, 2836 bp, Homo sapiens
ccagagtaaaaaagggtaaaaaggtaatatattttagggcttaaaatagttatttttttccaagatgaaagctatgagtaaacttaaaccagaaaatcgactagttttaaatctacagaataaacagtagagccttccttttagccacatgatgtcgctgtccaccatagagtgttctctaggaaggaaaatacccagagcccctttgttacttcagagaagcggaggaataagagaagcagcaggactttaacagagactagaatatttaaatttttgcaaaacatgctcttctaatttgatcaaaacattgaggattggtaatggcgtcttctatcagaaggggccgaggggcctggacacggctgctctcgcttctgctcctcgcagcctgggaggtggggagcggccagctccgctactccgtccccgaggaggccaaacacggcaccttcgtgggccgcatcgcgcaggacctggggctggagctggaggagctggtgccgcgcctgttccgggtggcgtccaaaagacacggggaccttctggaggtaaatctgcagaatggcattttgtttgtgaattctcggatcgaccgggaggagctgtgcgggcggagcgcggaatgtagcatccacgtggaggtgatcgtggacaggccgctgcaggttttccatgtggaagtggaggtgaaggacattaacgacaacccgccaatatttccaatgacagtaaagactatccggtttcccgaatcaaggctgcttgattctcggtttcctctagagggagcatctgatgcagatataggagtaaatgctcttctctcctacaagctcagctccagtgagtttttcttcctagatatacaggcaaatgatgaactaagcgaatctttgtctctcgtgctggggaaatcgctggacagagaggaaactgctgaggttaatttgttactggtggctactgatgggggcaaacctgagctcacgggcaccgttcaaatacttattaaggtattagatgtaaatgacaatgaaccaacttttgcccaatcagtttacaaagtaaaattgttagagaatacggcaaatgggaccttagtggttaagttaaacgcttctgatgcagatgaaggaccgaacagcgagattgtgtattcactcggtagtgatgtgtcctccactatacagactaagtttaccatagatcccatctcaggggaaatcagaactaagggaaaattagattatgaagaagcaaagtcctacgagattcaggtcactgcaactgacaaaggaaccccttcaatgtcaggacattgtaaaatttcattaaaacttgtggacatcaatgataacacaccagaagtctcaataacgtctctctcacttcccatctcagagaacgcttccctgggcactgtcattgctctcatcacggtgtcggatcgcgactctggtacgaatggacatgtcacctgctccctgacgccccacgtccctttcaagctggtgtccaccttcaagaattactactcgttggtgctggacagcgccctggaccgcgagagcgtgtcagcctatgagctggtggtgaccgcacgggacgggggctcgccttcactgtgggccaccaccagcgtgtccatcgaggtggccgacgtgaacgacaacgcgccggcgttcgcacagcctgagtacacagtattcgtgaaggagaacaacccgccgggctgccacatcttcacggtgtcagcgtgggatgcggacgcgcaggagaacgcgctggtgtcctactcgctggtggagcggcgggtgggcgagcgcgcgttgtcgagctacgtttcggtgcacgcggagagcggcaaggtgtacgcgctgcagccgctggaccacgaggaagtggagctgctgcagttccaggtgagcgcgcgggatgcgggcgtgccgcctctgggcagcaacgtgacgctgcaggtgttcgtgctggacgagaacgacaacgcgccggcactgttggcgcctagggctggcaccgctgctggcgcagtgagtgagctggtgccgtggtcggtgggtgcagggcacgtggtggcgaaggtgcgcgcagtggacgctgactcaggctacaacgcgtggctttcgtacgagcttcagctgggtactggcagcgctcgcatcccgttccgcgtggggctatacacgggtgagatcagcacgacacgtgccctagacgaggctgactcccctcgacaccgcctactcgtgctggtgaaggaccacggcgaaccagcgttgacagccacggccaccgtgttagtgtcgttggtggaaagtggccaggcacccaaggcctcgtcgcgggcgtgggtgggcgccgcgggctcagaggctacgctggtggatgtcaacgtgtacctgatcatcgccatctgcgcggtatccagcctgttggtgctcacggtgctgctgtacactgcgctgcggtgctcggtgccacccaccgagggtgcgcgcgcgccaggaaagcccacgctggtgtgctccagcgccgtggggagctggtcttactcgcagcagaggcggcagagggtgtgctctggggaggacccccccaagacggacctcatggccttcagccctagcttatctcaaggtccagactccgcagaagagaaacagctctcagaatcagaatacgtaggaaaggtgagtcttttactttttcttgccaattctaaaattgttctttttaaaaaattctatatgatttctactagttatttagattcatagttcttcatttattttatatcatcctaccgtgcgatttt

SEQ ID NO: 441777 - DNA, 5012 bp, Homo sapiens
  misc_feature (19)..(19): n is a, c, g, or t
  misc_feature (2971)..(2971): n is a, c, g, or t
  misc_feature (2982)..(2982): n is a, c, g, or t
  misc_feature (2990)..(2990): n is a, c, g, or t
  misc_feature (3018)..(3018): n is a, c, g, or t
  misc_feature (3179)..(3179): n is a, c, g, or t
  misc_feature (3257)..(3257): n is a, c, g, or t
  misc_feature (3382)..(3382): n is a, c, g, or t
  misc_feature (3384)..(3384): n is a, c, g, or t
  misc_feature (3396)..(3396): n is a, c, g, or t
  misc_feature (3422)..(3422): n is a, c, g, or t
  misc_feature (4618)..(4618): n is a, c, g, or t
  misc_feature (4671)..(4671): n is a, c, g, or t
cctcgcctccgttacaacngcctacggtgctggaggatccttctgcgcacgcgcacagcctccggccggctatttccgcgagcgcgttccatcctctaccgagcgcgcgcgaagactacggaggtcgactcgggagcgcgcacgcagctccgccccgcgtccgacccgcggatcccgcggcgtccggcccgggtggtctggatcgcggagggaatgccccggagggcggagaactgggacgaggccgaggtaggcgcggaggaggcaggcgtcgaagagtacggccctgaagaagacggcggggaggagtcgggcgccgaggagtccggcccggaagagtccggcccggaggaactgggcgccgaggaggagatggaggccgggcggccgcggcccgtgctgcgctcggtgaactcgcgcgagccctcccaggtcatcttctgcaatcgcagtccgcgcgtcgtgctgcccgtatggctcaacttcgacggcgagccgcagccctacccaacgctgccgcctggcacgggccgccgcatccacagctaccgaggtcacctttggctcttcagagatgcagggacacacgatgggcttctggttaaccaaactgaattatttgtgccatctctcaatgttgacggacagcctatttttgccaatatcacactgccagtgtatactctgaaagagcgatgcctccaggttgtccggagcctagtcaagcctgagaattacaggagactggacatcgtcaggtcgctctacgaagatctggaagaccacccaaatgtgcagaaagacctggagcggctgacacaggagcgcattgcacatcaacggatgggagattgaagatttctgttgaaacttacactgtttcatctcagcttttgatggtactgatgagtcttgatctagatacaggactggttccttccttagtttcaaagtgtctcattctcagagtaaaataggcaccattgcttaaaagaaagttaactgacttcactaggcattgtgatgtttaggggcaaacatcacaaaatgtaatttaatgcctgcccattagagaagtatttatcaggagaaggtggtggcatttttgcttcctagtaagtcaggacagcttgtatgtaaggaggtttatataagtaattcagtgggaattgcagcatatcgtttaattttaagaaggcattggcatctgcttttaatggatgtataatacatccattctacatccgtagcggttggtgacttgtctgcctcctgctttgggaagactgaggcatccgtgaggcagggacaagtctttctcctctttgagaccccagtgcctgcacatcatgagccttcagtcagggtttgtcagaggaacaaaccaggggacactttgttagaaagtgcttagaggttctgcctctatttttgttggggggtgggagaggggaccttaaaatgtgtacagtgaacaaatgtcttaaagggaatcatttttgtaggaagcattttttataattttctaagtcgtgcactttctcggtccactcttgttgaagtgctgttttattactgtttctaaactaggattgacattctacagttgtgataatagcatttttgtaacttgccatccgcacagaaaatacgagaaaatctgcatgtttgattatagtattaatggacaaataagtttttgctaaatgtgagtatttctgttcctttttgtaaatatgtgacattcctgattgatttgggtttttttgttgttgttgttttgttttgttttgtttttttgagatggagtctcactcttgtcacccaggctggagtgcagtggcgccatctcggctcactgcaacctctgcctcctgagttcacgtaatcctcctgagtagctgggattacaggtgcctgccaccacgctggccaatttttgtacttttagtagagacagtgtttcgccatgttggccaggctggtttcaaactcctgacctcaggtgatccgcccacctcagcctcccaaaatggtgggattacaggtgtgtgggccaccgtgcctggctgattcagcattttttatcaggcaggaccaggtggcacttccacctccagcctctggtcctaccaatggattcatggagtagcctggactgtttcatagttttctaaatgtacaaattcttataggctagacttagattcattaactcaaattcaatgcttctatcagactcagttttttgtaactaatagatttttttttccacttttgttctactccttccctaatagctttttaaaaaaatctccccagtagagaaacatttggaaaagacagaaaactaaaaaggaagaaaaaagatccctattagatacacttcttaaatacaatcacattaacattttgagctatttccttccagcctttttagggcagattttggttggtttttacatagttgagattgtactgttcatacagttttataccctttttcatttaactttataacttaaatattgctctatgttagtataagcttttcacaaacattagtatagtctcccttttataattaatgtttgtgggtatttcttggcatgcatctttaattccttatcctagcctttgggcacaattcctgtgctcaaaaatgagagtgacggctggcatggtggctcccgcctgtaatcccagtactttgggaagccaaggtaagaggattgcttgagcccagaacttcaagatgagcctgggctcatagtgagaacccatctatacaaaaaatttttaaaaattagcatggcggcacacatctgtaatcctagctacttggcaggctgaggtgagaagatcattggagtttaggaattggaggcggcagtgagccatgagtatgccactgcactccagcctgggggacagagcaagaccctgcctcaaaaaaaaaaaaaaacaaaantcaggccgggnatggtggntcacgcctgtaatcccagcactttgggnggtcgaggtgggcagatcacctgaggtcaggagttcgagaccagcctggccaacatggtaaaaccccatttctactaaaaaatacaagaattagctgggtgtggtggcgcatgcctgtaatcctagctactcaggaggctgaggcaggagaatcacttgancccaggaggcgaagattgcagtgagctgatatcgcaccattgtactccagcctgtgtgacagagcaatactcttgtcncaaaaaaaaaaaaaattcaaatcagagtgaagtgaatgagacactccagttttccttctactccgaattttagctcctcctttcaacattcaacaaatagtcttttttttttttttttttttttngngatggagtctcnctctgttgcccaggctggagtgcagnggtgcgatctctgctcactacaagctctgcctcccgagttcaagtgattctcctggctcaccctcctgagctgggattacaggcgcctgccaccatgcctggctaattttgtgtttttagtggagacggggtttcaccatgttgtccaggatggtcttgatctcctgaccttgtgatccacccacctcagcctcccaaagtgctgggattacaggtgtgagccaccgcgtccagccagctttattattttttttaagctgtctttgtgtcaaaatgatagttcatgctcctcttgttaaaacctgcaggccgagcacagtggctcatgcctgtaatcccagcattttgggagaccaaggcggatggatcacctgaggtcaggagctcaagaccagcctggctaacatggtgaaacctcatctccacttaaaatacaaaaattgccggccgcggcggctcatgcctgtaatcccagcactttgggaggcctaggcgggtggatcacgaggtcaggaaatcgagaccatcctggctaacacgggtgaaaccccgtctctattaaaaaatagaaaaaattaggcgggcgtggtggtgagcgcctgtagtcccagctactcgagagcctgaggcaggagaatggcatgaacctggaaggcggagcttgcagtgagctgagatggtgccactgcactctaacctgggcgacagagtgagacaccgtctcaaaaaaaaaaacaaaaaacaaaaattatccaggtgtggcggtgggcgcctgtgaggcaggcgaatctcttgaacccgggaggcggaggttgcagtgagccaagatcacaccattgcactccagcctgggcaacaagagtgaaattccatctcaaaaagaaaccaaaaaaacaaaaaaaaaacatgccgtttgagtactgtgtttttggtgttgtccaaggaaaattaaaaacctgtagcatgaataatgtttgtttttcatttcgaatcttgtgaatgtattaaatatatcgctcttaagagacggtgaagttcctatttcaagttttttttgttttgttttgtttttaaagctgttttttaatacattaaatggtgctgagtaaaggaaataggcagggtgtgttgtgtggtgttttaactaggcgcttctctctcagagagttttgaaacctgtttacataaaggcccangatgggaaggagatccaaacataagccaccagcctcattccaagtctcttctntttccaaccctggattttttttttttatttaacattgtttcttttagctttatttttcttataaaagaaatgtatcactataaaaaattacacactacagaaaaatattaagaagaaaaacattcacatcggaaacaaagttttttcccatgaaaacagaacccaaaagggtaagtggttagtatttcaccagcaattatgttgagaataaggccaggcgaggtggctcacgcctgtaatctcagcactttgggaggccagggcaggcagatcatctgaggtcaggagtttgagaccagcctggccaacatggtgaaaccctatctctactaaaaattaaa

SEQ ID NO: 441778 - DNA, 773 bp, Homo sapiens
cccacgtgtattttcccctcaaagaaaagctgcatccttaacaccccatctgttcagtcctcatgactccagtgggccagttctgcgtagtccctgccctcgtggagaacacattcctcctggggagactgacagatgcaaagacaggaacaagccagggtcatgttggcgccggaagagccgaccgtgtgtggcgtgggaaattgacttacctgcctgctgggagatggaggggttgcggttgtgtggtttcagttaaggagcacttcccggagaaggaagagagcaggatggagtaggaactagccaaccctaggtaagaggttctagacatgcgtgcgttgagacctggagtcttgggagaggatgcttaaaaggtgattttacccctaggaatatgggggcactgaaatttttttttttttttgagacgggagtcttgctctgcaagctggagtgcagtggcccacgctagaatgcagtggcgcgattgcggctcattgcaacatctgccacctggggtcaagtggttctcttgcctcagcctcccgaggagcggggattacaggcgtgcgccaccactcctggctaattttttttttagtagagacgggggtttcgtcattttggccaggctggtctcgaactcctgacctcagatgatccacccgccttggcctcccaaagtgctgagattacaggtgtaagccactgcgcccagccctttgaaagtttttcagtatttatgtatatatatttttgagttggagtct

SEQ ID NO: 441779 - DNA, 4351 bp, Homo sapiens
  misc_feature (19)..(19): n is a, c, g, or t
  misc_feature (3957)..(3957): n is a, c, g, or t
  misc_feature (4010)..(4010): n is a, c, g, or t
cctcgcctccgttacaacngcctacggtgctggaggatccttctgcgcacgcgcacagcctccggccggctatttccgcgagcgcgttccatcctctaccgagcgcgcgcgaagactacggaggtcgactcgggagcgcgcacgcagctccgccccgcgtccgacccgcggatcccgcggcgtccggcccgggtggtctggatcgcggagggaatgccccggagggcggagaactgggacgaggccgaggtaggcgcggaggaggcaggcgtcgaagagtacggccctgaagaagacggcggggaggagtcgggcgccgaggagtccggcccggaagagtccggcccggaggaactgggcgccgaggaggagatggaggccgggcggccgcggcccgtgctgcgctcggtgaactcgcgcgagccctcccaggtcatcttctgcaatcgcagtccgcgcgtcgtgctgcccgtatggctcaacttcgacggcgagccgcagccctacccaacgctgccgcctggcacgggccgccgcatccacagctaccgaggtcacctttggctcttcagagatgcagggacacacgatgggcttctggttaaccaaactgaattatttgtgccatctctcaatgttgacggacagcctatttttgccaatatcacactgccagtgtatactctgaaagagcgatgcctccaggttgtccggagcctagtcaagcctgagaattacaggagactggacatcgtcaggtcgctctacgaagatctggaagaccacccaaatgtgcagaaagacctggagcggctgacacaggagcgcattgcacatcaacggatgggagattgaagatttctgttgaaacttacactgtttcatctcagcttttgatggtactgatgagtcttgatctagatacaggactggttccttccttagtttcaaagtgtctcattctcagagtaaaataggcaccattgcttaaaagaaagttaactgacttcactaggcattgtgatgtttaggggcaaacatcacaaaatgtaatttaatgcctgcccattagagaagtatttatcaggagaaggtggtggcatttttgcttcctagtaagtcaggacagcttgtatgtaaggaggtttatataagtaattcagtgggaattgcagcatatcgtttaattttaagaaggcattggcatctgcttttaatggatgtataatacatccattctacatccgtagcggttggtgacttgtctgcctcctgctttgggaagactgaggcatccgtgaggcagggacaagtctttctcctctttgagaccccagtgcctgcacatcatgagccttcagtcagggtttgtcagaggaacaaaccaggggacactttgttagaaagtgcttagaggttctgcctctatttttgttggggggtgggagaggggaccttaaaatgtgtacagtgaacaaatgtcttaaagggaatcatttttgtaggaagcattttttataattttctaagtcgtgcactttctcggtccactcttgttgaagtgctgttttattactgtttctaaactaggattgacattctacagttgtgataatagcatttttgtaacttgccatccgcacagaaaatacgagaaaatctgcatgtttgattatagtattaatggacaaataagtttttgctaaatgtgagtatttctgttcctttttgtaaatatgtgacattcctgattgatttgggtttttttgttgttgttgttttgttttgttttgtttttttgagatggagtctcactcttgtcacccaggctggagtgcagtggcgccatctcggctcactgcaacctctgcctcctgagttcacgtaatcctcctgagtagctgggattacaggtgcctgccaccacgctggccaatttttgtacttttagtagagacagtgtttcgccatgttggccaggctggtttcaaactcctgacctcaggtgatccgcccacctcagcctcccaaaatggtgggattacaggtgtgtgggccaccgtgcctggctgattcagcattttttatcaggcaggaccaggtggcacttccacctccagcctctggtcctaccaatggattcatggagtagcctggactgtttcatagttttctaaatgtacaaattcttataggctagacttagattcattaactcaaattcaatgcttctatcagactcagttttttgtaactaatagatttttttttccacttttgttctactccttccctaatagctttttaaaaaaatctccccagtagagaaacatttggaaaagacagaaaactaaaaaggaagaaaaaagatccctattagatacacttcttaaatacaatcacattaacattttgagctatttccttccagcctttttagggcagattttggttggtttttacatagttgagattgtactgttcatacagttttataccctttttcatttaactttataacttaaatattgctctatgttagtataagcttttcacaaacattagtatagtctcccttttataattaatgtttgtgggtatttcttggcatgcatctttaattccttatcctagcctttgggcacaattcctgtgctcaaaaatgagagtgacggctggcatggtggctcccgcctgtaatcccagtactttgggaagccaaggtaagaggattgcttgagcccagaacttcaagatgagcctgggctcatagtgagaacccatctatacaaaaaatttttaaaaattagcatggcggcacacatctgtaatcctagctacttggcaggctgaggtgagaagatcattggagtttaggaattggaggcggcagtgagccatgagtatgccactgcactccagcctgggggacagagcaagaccctgcctcaaaaaaaaaaaaaaacaaattacaggtgtgagccaccgcgtccagccagctttattattttttttaagctgtctttgtgtcaaaatgatagttcatgctcctcttgttaaaacctgcaggccgagcacagtggctcatgcctgtaatcccagcattttgggagaccaaggcggatggatcacctgaggtcaggagctcaagaccagcctggctaacatggtgaaacctcatctccacttaaaatacaaaaattgccggccgcggcggctcatgcctgtaatcccagcactttgggaggcctaggcgggtggatcacgaggtcaggaaatcgagaccatcctggctaacacgggtgaaaccccgtctctattaaaaaatagaaaaaattaggcgggcgtggtggtgagcgcctgtagtcccagctactcgagagcctgaggcaggagaatggcatgaacctggaaggcggagcttgcagtgagctgagatggtgccactgcactctaacctgggcgacagagtgagacaccgtctcaaaaaaaaaaacaaaaaacaaaaattatccaggtgtggcggtgggcgcctgtgaggcaggcgaatctcttgaacccgggaggcggaggttgcagtgagccaagatcacaccattgcactccagcctgggcaacaagagtgaaattccatctcaaaaagaaaccaaaaaaacaaaaaaaaaacatgccgtttgagtactgtgtttttggtgttgtccaaggaaaattaaaaacctgtagcatgaataatgtttgtttttcatttcgaatcttgtgaatgtattaaatatatcgctcttaagagacggtgaagttcctatttcaagttttttttgttttgttttgtttttaaagctgttttttaatacattaaatggtgctgagtaaaggaaataggcagggtgtgttgtgtggtgttttaactaggcgcttctctctcagagagttttgaaacctgtttacataaaggcccangatgggaaggagatccaaacataagccaccagcctcattccaagtctcttctntttccaaccctggattttttttttttatttaacattgtttcttttagctttatttttcttataaaagaaatgtatcactataaaaaattacacactacagaaaaatattaagaagaaaaacattcacatcggaaacaaagttttttcccatgaaaacagaacccaaaagggtaagtggttagtatttcaccagcaattatgttgagaataaggccaggcgaggtggctcacgcctgtaatctcagcactttgggaggccagggcaggcagatcatctgaggtcaggagtttgagaccagcctggccaacatggtgaaaccctatctctactaaaaattaaa

SEQ ID NO: 441780 - DNA, 4200 bp, Homo sapiens
  misc_feature (19)..(19): n is a, c, g, or t
  misc_feature (3806)..(3806): n is a, c, g, or t
  misc_feature (3859)..(3859): n is a, c, g, or t
cctcgcctccgttacaacngcctacggtgctggaggatccttctgcgcacgcgcacagcctccggccggctatttccgcgagcgcgttccatcctctaccgagcgcgcgcgaagactacggaggtcgactcgggagcgcgcacgcagctccgccccgcgtccgacccgcggatcccgcggcgtccggcccgggtggtctggatcgcggagggaatgccccggagggcggagaactgggacgaggccgaggtaggcgcggaggaggcaggcgtcgaagagtacggccctgaagaagacggcggggaggagtcgggcgccgaggagtccggcccggaagagtccggcccggaggaactgggcgccgaggaggagatggaggccgggcggccgcggcccgtgctgcgctcggtgaactcgcgcgagccctcccaggtcatcttctgcaatcgcagtccgcgcgtcgtgctgcccgtatggctcaacttcgacggcgagccgcagccctacccaacgctgccgcctggcacgggccgccgcatccacagctaccgaggtcacctttggctcttcagagatgcagggacacacgatgggcttctggttaaccaaactgaattatttgtgccatctctcaatgttgacggacagcctatttttgccaatatcacactgccagtgtatactctgaaagagcgatgcctccaggttgtccggagcctagtcaagcctgagaattacaggagactggacatcgtcaggtcgctctacgaagatctggaagaccacccaaatgtgcagaaagacctggagcggctgacacaggagcgcattgcacatcaacggatgggagattgaagatttctgttgaaacttacactgtttcatctcagcttttgatggtactgatgagtcttgatctagatacaggactggttccttccttagtttcaaagtgtctcattctcagagtaaaataggcaccattgcttaaaagaaagttaactgacttcactaggcattgtgatgtttaggggcaaacatcacaaaatgtaatttaatgcctgcccattagagaagtatttatcaggagaaggtggtggcatttttgcttcctagtaagtcaggacagcttgtatgtaaggaggtttatataagtaattcagtgggaattgcagcatatcgtttaattttaagaaggcattggcatctgcttttaatggatgtataatacatccattctacatccgtagcggttggtgacttgtctgcctcctgctttgggaagactgaggcatccgtgaggcagggacaagtctttctcctctttgagaccccagtgcctgcacatcatgagccttcagtcagggtttgtcagaggaacaaaccaggggacactttgttagaaagtgcttagaggttctgcctctatttttgttggggggtgggagaggggaccttaaaatgtgtacagtgaacaaatgtcttaaagggaatcatttttgtaggaagcattttttataattttctaagtcgtgcactttctcggtccactcttgttgaagtgctgttttattactgtttctaaactaggattgacattctacagttgtgataatagcatttttgtaacttgccatccgcacagaaaatacgagaaaatctgcatgtttgattatagtattaatggacaaataagtttttgctaaatgtgagtatttctgttcctttttgtaaatatgtgacattcctgattgatttgggtttttttgttgttgttgttttgttttgttttgtttttttgagatggagtctcactcttgtcacccaggctggagtgcagtggcgccatctcggctcactgcaacctctgcctcctgagttcacgtaatcctcctgagtagctgggattacaggtgcctgccaccacgctggccaatttttgtacttttagtagagacagtgtttcgccatgttggccaggctggtttcaaactcctgacctcaggtgatccgcccacctcagcctcccaaaatggtgggattacaggtgtgtgggccaccgtgcctggctgattcagcattttttatcaggcaggaccaggtggcacttccacctccagcctctggtcctaccaatggattcatggagtagcctggactgtttcatagttttctaaatgtacaaattcttataggctagacttagattcattaactcaaattcaatgcttctatcagactcagttttttgtaactaatagatttttttttccacttttgttctactccttccctaatagctttttaaaaaaatctccccagtagagaaacatttggaaaagacagaaaactaaaaaggaagaaaaaagatccctattagatacacttcttaaatacaatcacattaacattttgagctatttccttccagcctttttagggcagattttggttggtttttacatagttgagattgtactgttcatacagttttataccctttttcatttaactttataacttaaatattgctctatgttagtataagcttttcacaaacattagtatagtctcccttttataattaatgtttgtgggtatttcttggcatgcatctttaattccttatcctagcctttgggcacaattcctgtgctcaaaaatgagagtgacggctggcatggtggctcccgcctgtaatcccagtactttgggaagccaaggtaagaggattgcttgagcccagaacttcaagatgagcctgggctcatagtgagaacccatctatacaaaaaatttttaaaaattagcatggcggcacacatctgtaatcctagctacttggcaggctgaggtgagaagatcattggagtttaggaattggaggcggcagtgagccatgagtatgccactgcactccagcctgggggacagagcaagaccctgcctcaaaaaaaaaaaaaaacaaattacaggtgtgagccaccgcgtccagccagctttattattttttttaagctgtctttgtgtcaaaatgatagttcatgctcctcttgttaaaacctgcaggccgagcacagtggctcatgcctgtaatcccagcattttgggagaccaaggcggatggatcacctgaggtcaggagctcaagaccagcctggctaacatggtgaaacctcatctccacttaaaatacaaaaattgccggccgcggcggctcatgcctgtaatcccagcactttgggaggcctaggcgggtggatcacgaggtcaggaaatcgagaccatcctggctaacacgggtgaaaccccgtctctattaaaaaatagaaaaaattaggcgggcgtggtggtgagcgcctgtagtcccagctactcgagagcctgaggcaggagaatggcatgaacctggaaggcggagcttgcagtgagctgagatggtgccactgcactccagcctgggcaacaagagtgaaattccatctcaaaaagaaaccaaaaaaacaaaaaaaaaacatgccgtttgagtactgtgtttttggtgttgtccaaggaaaattaaaaacctgtagcatgaataatgtttgtttttcatttcgaatcttgtgaatgtattaaatatatcgctcttaagagacggtgaagttcctatttcaagttttttttgttttgttttgtttttaaagctgttttttaatacattaaatggtgctgagtaaaggaaataggcagggtgtgttgtgtggtgttttaactaggcgcttctctctcagagagttttgaaacctgtttacataaaggcccangatgggaaggagatccaaacataagccaccagcctcattccaagtctcttctntttccaaccctggattttttttttttatttaacattgtttcttttagctttatttttcttataaaagaaatgtatcactataaaaaattacacactacagaaaaatattaagaagaaaaacattcacatcggaaacaaagttttttcccatgaaaacagaacccaaaagggtaagtggttagtatttcaccagcaattatgttgagaataaggccaggcgaggtggctcacgcctgtaatctcagcactttgggaggccagggcaggcagatcatctgaggtcaggagtttgagaccagcctggccaacatggtgaaaccctatctctactaaaaattaaa

SEQ ID NO: 441781 - DNA, 4705 bp, Homo sapiens
  misc_feature (19)..(19): n is a, c, g, or t
  misc_feature (2971)..(2971): n is a, c, g, or t
  misc_feature (2982)..(2982): n is a, c, g, or t
  misc_feature (2990)..(2990): n is a, c, g, or t
  misc_feature (3018)..(3018): n is a, c, g, or t
  misc_feature (3179)..(3179): n is a, c, g, or t
  misc_feature (3257)..(3257): n is a, c, g, or t
  misc_feature (3382)..(3382): n is a, c, g, or t
  misc_feature (3384)..(3384): n is a, c, g, or t
  misc_feature (3396)..(3396): n is a, c, g, or t
  misc_feature (3422)..(3422): n is a, c, g, or t
  misc_feature (4311)..(4311): n is a, c, g, or t
  misc_feature (4364)..(4364): n is a, c, g, or t
cctcgcctccgttacaacngcctacggtgctggaggatccttctgcgcacgcgcacagcctccggccggctatttccgcgagcgcgttccatcctctaccgagcgcgcgcgaagactacggaggtcgactcgggagcgcgcacgcagctccgccccgcgtccgacccgcggatcccgcggcgtccggcccgggtggtctggatcgcggagggaatgccccggagggcggagaactgggacgaggccgaggtaggcgcggaggaggcaggcgtcgaagagtacggccctgaagaagacggcggggaggagtcgggcgccgaggagtccggcccggaagagtccggcccggaggaactgggcgccgaggaggagatggaggccgggcggccgcggcccgtgctgcgctcggtgaactcgcgcgagccctcccaggtcatcttctgcaatcgcagtccgcgcgtcgtgctgcccgtatggctcaacttcgacggcgagccgcagccctacccaacgctgccgcctggcacgggccgccgcatccacagctaccgaggtcacctttggctcttcagagatgcagggacacacgatgggcttctggttaaccaaactgaattatttgtgccatctctcaatgttgacggacagcctatttttgccaatatcacactgccagtgtatactctgaaagagcgatgcctccaggttgtccggagcctagtcaagcctgagaattacaggagactggacatcgtcaggtcgctctacgaagatctggaagaccacccaaatgtgcagaaagacctggagcggctgacacaggagcgcattgcacatcaacggatgggagattgaagatttctgttgaaacttacactgtttcatctcagcttttgatggtactgatgagtcttgatctagatacaggactggttccttccttagtttcaaagtgtctcattctcagagtaaaataggcaccattgcttaaaagaaagttaactgacttcactaggcattgtgatgtttaggggcaaacatcacaaaatgtaatttaatgcctgcccattagagaagtatttatcaggagaaggtggtggcatttttgcttcctagtaagtcaggacagcttgtatgtaaggaggtttatataagtaattcagtgggaattgcagcatatcgtttaattttaagaaggcattggcatctgcttttaatggatgtataatacatccattctacatccgtagcggttggtgacttgtctgcctcctgctttgggaagactgaggcatccgtgaggcagggacaagtctttctcctctttgagaccccagtgcctgcacatcatgagccttcagtcagggtttgtcagaggaacaaaccaggggacactttgttagaaagtgcttagaggttctgcctctatttttgttggggggtgggagaggggaccttaaaatgtgtacagtgaacaaatgtcttaaagggaatcatttttgtaggaagcattttttataattttctaagtcgtgcactttctcggtccactcttgttgaagtgctgttttattactgtttctaaactaggattgacattctacagttgtgataatagcatttttgtaacttgccatccgcacagaaaatacgagaaaatctgcatgtttgattatagtattaatggacaaataagtttttgctaaatgtgagtatttctgttcctttttgtaaatatgtgacattcctgattgatttgggtttttttgttgttgttgttttgttttgttttgtttttttgagatggagtctcactcttgtcacccaggctggagtgcagtggcgccatctcggctcactgcaacctctgcctcctgagttcacgtaatcctcctgagtagctgggattacaggtgcctgccaccacgctggccaatttttgtacttttagtagagacagtgtttcgccatgttggccaggctggtttcaaactcctgacctcaggtgatccgcccacctcagcctcccaaaatggtgggattacaggtgtgtgggccaccgtgcctggctgattcagcattttttatcaggcaggaccaggtggcacttccacctccagcctctggtcctaccaatggattcatggagtagcctggactgtttcatagttttctaaatgtacaaattcttataggctagacttagattcattaactcaaattcaatgcttctatcagactcagttttttgtaactaatagatttttttttccacttttgttctactccttccctaatagctttttaaaaaaatctccccagtagagaaacatttggaaaagacagaaaactaaaaaggaagaaaaaagatccctattagatacacttcttaaatacaatcacattaacattttgagctatttccttccagcctttttagggcagattttggttggtttttacatagttgagattgtactgttcatacagttttataccctttttcatttaactttataacttaaatattgctctatgttagtataagcttttcacaaacattagtatagtctcccttttataattaatgtttgtgggtatttcttggcatgcatctttaattccttatcctagcctttgggcacaattcctgtgctcaaaaatgagagtgacggctggcatggtggctcccgcctgtaatcccagtactttgggaagccaaggtaagaggattgcttgagcccagaacttcaagatgagcctgggctcatagtgagaacccatctatacaaaaaatttttaaaaattagcatggcggcacacatctgtaatcctagctacttggcaggctgaggtgagaagatcattggagtttaggaattggaggcggcagtgagccatgagtatgccactgcactccagcctgggggacagagcaagaccctgcctcaaaaaaaaaaaaaaacaaaantcaggccgggnatggtggntcacgcctgtaatcccagcactttgggnggtcgaggtgggcagatcacctgaggtcaggagttcgagaccagcctggccaacatggtaaaaccccatttctactaaaaaatacaagaattagctgggtgtggtggcgcatgcctgtaatcctagctactcaggaggctgaggcaggagaatcacttgancccaggaggcgaagattgcagtgagctgatatcgcaccattgtactccagcctgtgtgacagagcaatactcttgtcncaaaaaaaaaaaaaattcaaatcagagtgaagtgaatgagacactccagttttccttctactccgaattttagctcctcctttcaacattcaacaaatagtcttttttttttttttttttttttngngatggagtctcnctctgttgcccaggctggagtgcagnggtgcgatctctgctcactacaagctctgcctcccgagttcaagtgattctcctggctcaccctcctgagctgggattacaggcgcctgccaccatgcctggctaattttgtgtttttagtggagacggggtttcaccatgttgtccaggatggtcttgatctcctgaccttgtgatccacccacctcagcctcccaaagtgctgggattacaggtgtgagccaccgcgtccagccagctttattattttttttaagctgtctttgtgtcaaaatgatagttcatgctcctcttgttaaaacctgcaggccgagcacagtggctcatgcctgtaatcccagcattttgggagaccaaggcggatggatcacgaggtcaggaaatcgagaccatcctggctaacacgggtgaaaccccgtctctattaaaaaatagaaaaaattaggcgggcgtggtggtgagcgcctgtgaggcaggcgaatctcttgaacccgggaggcggaggttgcagtgagccaagatcacaccattgcactccagcctgggcaacaagagtgaaattccatctcaaaaagaaaccaaaaaaacaaaaaaaaaacatgccgtttgagtactgtgtttttggtgttgtccaaggaaaattaaaaacctgtagcatgaataatgtttgtttttcatttcgaatcttgtgaatgtattaaatatatcgctcttaagagacggtgaagttcctatttcaagttttttttgttttgttttgtttttaaagctgttttttaatacattaaatggtgctgagtaaaggaaataggcagggtgtgttgtgtggtgttttaactaggcgcttctctctcagagagttttgaaacctgtttacataaaggcccangatgggaaggagatccaaacataagccaccagcctcattccaagtctcttctntttccaaccctggattttttttttttatttaacattgtttcttttagctttatttttcttataaaagaaatgtatcactataaaaaattacacactacagaaaaatattaagaagaaaaacattcacatcggaaacaaagttttttcccatgaaaacagaacccaaaagggtaagtggttagtatttcaccagcaattatgttgagaataaggccaggcgaggtggctcacgcctgtaatctcagcactttgggaggccagggcaggcagatcatctgaggtcaggagtttgagaccagcctggccaacatggtgaaaccctatctctactaaaaattaaa

SEQ ID NO: 441782 - DNA, 3029 bp, Homo sapiens
  misc_feature (19)..(19): n is a, c, g, or t
  misc_feature (2979)..(2979): n is a, c, g, or t
  misc_feature (2981)..(2981): n is a, c, g, or t
cctcgcctccgttacaacngcctacggtgctggaggatccttctgcgcacgcgcacagcctccggccggctatttccgcgagcgcgttccatcctctaccgagcgcgcgcgaagactacggaggtcgactcgggagcgcgcacgcagctccgccccgcgtccgacccgcggatcccgcggcgtccggcccgggtggtctggatcgcggagggaatgccccggagggcggagaactgggacgaggccgaggtaggcgcggaggaggcaggcgtcgaagagtacggccctgaagaagacggcggggaggagtcgggcgccgaggagtccggcccggaagagtccggcccggaggaactgggcgccgaggaggagatggaggccgggcggccgcggcccgtgctgcgctcggtgaactcgcgcgagccctcccaggtcatcttctgcaatcgcagtccgcgcgtcgtgctgcccgtatggctcaacttcgacggcgagccgcagccctacccaacgctgccgcctggcacgggccgccgcatccacagctaccgaggtcacctttggctcttcagagatgcagggacacacgatgggcttctggttaaccaaactgaattatttgtgccatctctcaatgttgacggacagcctatttttgccaatatcacactgccagtgtatactctgaaagagcgatgcctccaggttgtccggagcctagtcaagcctgagaattacaggagactggacatcgtcaggtcgctctacgaagatctggaagaccacccaaatgtgcagaaagacctggagcggctgacacaggagcgcattgcacatcaacggatgggagattgaagatttctgttgaaacttacactgtttcatctcagcttttgatggtactgatgagtcttgatctagatacaggactggttccttccttagtttcaaagtgtctcattctcagagtaaaataggcaccattgcttaaaagaaagttaactgacttcactaggcattgtgatgtttaggggcaaacatcacaaaatgtaatttaatgcctgcccattagagaagtatttatcaggagaaggtggtggcatttttgcttcctagtaagtcaggacagcttgtatgtaaggaggtttatataagtaattcagtgggaattgcagcatatcgtttaattttaagaaggcattggcatctgcttttaatggatgtataatacatccattctacatccgtagcggttggtgacttgtctgcctcctgctttgggaagactgaggcatccgtgaggcagggacaagtctttctcctctttgagaccccagtgcctgcacatcatgagccttcagtcagggtttgtcagaggaacaaaccaggggacactttgttagaaagtgcttagaggttctgcctctatttttgttggggggtgggagaggggaccttaaaatgtgtacagtgaacaaatgtcttaaagggaatcatttttgtaggaagcattttttataattttctaagtcgtgcactttctcggtccactcttgttgaagtgctgttttattactgtttctaaactaggattgacattctacagttgtgataatagcatttttgtaacttgccatccgcacagaaaatacgagaaaatctgcatgtttgattatagtattaatggacaaataagtttttgctaaatgtgagtatttctgttcctttttgtaaatatgtgacattcctgattgatttgggtttttttgttgttgttgttttgttttgttttgtttttttgagatggagtctcactcttgtcacccaggctggagtgcagtggcgccatctcggctcactgcaacctctgcctcctgagttcacgtaatcctcctgagtagctgggattacaggtgcctgccaccacgctggccaatttttgtacttttagtagagacagtgtttcgccatgttggccaggctggtttcaaactcctgacctcaggtgatccgcccacctcagcctcccaaaatggtgggattacaggtgtgtgggccaccgtgcctggctgattcagcattttttatcaggcaggaccaggtggcacttccacctccagcctctggtcctaccaatggattcatggagtagcctggactgtttcatagttttctaaatgtacaaattcttataggctagacttagattcattaactcaaattcaatgcttctatcagactcagttttttgtaactaatagatttttttttccacttttgttctactccttccctaatagctttttaaaaaaatctccccagtagagaaacatttggaaaagacagaaaactaaaaaggaagaaaaaagatccctattagatacacttcttaaatacaatcacattaacattttgagctatttccttccagcctttttagggcagattttggttggtttttacatagttgagattgtactgttcatacagttttataccctttttcatttaactttataacttaaatattgctctatgttagtataagcttttcacaaacattagtatagtctcccttttataattaatgtttgtgggtatttcttggcatgcatctttaattccttatcctagcctttgggcacaattcctgtgctcaaaaatgagagtgacggctggcatggtggctcccgcctgtaatcccagtactttgggaagccaaggtaagaggattgcttgagcccagaacttcaagatgagcctgggctcatagtgagaacccatctatacaaaaaatttttaaaaattagcatggcggcacacatctgtaatcctagctacttggcaggctgaggtgagaagatcattggagtttaggaattggaggcggcagtgagccatgagtatgccactgcactccagcctgggggacagagcaagaccctgcctcaaaaaaaaaaaaaaacaacgatatcccgngnttccgaccgtaccagcctgcttaataaccgactttctatattcacatg

SEQ ID NO: 441783 - DNA, 4283 bp, Homo sapiens
  misc_feature (19)..(19): n is a, c, g, or t
  misc_feature (3889)..(3889): n is a, c, g, or t
  misc_feature (3942)..(3942): n is a, c, g, or t
cctcgcctccgttacaacngcctacggtgctggaggatccttctgcgcacgcgcacagcctccggccggctatttccgcgagcgcgttccatcctctaccgagcgcgcgcgaagactacggaggtcgactcgggagcgcgcacgcagctccgccccgcgtccgacccgcggatcccgcggcgtccggcccgggtggtctggatcgcggagggaatgccccggagggcggagaactgggacgaggccgaggtaggcgcggaggaggcaggcgtcgaagagtacggccctgaagaagacggcggggaggagtcgggcgccgaggagtccggcccggaagagtccggcccggaggaactgggcgccgaggaggagatggaggccgggcggccgcggcccgtgctgcgctcggtgaactcgcgcgagccctcccaggtcatcttctgcaatcgcagtccgcgcgtcgtgctgcccgtatggctcaacttcgacggcgagccgcagccctacccaacgctgccgcctggcacgggccgccgcatccacagctaccgaggtcacctttggctcttcagagatgcagggacacacgatgggcttctggttaaccaaactgaattatttgtgccatctctcaatgttgacggacagcctatttttgccaatatcacactgccagtgtatactctgaaagagcgatgcctccaggttgtccggagcctagtcaagcctgagaattacaggagactggacatcgtcaggtcgctctacgaagatctggaagaccacccaaatgtgcagaaagacctggagcggctgacacaggagcgcattgcacatcaacggatgggagattgaagatttctgttgaaacttacactgtttcatctcagcttttgatggtactgatgagtcttgatctagatacaggactggttccttccttagtttcaaagtgtctcattctcagagtaaaataggcaccattgcttaaaagaaagttaactgacttcactaggcattgtgatgtttaggggcaaacatcacaaaatgtaatttaatgcctgcccattagagaagtatttatcaggagaaggtggtggcatttttgcttcctagtaagtcaggacagcttgtatgtaaggaggtttatataagtaattcagtgggaattgcagcatatcgtttaattttaagaaggcattggcatctgcttttaatggatgtataatacatccattctacatccgtagcggttggtgacttgtctgcctcctgctttgggaagactgaggcatccgtgaggcagggacaagtctttctcctctttgagaccccagtgcctgcacatcatgagccttcagtcagggtttgtcagaggaacaaaccaggggacactttgttagaaagtgcttagaggttctgcctctatttttgttggggggtgggagaggggaccttaaaatgtgtacagtgaacaaatgtcttaaagggaatcatttttgtaggaagcattttttataattttctaagtcgtgcactttctcggtccactcttgttgaagtgctgttttattactgtttctaaactaggattgacattctacagttgtgataatagcatttttgtaacttgccatccgcacagaaaatacgagaaaatctgcatgtttgattatagtattaatggacaaataagtttttgctaaatgtgagtatttctgttcctttttgtaaatatgtgacattcctgattgatttgggtttttttgttgttgttgttttgttttgttttgtttttttgagatggagtctcactcttgtcacccaggctggagtgcagtggcgccatctcggctcactgcaacctctgcctcctgagttcacgtaatcctcctgagtagctgggattacaggtgcctgccaccacgctggccaatttttgtacttttagtagagacagtgtttcgccatgttggccaggctggtttcaaactcctgacctcaggtgatccgcccacctcagcctcccaaaatggtgggattacaggtgtgtgggccaccgtgcctggctgattcagcattttttatcaggcaggaccaggtggcacttccacctccagcctctggtcctaccaatggattcatggagtagcctggactgtttcatagttttctaaatgtacaaattcttataggctagacttagattcattaactcaaattcaatgcttctatcagactcagttttttgtaactaatagatttttttttccacttttgttctactccttccctaatagctttttaaaaaaatctccccagtagagaaacatttggaaaagacagaaaatatttccttccagcctttttagggcagattttggttggtttttacatagttgagattgtactgttcatacagttttataccctttttcatttaactttataacttaaatattgctctatgttagtataagcttttcacaaacattagtatagtctcccttttataattaatgtttgtgggtatttcttggcatgcatctttaattccttatcctagcctttgggcacaattcctgtgctcaaaaatgagagtgacggctggcatggtggctcccgcctgtaatcccagtactttgggaagccaaggtaagaggattgcttgagcccagaacttcaagatgagcctgggctcatagtgagaacccatctatacaaaaaatttttaaaaattagcatggcggcacacatctgtaatcctagctacttggcaggctgaggtgagaagatcattggagtttaggaattggaggcggcagtgagccatgagtatgccactgcactccagcctgggggacagagcaagaccctgcctcaaaaaaaaaaaaaaacaaattacaggtgtgagccaccgcgtccagccagctttattattttttttaagctgtctttgtgtcaaaatgatagttcatgctcctcttgttaaaacctgcaggccgagcacagtggctcatgcctgtaatcccagcattttgggagaccaaggcggatggatcacctgaggtcaggagctcaagaccagcctggctaacatggtgaaacctcatctccacttaaaatacaaaaattgccggccgcggcggctcatgcctgtaatcccagcactttgggaggcctaggcgggtggatcacgaggtcaggaaatcgagaccatcctggctaacacgggtgaaaccccgtctctattaaaaaatagaaaaaattaggcgggcgtggtggtgagcgcctgtagtcccagctactcgagagcctgaggcaggagaatggcatgaacctggaaggcggagcttgcagtgagctgagatggtgccactgcactctaacctgggcgacagagtgagacaccgtctcaaaaaaaaaaacaaaaaacaaaaattatccaggtgtggcggtgggcgcctgtgaggcaggcgaatctcttgaacccgggaggcggaggttgcagtgagccaagatcacaccattgcactccagcctgggcaacaagagtgaaattccatctcaaaaagaaaccaaaaaaacaaaaaaaaaacatgccgtttgagtactgtgtttttggtgttgtccaaggaaaattaaaaacctgtagcatgaataatgtttgtttttcatttcgaatcttgtgaatgtattaaatatatcgctcttaagagacggtgaagttcctatttcaagttttttttgttttgttttgtttttaaagctgttttttaatacattaaatggtgctgagtaaaggaaataggcagggtgtgttgtgtggtgttttaactaggcgcttctctctcagagagttttgaaacctgtttacataaaggcccangatgggaaggagatccaaacataagccaccagcctcattccaagtctcttctntttccaaccctggattttttttttttatttaacattgtttcttttagctttatttttcttataaaagaaatgtatcactataaaaaattacacactacagaaaaatattaagaagaaaaacattcacatcggaaacaaagttttttcccatgaaaacagaacccaaaagggtaagtggttagtatttcaccagcaattatgttgagaataaggccaggcgaggtggctcacgcctgtaatctcagcactttgggaggccagggcaggcagatcatctgaggtcaggagtttgagaccagcctggccaacatggtgaaaccctatctctactaaaaattaaa

SEQ ID NO: 441784 - DNA, 4228 bp, Homo sapiens
  misc_feature (19)..(19): n is a, c, g, or t
  misc_feature (3834)..(3834): n is a, c, g, or t
  misc_feature (3887)..(3887): n is a, c, g, or t
cctcgcctccgttacaacngcctacggtgctggaggatccttctgcgcacgcgcacagcctccggccggctatttccgcgagcgcgttccatcctctaccgagcgcgcgcgaagactacggaggtcgactcgggagcgcgcacgcagctccgccccgcgtccgacccgcggatcccgcggcgtccggcccgggtggtctggatcgcggagggaatgccccggagggcggagaactgggacgaggccgaggtaggcgcggaggaggcaggcgtcgaagagtacggccctgaagaagacggcggggaggagtcgggcgccgaggagtccggcccggaagagtccggcccggaggaactgggcgccgaggaggagatggaggccgggcggccgcggcccgtgctgcgctcggtgaactcgcgcgagccctcccaggtcatcttctgcaatcgcagtccgcgcgtcgtgctgcccgtatggctcaacttcgacggcgagccgcagccctacccaacgctgccgcctggcacgggccgccgcatccacagctaccgagtgtatactctgaaagagcgatgcctccaggttgtccggagcctagtcaagcctgagaattacaggagactggacatcgtcaggtcgctctacgaagatctggaagaccacccaaatgtgcagaaagacctggagcggctgacacaggagcgcattgcacatcaacggatgggagattgaagatttctgttgaaacttacactgtttcatctcagcttttgatggtactgatgagtcttgatctagatacaggactggttccttccttagtttcaaagtgtctcattctcagagtaaaataggcaccattgcttaaaagaaagttaactgacttcactaggcattgtgatgtttaggggcaaacatcacaaaatgtaatttaatgcctgcccattagagaagtatttatcaggagaaggtggtggcatttttgcttcctagtaagtcaggacagcttgtatgtaaggaggtttatataagtaattcagtgggaattgcagcatatcgtttaattttaagaaggcattggcatctgcttttaatggatgtataatacatccattctacatccgtagcggttggtgacttgtctgcctcctgctttgggaagactgaggcatccgtgaggcagggacaagtctttctcctctttgagaccccagtgcctgcacatcatgagccttcagtcagggtttgtcagaggaacaaaccaggggacactttgttagaaagtgcttagaggttctgcctctatttttgttggggggtgggagaggggaccttaaaatgtgtacagtgaacaaatgtcttaaagggaatcatttttgtaggaagcattttttataattttctaagtcgtgcactttctcggtccactcttgttgaagtgctgttttattactgtttctaaactaggattgacattctacagttgtgataatagcatttttgtaacttgccatccgcacagaaaatacgagaaaatctgcatgtttgattatagtattaatggacaaataagtttttgctaaatgtgagtatttctgttcctttttgtaaatatgtgacattcctgattgatttgggtttttttgttgttgttgttttgttttgttttgtttttttgagatggagtctcactcttgtcacccaggctggagtgcagtggcgccatctcggctcactgcaacctctgcctcctgagttcacgtaatcctcctgagtagctgggattacaggtgcctgccaccacgctggccaatttttgtacttttagtagagacagtgtttcgccatgttggccaggctggtttcaaactcctgacctcaggtgatccgcccacctcagcctcccaaaatggtgggattacaggtgtgtgggccaccgtgcctggctgattcagcattttttatcaggcaggaccaggtggcacttccacctccagcctctggtcctaccaatggattcatggagtagcctggactgtttcatagttttctaaatgtacaaattcttataggctagacttagattcattaactcaaattcaatgcttctatcagactcagttttttgtaactaatagatttttttttccacttttgttctactccttccctaatagctttttaaaaaaatctccccagtagagaaacatttggaaaagacagaaaactaaaaaggaagaaaaaagatccctattagatacacttcttaaatacaatcacattaacattttgagctatttccttccagcctttttagggcagattttggttggtttttacatagttgagattgtactgttcatacagttttataccctttttcatttaactttataacttaaatattgctctatgttagtataagcttttcacaaacattagtatagtctcccttttataattaatgtttgtgggtatttcttggcatgcatctttaattccttatcctagcctttgggcacaattcctgtgctcaaaaatgagagtgacggctggcatggtggctcccgcctgtaatcccagtactttgggaagccaaggtaagaggattgcttgagcccagaacttcaagatgagcctgggctcatagtgagaacccatctatacaaaaaatttttaaaaattagcatggcggcacacatctgtaatcctagctacttggcaggctgaggtgagaagatcattggagtttaggaattggaggcggcagtgagccatgagtatgccactgcactccagcctgggggacagagcaagaccctgcctcaaaaaaaaaaaaaaacaaattacaggtgtgagccaccgcgtccagccagctttattattttttttaagctgtctttgtgtcaaaatgatagttcatgctcctcttgttaaaacctgcaggccgagcacagtggctcatgcctgtaatcccagcattttgggagaccaaggcggatggatcacctgaggtcaggagctcaagaccagcctggctaacatggtgaaacctcatctccacttaaaatacaaaaattgccggccgcggcggctcatgcctgtaatcccagcactttgggaggcctaggcgggtggatcacgaggtcaggaaatcgagaccatcctggctaacacgggtgaaaccccgtctctattaaaaaatagaaaaaattaggcgggcgtggtggtgagcgcctgtagtcccagctactcgagagcctgaggcaggagaatggcatgaacctggaaggcggagcttgcagtgagctgagatggtgccactgcactctaacctgggcgacagagtgagacaccgtctcaaaaaaaaaaacaaaaaacaaaaattatccaggtgtggcggtgggcgcctgtgaggcaggcgaatctcttgaacccgggaggcggaggttgcagtgagccaagatcacaccattgcactccagcctgggcaacaagagtgaaattccatctcaaaaagaaaccaaaaaaacaaaaaaaaaacatgccgtttgagtactgtgtttttggtgttgtccaaggaaaattaaaaacctgtagcatgaataatgtttgtttttcatttcgaatcttgtgaatgtattaaatatatcgctcttaagagacggtgaagttcctatttcaagttttttttgttttgttttgtttttaaagctgttttttaatacattaaatggtgctgagtaaaggaaataggcagggtgtgttgtgtggtgttttaactaggcgcttctctctcagagagttttgaaacctgtttacataaaggcccangatgggaaggagatccaaacataagccaccagcctcattccaagtctcttctntttccaaccctggattttttttttttatttaacattgtttcttttagctttatttttcttataaaagaaatgtatcactataaaaaattacacactacagaaaaatattaagaagaaaaacattcacatcggaaacaaagttttttcccatgaaaacagaacccaaaagggtaagtggttagtatttcaccagcaattatgttgagaataaggccaggcgaggtggctcacgcctgtaatctcagcactttgggaggccagggcaggcagatcatctgaggtcaggagtttgagaccagcctggccaacatggtgaaaccctatctctactaaaaattaaa

SEQ ID NO: 441785 - DNA, 3959 bp, Homo sapiens
  misc_feature (3565)..(3565): n is a, c, g, or t
  misc_feature (3618)..(3618): n is a, c, g, or t
cttcggcctagaattgccagtgtcgcttcatccacattcagttagttaaagcaatcacaagcccagcccatttcaaggtgaaattactacagaggcatgaacaccatgaggtgtccatagggggccatcagcataacacactgccacatacatgcactcactttttttctttaacctaaagtgagatccatcagtagtacaggtagttgttggcaaagcctcttgttcgttccttgtactgagaccctagtctgccactgaggatttggtttttgcccttccagtgtatactctgaaagagcgatgcctccaggttgtccggagcctagtcaagcctgagaattacaggagactggacatcgtcaggtcgctctacgaagatctggaagaccacccaaatgtgcagaaagacctggagcggctgacacaggagcgcattgcacatcaacggatgggagattgaagatttctgttgaaacttacactgtttcatctcagcttttgatggtactgatgagtcttgatctagatacaggactggttccttccttagtttcaaagtgtctcattctcagagtaaaataggcaccattgcttaaaagaaagttaactgacttcactaggcattgtgatgtttaggggcaaacatcacaaaatgtaatttaatgcctgcccattagagaagtatttatcaggagaaggtggtggcatttttgcttcctagtaagtcaggacagcttgtatgtaaggaggtttatataagtaattcagtgggaattgcagcatatcgtttaattttaagaaggcattggcatctgcttttaatggatgtataatacatccattctacatccgtagcggttggtgacttgtctgcctcctgctttgggaagactgaggcatccgtgaggcagggacaagtctttctcctctttgagaccccagtgcctgcacatcatgagccttcagtcagggtttgtcagaggaacaaaccaggggacactttgttagaaagtgcttagaggttctgcctctatttttgttggggggtgggagaggggaccttaaaatgtgtacagtgaacaaatgtcttaaagggaatcatttttgtaggaagcattttttataattttctaagtcgtgcactttctcggtccactcttgttgaagtgctgttttattactgtttctaaactaggattgacattctacagttgtgataatagcatttttgtaacttgccatccgcacagaaaatacgagaaaatctgcatgtttgattatagtattaatggacaaataagtttttgctaaatgtgagtatttctgttcctttttgtaaatatgtgacattcctgattgatttgggtttttttgttgttgttgttttgttttgttttgtttttttgagatggagtctcactcttgtcacccaggctggagtgcagtggcgccatctcggctcactgcaacctctgcctcctgagttcacgtaatcctcctgagtagctgggattacaggtgcctgccaccacgctggccaatttttgtacttttagtagagacagtgtttcgccatgttggccaggctggtttcaaactcctgacctcaggtgatccgcccacctcagcctcccaaaatggtgggattacaggtgtgtgggccaccgtgcctggctgattcagcattttttatcaggcaggaccaggtggcacttccacctccagcctctggtcctaccaatggattcatggagtagcctggactgtttcatagttttctaaatgtacaaattcttataggctagacttagattcattaactcaaattcaatgcttctatcagactcagttttttgtaactaatagatttttttttccacttttgttctactccttccctaatagctttttaaaaaaatctccccagtagagaaacatttggaaaagacagaaaactaaaaaggaagaaaaaagatccctattagatacacttcttaaatacaatcacattaacattttgagctatttccttccagcctttttagggcagattttggttggtttttacatagttgagattgtactgttcatacagttttataccctttttcatttaactttataacttaaatattgctctatgttagtataagcttttcacaaacattagtatagtctcccttttataattaatgtttgtgggtatttcttggcatgcatctttaattccttatcctagcctttgggcacaattcctgtgctcaaaaatgagagtgacggctggcatggtggctcccgcctgtaatcccagtactttgggaagccaaggtaagaggattgcttgagcccagaacttcaagatgagcctgggctcatagtgagaacccatctatacaaaaaatttttaaaaattagcatggcggcacacatctgtaatcctagctacttggcaggctgaggtgagaagatcattggagtttaggaattggaggcggcagtgagccatgagtatgccactgcactccagcctgggggacagagcaagaccctgcctcaaaaaaaaaaaaaaacaaattacaggtgtgagccaccgcgtccagccagctttattattttttttaagctgtctttgtgtcaaaatgatagttcatgctcctcttgttaaaacctgcaggccgagcacagtggctcatgcctgtaatcccagcattttgggagaccaaggcggatggatcacctgaggtcaggagctcaagaccagcctggctaacatggtgaaacctcatctccacttaaaatacaaaaattgccggccgcggcggctcatgcctgtaatcccagcactttgggaggcctaggcgggtggatcacgaggtcaggaaatcgagaccatcctggctaacacgggtgaaaccccgtctctattaaaaaatagaaaaaattaggcgggcgtggtggtgagcgcctgtagtcccagctactcgagagcctgaggcaggagaatggcatgaacctggaaggcggagcttgcagtgagctgagatggtgccactgcactctaacctgggcgacagagtgagacaccgtctcaaaaaaaaaaacaaaaaacaaaaattatccaggtgtggcggtgggcgcctgtgaggcaggcgaatctcttgaacccgggaggcggaggttgcagtgagccaagatcacaccattgcactccagcctgggcaacaagagtgaaattccatctcaaaaagaaaccaaaaaaacaaaaaaaaaacatgccgtttgagtactgtgtttttggtgttgtccaaggaaaattaaaaacctgtagcatgaataatgtttgtttttcatttcgaatcttgtgaatgtattaaatatatcgctcttaagagacggtgaagttcctatttcaagttttttttgttttgttttgtttttaaagctgttttttaatacattaaatggtgctgagtaaaggaaataggcagggtgtgttgtgtggtgttttaactaggcgcttctctctcagagagttttgaaacctgtttacataaaggcccangatgggaaggagatccaaacataagccaccagcctcattccaagtctcttctntttccaaccctggattttttttttttatttaacattgtttcttttagctttatttttcttataaaagaaatgtatcactataaaaaattacacactacagaaaaatattaagaagaaaaacattcacatcggaaacaaagttttttcccatgaaaacagaacccaaaagggtaagtggttagtatttcaccagcaattatgttgagaataaggccaggcgaggtggctcacgcctgtaatctcagcactttgggaggccagggcaggcagatcatctgaggtcaggagtttgagaccagcctggccaacatggtgaaaccctatctctactaaaaattaaa

SEQ ID NO: 441786 - DNA, 2526 bp, Homo sapiens
  misc_feature (19)..(19): n is a, c, g, or t
cctcgcctccgttacaacngcctacggtgctggaggatccttctgcgcacgcgcacagcctccggccggctatttccgcgagcgcgttccatcctctaccgagcgcgcgcgaagactacggaggtcgactcgggagcgcgcacgcagctccgccccgcgtccgacccgcggatcccgcggcgtccggcccgggtggtctggatcgcggagggaatgccccggagggcggagaactgggacgaggccgaggtaggcgcggaggaggcaggcgtcgaagagtacggccctgaagaagacggcggggaggagtcgggcgccgaggagtccggcccggaagagtccggcccggaggaactgggcgccgaggaggagatggaggccgggcggccgcggcccgtgctgcgctcggtgaactcgcgcgagccctcccaggtcatcttctgcaatcgcagtccgcgcgtcgtgctgcccgtatggctcaacttcgacggcgagccgcagccctacccaacgctgccgcctggcacgggccgccgcatccacagctaccgaggtcacctttggctcttcagagatgcagggacacacgatgggcttctggttaaccaaactgaattatttgtgccatctctcaatgttgacggacagcctatttttgccaatatcacactgccagtgtatactctgaaagagcgatgcctccaggttgtccggagcctagtcaagcctgagaattacaggagactggacatcgtcaggtcgctctacgaagatctggaagaccacccaaatgtgcagaaagacctggagcggctgacacaggagcgcattgcacatcaacggatgggagattgaagatttctgttgaaacttacactgtttcatctcagcttttgatggtactgatgagtcttgatctagatacaggactggttccttccttagtttcaaagtgtctcattctcagagtaaaataggcaccattgcttaaaagaaagttaactgacttcactaggcattgtgatgtttaggggcaaacatcacaaaatgtaatttaatgcctgcccattagagaagtatttatcaggagaaggtggtggcatttttgcttcctagtaagtcaggacagcttgtatgtaaggaggtttatataagtaattcagtgggaattgcagcatatcgtttaattttaagaaggcattggcatctgcttttaatggatgtataatacatccattctacatccgtagcggttggtgacttgtctgcctcctgctttgggaagactgaggcatccgtgaggcagggacaagtctttctcctctttgagaccccagtgcctgcacatcatgagccttcagtcagggtttgtcagaggaacaaaccaggggacactttgttagaaagtgcttagaggttctgcctctatttttgttggggggtgggagaggggaccttaaaatgtgtacagtgaacaaatgtcttaaagggaatcatttttgtaggaagcattttttataattttctaagtcgtgcactttctcggtccactcttgttgaagtgctgttttattactgtttctaaactaggattgacattctacagttgtgataatagcatttttgtaacttgccatccgcacagaaaatacgagaaaatctgcatgtttgattatagtattaatggacaaataagtttttgctaaatgtgagtatttctgttcctttttgtaaatatgtgacattcctgattgatttgggtttttttgttgttgttgttttgttttgttttgtttttttgagatggagtctcactcttgtcacccaggctggagtgcagtggcgccatctcggctcactgcaacctctgcctcctgagttcacgtaatcctcctgagtagctgggattacaggtgcctgccaccacgctggccaatttttgtacttttagtagagacagtgtttcgccatgttggccaggctggtttcaaactcctgacctcaggtgatccgcccacctcagcctcccaaaatggtgggattacaggtgtgtgggccaccgtgcctggctgattcagcattttttatcaggcaggaccaggtggcacttccacctccagcctctggtcctaccaatggattcatggagtagcctggactgtttcatagttttctaaatgtacaaattcttataggctagacttagattcattaactcagatgcttcttgacgtcaagaagcatcctgagttagatgcataggattatagcagacataatcatgtgagaggccagagaaagaaattgacaggcaaaagcaagaaattgagtttgtgtttagggaacaatgagtggctctttttgcccttggcagtgggattcacatctaggagaagacagaggaggtggaggcaggaggatcatttgagcccaggaatgcaagaccagcctgggcaaaatggcaagaccctgtctttacagaaaattttttaaaaattagccagccatggtgcctgcacccggtcc

SEQ ID NO: 441787 - DNA, 2578 bp, Homo sapiens
  misc_feature (28)..(28): n is a, c, g, or t
  misc_feature (2184)..(2184): n is a, c, g, or t
  misc_feature (2237)..(2237): n is a, c, g, or t
tttctgcgacagagtgagacaccgtctnaaaaaaaaaaacaaaaaacaaaaattatccaggtgtggcggtgggcgctgtgaggcaggcgaacctctgcctcctgagttcacgtaatcctcctgagtagctgggattacaggtgcctgccaccacgctggccaatttttgtacttttagtagagacagtgtttcgccatgttggccaggctggtttcaaactcctgacctcaggtgatccgcccacctcagcctcccaaaatggtgggattacaggtgtgtgggccaccgtgcctggctgattcagcattttttatcaggcaggaccaggtggcacttccacctccagcctctggtcctaccaatggattcatggagtagcctggactgtttcatagttttctaaatgtacaaattcttataggctagacttagattcattaactcaaattcaatgcttctatcagactcagttttttgtaactaatagatttttttttccacttttgttctactccttccctaatagctttttaaaaaaatctccccagtagagaaacatttggaaaagacagaaaactaaaaaggaagaaaaaagatccctattagatacacttcttaaatacaatcacattaacattttgagctatttccttccagcctttttagggcagattttggttggtttttacatagttgagattgtactgttcatacagttttataccctttttcatttaactttataacttaaatattgctctatgttagtataagcttttcacaaacattagtatagtctcccttttataattaatgtttgtgggtatttcttggcatgcatctttaattccttatcctagcctttgggcacaattcctgtgctcaaaaatgagagtgacggctggcatggtggctcccgcctgtaatcccagtactttgggaagccaaggtaagaggattgcttgagcccagaacttcaagatgagcctgggctcatagtgagaacccatctatacaaaaaatttttaaaaattagcatggcggcacacatctgtaatcctagctacttggcaggctgaggtgagaagatcattggagtttaggaattggaggcggcagtgagccatgagtatgccactgcactccagcctgggggacagagcaagaccctgcctcaaaaaaaaaaaaaaacaaattacaggtgtgagccaccgcgtccagccagctttattattttttttaagctgtctttgtgtcaaaatgatagttcatgctcctcttgttaaaacctgcaggccgagcacagtggctcatgcctgtaatcccagcattttgggagaccaaggcggatggatcacctgaggtcaggagctcaagaccagcctggctaacatggtgaaacctcatctccacttaaaatacaaaaattgccggccgcggcggctcatgcctgtaatcccagcactttgggaggcctaggcgggtggatcacgaggtcaggaaatcgagaccatcctggctaacacgggtgaaaccccgtctctattaaaaaatagaaaaaattaggcgggcgtggtggtgagcgcctgtagtcccagctactcgagagcctgaggcaggagaatggcatgaacctggaaggcggagcttgcagtgagctgagatggtgccactgcactctaacctgggcgacagagtgagacaccgtctcaaaaaaaaaaacaaaaaacaaaaattatccaggtgtggcggtgggcgcctgtgaggcaggcgaatctcttgaacccgggaggcggaggttgcagtgagccaagatcacaccattgcactccagcctgggcaacaagagtgaaattccatctcaaaaagaaaccaaaaaaacaaaaaaaaaacatgccgtttgagtactgtgtttttggtgttgtccaaggaaaattaaaaacctgtagcatgaataatgtttgtttttcatttcgaatcttgtgaatgtattaaatatatcgctcttaagagacggtgaagttcctatttcaagttttttttgttttgttttgtttttaaagctgttttttaatacattaaatggtgctgagtaaaggaaataggcagggtgtgttgtgtggtgttttaactaggcgcttctctctcagagagttttgaaacctgtttacataaaggcccangatgggaaggagatccaaacataagccaccagcctcattccaagtctcttctntttccaaccctggattttttttttttatttaacattgtttcttttagctttatttttcttataaaagaaatgtatcactataaaaaattacacactacagaaaaatattaagaagaaaaacattcacatcggaaacaaagttttttcccatgaaaacagaacccaaaagggtaagtggttagtatttcaccagcaattatgttgagaataaggccaggcgaggtggctcacgcctgtaatctcagcactttgggaggccagggcaggcagatcatctgaggtcaggagtttgagaccagcctggccaacatggtgaaaccctatctctactaaaaattaaa

SEQ ID NO: 441788 - DNA, 3296 bp, Homo sapiens
  misc_feature (19)..(19): n is a, c, g, or t
  misc_feature (2902)..(2902): n is a, c, g, or t
  misc_feature (2955)..(2955): n is a, c, g, or t
cctcgcctccgttacaacngcctacggtgctggaggatccttctgcgcacgcgcacagcctccggccggctatttccgcgagcgcgttccatcctctaccgagcgcgcgcgaagactacggaggtcgactcgggagcgcgcacgcagctccgccccgcgtccgacccgcggatcccgcggcgtccggcccgggtggtctggatcgcggagggaatgccccggagggcggagaactgggacgaggccgaggtaggcgcggaggaggcaggcgtcgaagagtacggccctgaagaagacggcggggaggagtcgggcgccgaggagtccggcccggaagagtccggcccggaggaactgggcgccgaggaggagatggaggccgggcggccgcggcccgtgctgcgctcggtgaactcgcgcgagccctcccaggtcatcttctgcaatcgcagtccgcgcgtcgtgctgcccgtatggctcaacttcgacggcgagccgcagccctacccaacgctgccgcctggcacgggccgccgcatccacagctaccgaggtcacctttggctcttcagagatgcagggacacacgatgggcttctggttaaccaaactgaattatttgtgccatctctcaatgttgacggacagcctatttttgccaatatcacactgccagtgtatactctgaaagagcgatgcctccaggttgtccggagcctagtcaagcctgagaattacaggagactggacatcgtcaggtcgctctacgaagatctggaagaccacccaaatgtgcagaaagacctggagcggctgacacaggagcgcattgcacatcaacggatgggagattgaagatttctgttgaaacttacactgtttcatctcagcttttgatggtactgatgagtcttgatctagatacaggactggttccttccttagtttcaaagtgtctcattctcagagtaaaataggcaccattgcttaaaagaaagttaactgacttcactaggcattgtgatgtttaggggcaaacatcacaaaatgtaatttaatgcctgcccattagagaagtatttatcaggagaaggtggtggcatttttgcttcctagtaagtcaggacagcttgtatgtaaggaggtttatataagtaattcagtgggaattgcagcatatcgtttaattttaagaaggcattggcatctgcttttaatggatgtataatacatccattctacatccgtagcggttggtgacttgtctgcctcctgctttgggaagactgaggcatccgtgaggcagggacaagtctttctcctctttgagaccccagtgcctgcacatcatgagccttcagtcagggtttgtcagaggaacaaaccaggggacactttgttagaaagtgcttagaggttctgcctctatttttgttggggggtgggagaggggaccttaaaatgtgtacagtgaacaaatgtcttaaagggaatcatttttgtaggaagcattttttataattttctaagtcgtgcactttctcggtccactcttgttgaagtgctgttttattactgtttctaaactaggattgacattctacagttgtgataatagcatttttgtaacttgccatccgcacagaaaatacgagaaaatctgcatgtttgattatagtattaatggacaaataagtttttgctaaatgtgagtatttctgttcctttttgtaaatatgtgacattcctgattgatttgggtttttttgttgttgttgttttgttttgttttgtttttttgagatggagtctcactcttgtcacccaggctggagtgcagtggcgccatctcggctcactgcaacctctgcctcctgagttcacgtaatcctcctgagtagctgggattacagattacaggtgtgagccaccgcgtccagccagctttattattttttttaagctgtctttgtgtcaaaatgatagttcatgctcctcttgttaaaacctgcaggccgagcacagtggctcatgcctgtaatcccagcattttgggagaccaaggcggatggatcacctgaggtcaggagctcaagaccagcctggctaacatggtgaaacctcatctccacttaaaatacaaaaattgccggccgcggcggctcatgcctgtaatcccagcactttgggaggcctaggcgggtggatcacgaggtcaggaaatcgagaccatcctggctaacacgggtgaaaccccgtctctattaaaaaatagaaaaaattaggcgggcgtggtggtgagcgcctgtagtcccagctactcgagagcctgaggcaggagaatggcatgaacctggaaggcggagcttgcagtgagctgagatggtgccactgcactctaacctgggcgacagagtgagacaccgtctcaaaaaaaaaaacaaaaaacaaaaattatccaggtgtggcggtgggcgcctgtgaggcaggcgaatctcttgaacccgggaggcggaggttgcagtgagccaagatcacaccattgcactccagcctgggcaacaagagtgaaattccatctcaaaaagaaaccaaaaaaacaaaaaaaaaacatgccgtttgagtactgtgtttttggtgttgtccaaggaaaattaaaaacctgtagcatgaataatgtttgtttttcatttcgaatcttgtgaatgtattaaatatatcgctcttaagagacggtgaagttcctatttcaagttttttttgttttgttttgtttttaaagctgttttttaatacattaaatggtgctgagtaaaggaaataggcagggtgtgttgtgtggtgttttaactaggcgcttctctctcagagagttttgaaacctgtttacataaaggcccangatgggaaggagatccaaacataagccaccagcctcattccaagtctcttctntttccaaccctggattttttttttttatttaacattgtttcttttagctttatttttcttataaaagaaatgtatcactataaaaaattacacactacagaaaaatattaagaagaaaaacattcacatcggaaacaaagttttttcccatgaaaacagaacccaaaagggtaagtggttagtatttcaccagcaattatgttgagaataaggccaggcgaggtggctcacgcctgtaatctcagcactttgggaggccagggcaggcagatcatctgaggtcaggagtttgagaccagcctggccaacatggtgaaaccctatctctactaaaaattaaa

SEQ ID NO: 441789 - DNA, 2543 bp, Homo sapiens
  misc_feature (2149)..(2149): n is a, c, g, or t
  misc_feature (2202)..(2202): n is a, c, g, or t
tcgatgccactgtctctctcatactcatgtctctgatatcatgatgtgtgtgtgtgttactctcgtctctctgcctctatctctctcaatctctctttctctgtgtctgtctgtgtttgtttctgatcctctatctcttttagtagagacagtgtttcgccatgttggccaggctggtttcaaactcctgacctcaggtgatccgcccacctcagcctcccaaaatggtgggattacaggtgtgtgggccaccgtgcctggctgattcagcattttttatcaggcaggaccaggtggcacttccacctccagcctctggtcctaccaatggattcatggagtagcctggactgtttcatagttttctaaatgtacaaattcttataggctagacttagattcattaactcaaattcaatgcttctatcagactcagttttttgtaactaatagatttttttttccacttttgttctactccttccctaatagctttttaaaaaaatctccccagtagagaaacatttggaaaagacagaaaactaaaaaggaagaaaaaagatccctattagatacacttcttaaatacaatcacattaacattttgagctatttccttccagcctttttagggcagattttggttggtttttacatagttgagattgtactgttcatacagttttataccctttttcatttaactttataacttaaatattgctctatgttagtataagcttttcacaaacattagtatagtctcccttttataattaatgtttgtgggtatttcttggcatgcatctttaattccttatcctagcctttgggcacaattcctgtgctcaaaaatgagagtgacggctggcatggtggctcccgcctgtaatcccagtactttgggaagccaaggtaagaggattgcttgagcccagaacttcaagatgagcctgggctcatagtgagaacccatctatacaaaaaatttttaaaaattagcatggcggcacacatctgtaatcctagctacttggcaggctgaggtgagaagatcattggagtttaggaattggaggcggcagtgagccatgagtatgccactgcactccagcctgggggacagagcaagaccctgcctcaaaaaaaaaaaaaaacaaattacaggtgtgagccaccgcgtccagccagctttattattttttttaagctgtctttgtgtcaaaatgatagttcatgctcctcttgttaaaacctgcaggccgagcacagtggctcatgcctgtaatcccagcattttgggagaccaaggcggatggatcacctgaggtcaggagctcaagaccagcctggctaacatggtgaaacctcatctccacttaaaatacaaaaattgccggccgcggcggctcatgcctgtaatcccagcactttgggaggcctaggcgggtggatcacgaggtcaggaaatcgagaccatcctggctaacacgggtgaaaccccgtctctattaaaaaatagaaaaaattaggcgggcgtggtggtgagcgcctgtagtcccagctactcgagagcctgaggcaggagaatggcatgaacctggaaggcggagcttgcagtgagctgagatggtgccactgcactctaacctgggcgacagagtgagacaccgtctcaaaaaaaaaaacaaaaaacaaaaattatccaggtgtggcggtgggcgcctgtgaggcaggcgaatctcttgaacccgggaggcggaggttgcagtgagccaagatcacaccattgcactccagcctgggcaacaagagtgaaattccatctcaaaaagaaaccaaaaaaacaaaaaaaaaacatgccgtttgagtactgtgtttttggtgttgtccaaggaaaattaaaaacctgtagcatgaataatgtttgtttttcatttcgaatcttgtgaatgtattaaatatatcgctcttaagagacggtgaagttcctatttcaagttttttttgttttgttttgtttttaaagctgttttttaatacattaaatggtgctgagtaaaggaaataggcagggtgtgttgtgtggtgttttaactaggcgcttctctctcagagagttttgaaacctgtttacataaaggcccangatgggaaggagatccaaacataagccaccagcctcattccaagtctcttctntttccaaccctggattttttttttttatttaacattgtttcttttagctttatttttcttataaaagaaatgtatcactataaaaaattacacactacagaaaaatattaagaagaaaaacattcacatcggaaacaaagttttttcccatgaaaacagaacccaaaagggtaagtggttagtatttcaccagcaattatgttgagaataaggccaggcgaggtggctcacgcctgtaatctcagcactttgggaggccagggcaggcagatcatctgaggtcaggagtttgagaccagcctggccaacatggtgaaaccctatctctactaaaaattaaa

SEQ ID NO: 441790 - DNA, 2607 bp, Homo sapiens
  misc_feature (19)..(19): n is a, c, g, or t
  misc_feature (2213)..(2213): n is a, c, g, or t
  misc_feature (2266)..(2266): n is a, c, g, or t
cctcgcctccgttacaacngcctacggtgctggaggatccttctgcgcacgcgcacagcctccggccggctatttccgcgagcgcgttccatcctctaccgagcgcgcgcgaagactacggaggtcgactcgggagcgcgcacgcagctccgccccgcgtccgacccgcggatcccgcggcgtccggcccgggtggtctggatcgcggagggaatgccccggagggcggagaactgggacgaggccgaggtaggcgcggaggaggcaggcgtcgaagagtacggccctgaagaagacggcggggaggagtcgggcgccgaggagtccggcccggaagagtccggcccggaggaactgggcgccgaggaggagatggaggccgggcggccgcggcccgtgctgcgctcggtgaactcgcgcgagccctcccaggtcatcttctgcaatcgcagtccgcgcgtcgtgctgcccgtatggctcaacttcgacggcgagccgcagccctacccaacgctgccgcctggcacgggccgccgcatccacagctaccgaggtcacctttggctcttcagagatgcagggacacacgatgggcttctggttaaccaaactgaattatttgtgccatctctcaatgttgacggacagcctatttttgccaatatcacactgccagtgtatactctgaaagagcgatgcctccaggttgtccggagcctagtcaagcctgagaattacaggagactggacatcgtcaggtcgctctacgaagatctggaagaccacccaaatgtgcagaaagacctggagcggctgacacaggagcgcattgcacatcaacggatgggagattgaagatttctgttgaaacttacactgtttcatctcagcttttgatggtactgatgagtcttgatctagatacaggactggttccttccttagtttcaaagtgtctcattctcagagtaaaataggcaccattgcttaaaagaaagttaactgacttcactaggcattgtgatgtttaggggcaaacatcacaaaatgtaatttaatgcctgcccattagagaagtatttatcaggagaaggtggtggcatttttgcttcctagtaagtcaggacagcttgtatgtaaggaggtttatataagtaattcagtgggaattgcagcatatcgtttaattttaagaaggcattggcatctgcttttaatggatgtataatacatccattctacatccgtagcggttggtgacttgtctgcctcctgctttgggaagactgaggcatccgtgaggcagggacaagtctttctcctctttgagaccccagtgcctgcacatcatgagccttcagtcagggtttgtcagaggaacaaaccaggggacactttgttagaaagtgcttagaggttctgcctctatttttgttggggggtgggagaggggaccttaaaatgtgtacagtgaacaaatgtcttaaagggaatcatttttgtaggaagcattttttataattttctaagtcgtgcactttctcggtccactcttgttgaagtgctgttttattactgtttctaaactaggattgacattctacagttgtgataatagcatttttgtaacttgccatccgcacagaaaatacgagaaaatctgcatgtttgattatagtattaatggacaaataagtttttgctaaatgtgagtatttctgttcctttttgtaaatatgtgacattcctgattgatttgggtttttttgttgttgttgttttgttttgttttgtttttttgagatggagtctcactcttgtcgcggaggttgcagtgagccaagatcacaccattgcactccagcctgggcaacaagagtgaaattccatctcaaaaagaaaccaaaaaaacaaaaaaaaaacatgccgtttgagtactgtgtttttggtgttgtccaaggaaaattaaaaacctgtagcatgaataatgtttgtttttcatttcgaatcttgtgaatgtattaaatatatcgctcttaagagacggtgaagttcctatttcaagttttttttgttttgttttgtttttaaagctgttttttaatacattaaatggtgctgagtaaaggaaataggcagggtgtgttgtgtggtgttttaactaggcgcttctctctcagagagttttgaaacctgtttacataaaggcccangatgggaaggagatccaaacataagccaccagcctcattccaagtctcttctntttccaaccctggattttttttttttatttaacattgtttcttttagctttatttttcttataaaagaaatgtatcactataaaaaattacacactacagaaaaatattaagaagaaaaacattcacatcggaaacaaagttttttcccatgaaaacagaacccaaaagggtaagtggttagtatttcaccagcaattatgttgagaataaggccaggcgaggtggctcacgcctgtaatctcagcactttgggaggccagggcaggcagatcatctgaggtcaggagtttgagaccagcctggccaacatggtgaaaccctatctctactaaaaattaaa

SEQ ID NO: 441791 - DNA, 2407 bp, Homo sapiens
  misc_feature (2013)..(2013): n is a, c, g, or t
  misc_feature (2066)..(2066): n is a, c, g, or t
aaacctgcaggccgagcacagtggctcatgcctgtaatcccagcattttgggagacctcaggtgatccgcccacctcagcctcccaaaatggtgggattacaggtgtgtgggccaccgtgcctggctgattcagcattttttatcaggcaggaccaggtggcacttccacctccagcctctggtcctaccaatggattcatggagtagcctggactgtttcatagttttctaaatgtacaaattcttataggctagacttagattcattaactcaaattcaatgcttctatcagactcagttttttgtaactaatagatttttttttccacttttgttctactccttccctaatagctttttaaaaaaatctccccagtagagaaacatttggaaaagacagaaaactaaaaaggaagaaaaaagatccctattagatacacttcttaaatacaatcacattaacattttgagctatttccttccagcctttttagggcagattttggttggtttttacatagttgagattgtactgttcatacagttttataccctttttcatttaactttataacttaaatattgctctatgttagtataagcttttcacaaacattagtatagtctcccttttataattaatgtttgtgggtatttcttggcatgcatctttaattccttatcctagcctttgggcacaattcctgtgctcaaaaatgagagtgacggctggcatggtggctcccgcctgtaatcccagtactttgggaagccaaggtaagaggattgcttgagcccagaacttcaagatgagcctgggctcatagtgagaacccatctatacaaaaaatttttaaaaattagcatggcggcacacatctgtaatcctagctacttggcaggctgaggtgagaagatcattggagtttaggaattggaggcggcagtgagccatgagtatgccactgcactccagcctgggggacagagcaagaccctgcctcaaaaaaaaaaaaaaacaaattacaggtgtgagccaccgcgtccagccagctttattattttttttaagctgtctttgtgtcaaaatgatagttcatgctcctcttgttaaaacctgcaggccgagcacagtggctcatgcctgtaatcccagcattttgggagaccaaggcggatggatcacctgaggtcaggagctcaagaccagcctggctaacatggtgaaacctcatctccacttaaaatacaaaaattgccggccgcggcggctcatgcctgtaatcccagcactttgggaggcctaggcgggtggatcacgaggtcaggaaatcgagaccatcctggctaacacgggtgaaaccccgtctctattaaaaaatagaaaaaattaggcgggcgtggtggtgagcgcctgtagtcccagctactcgagagcctgaggcaggagaatggcatgaacctggaaggcggagcttgcagtgagctgagatggtgccactgcactctaacctgggcgacagagtgagacaccgtctcaaaaaaaaaaacaaaaaacaaaaattatccaggtgtggcggtgggcgcctgtgaggcaggcgaatctcttgaacccgggaggcggaggttgcagtgagccaagatcacaccattgcactccagcctgggcaacaagagtgaaattccatctcaaaaagaaaccaaaaaaacaaaaaaaaaacatgccgtttgagtactgtgtttttggtgttgtccaaggaaaattaaaaacctgtagcatgaataatgtttgtttttcatttcgaatcttgtgaatgtattaaatatatcgctcttaagagacggtgaagttcctatttcaagttttttttgttttgttttgtttttaaagctgttttttaatacattaaatggtgctgagtaaaggaaataggcagggtgtgttgtgtggtgttttaactaggcgcttctctctcagagagttttgaaacctgtttacataaaggcccangatgggaaggagatccaaacataagccaccagcctcattccaagtctcttctntttccaaccctggattttttttttttatttaacattgtttcttttagctttatttttcttataaaagaaatgtatcactataaaaaattacacactacagaaaaatattaagaagaaaaacattcacatcggaaacaaagttttttcccatgaaaacagaacccaaaagggtaagtggttagtatttcaccagcaattatgttgagaataaggccaggcgaggtggctcacgcctgtaatctcagcactttgggaggccagggcaggcagatcatctgaggtcaggagtttgagaccagcctggccaacatggtgaaaccctatctctactaaaaattaaa

SEQ ID NO: 441792 - DNA, 2484 bp, Homo sapiens
  misc_feature (2090)..(2090): n is a, c, g, or t
  misc_feature (2143)..(2143): n is a, c, g, or t
gaggcttaggtgggaggatcccttgagcccaggagtttgaggctgcagtgagccatgatcataccactgcactccagcccaggtgacagagtgagatcctgtctcaaaaaaagaaaaaaaaaaaaaatcaggccgggcatggtggctcacgcctgtcctcccaaaatggtgggattacaggtgtgtgggccaccgtgcctggctgattcagcattttttatcaggcaggaccaggtggcacttccacctccagcctctggtcctaccaatggattcatggagtagcctggactgtttcatagttttctaaatgtacaaattcttataggctagacttagattcattaactcaaattcaatgcttctatcagactcagttttttgtaactaatagatttttttttccacttttgttctactccttccctaatagctttttaaaaaaatctccccagtagagaaacatttggaaaagacagaaaactaaaaaggaagaaaaaagatccctattagatacacttcttaaatacaatcacattaacattttgagctatttccttccagcctttttagggcagattttggttggtttttacatagttgagattgtactgttcatacagttttataccctttttcatttaactttataacttaaatattgctctatgttagtataagcttttcacaaacattagtatagtctcccttttataattaatgtttgtgggtatttcttggcatgcatctttaattccttatcctagcctttgggcacaattcctgtgctcaaaaatgagagtgacggctggcatggtggctcccgcctgtaatcccagtactttgggaagccaaggtaagaggattgcttgagcccagaacttcaagatgagcctgggctcatagtgagaacccatctatacaaaaaatttttaaaaattagcatggcggcacacatctgtaatcctagctacttggcaggctgaggtgagaagatcattggagtttaggaattggaggcggcagtgagccatgagtatgccactgcactccagcctgggggacagagcaagaccctgcctcaaaaaaaaaaaaaaacaaattacaggtgtgagccaccgcgtccagccagctttattattttttttaagctgtctttgtgtcaaaatgatagttcatgctcctcttgttaaaacctgcaggccgagcacagtggctcatgcctgtaatcccagcattttgggagaccaaggcggatggatcacctgaggtcaggagctcaagaccagcctggctaacatggtgaaacctcatctccacttaaaatacaaaaattgccggccgcggcggctcatgcctgtaatcccagcactttgggaggcctaggcgggtggatcacgaggtcaggaaatcgagaccatcctggctaacacgggtgaaaccccgtctctattaaaaaatagaaaaaattaggcgggcgtggtggtgagcgcctgtagtcccagctactcgagagcctgaggcaggagaatggcatgaacctggaaggcggagcttgcagtgagctgagatggtgccactgcactctaacctgggcgacagagtgagacaccgtctcaaaaaaaaaaacaaaaaacaaaaattatccaggtgtggcggtgggcgcctgtgaggcaggcgaatctcttgaacccgggaggcggaggttgcagtgagccaagatcacaccattgcactccagcctgggcaacaagagtgaaattccatctcaaaaagaaaccaaaaaaacaaaaaaaaaacatgccgtttgagtactgtgtttttggtgttgtccaaggaaaattaaaaacctgtagcatgaataatgtttgtttttcatttcgaatcttgtgaatgtattaaatatatcgctcttaagagacggtgaagttcctatttcaagttttttttgttttgttttgtttttaaagctgttttttaatacattaaatggtgctgagtaaaggaaataggcagggtgtgttgtgtggtgttttaactaggcgcttctctctcagagagttttgaaacctgtttacataaaggcccangatgggaaggagatccaaacataagccaccagcctcattccaagtctcttctntttccaaccctggattttttttttttatttaacattgtttcttttagctttatttttcttataaaagaaatgtatcactataaaaaattacacactacagaaaaatattaagaagaaaaacattcacatcggaaacaaagttttttcccatgaaaacagaacccaaaagggtaagtggttagtatttcaccagcaattatgttgagaataaggccaggcgaggtggctcacgcctgtaatctcagcactttgggaggccagggcaggcagatcatctgaggtcaggagtttgagaccagcctggccaacatggtgaaaccctatctctactaaaaattaaa

SEQ ID NO: 441793 - DNA, 2166 bp, Homo sapiens
  misc_feature (1772)..(1772): n is a, c, g, or t
  misc_feature (1825)..(1825): n is a, c, g, or t
ggtgagacttctccgccgcctccgccgcagacgccgccgggcggcgcgtccgcgcgtcgtgctgcccgtatggctcaacttcgacggcgagccgcagccctacccaacgctgccgcctggcacgggccgccgcatccacagctaccgaggtcacctttggctcttcagagatgcagggacacacgatgggcttctggttaaccaaactgaattatttgtgccatctctcaatgttgacggacagcctatttttgccaatatcacactgccagtgtatactctgaaagagcgatgcctccaggttgtccggagcctagtcaagcctgagaattacaggagactggacatcgtcaggtcgctctacgaagatctggaagaccacccaaatgtgcagaaagacctggagcggctgacacaggagcgcattgcacatcaacggatgggagattgaagatttctgttgaaacttacactgtttcatctcagcttttgatggtactgatgagtcttgatctagatacaggactggttccttccttagtttcaaagtgtctcattctcagagtaaaataggcaccattgcttaaaagaaagttaactgacttcactaggcattgtgatgtttaggggcaaacatcacaaaatgtaatttaatgcctgcccattagagaagtatttatcaggagaaggtggtggcatttttgcttcctagtaagtcaggacagcttgtatgtaaggaggtttatataagtaattcagtgggaattgcagcatatcgtttaattttaagaaggcattggcatctgcttttaatggatgtataatacatccattctacatccgtagcggttggtgacttgtctgcctcctgctttgggaagactgaggcatccgtgaggcagggacaagtctttctcctctttgagaccccagtgcctgcacatcatgagccttcagtcagggtttgtcagaggaacaaaccaggggacactttgttagaaagtgcttagaggttctgcctctatttttgttggggggtgggagaggggaccttaaaatgtgtacagtgaacaaatgtcttaaagggaatcatttttgtaggaagcattttttataattttctaagtcgtgcactttctcggtccactcttgttgaagtgctgttttattactgtttctaaactaggattgacattctacagttgtgataatagcatttttgtaacttgccatccgcacagaaaatacgagaaaatctgcattgcactctaacctgggcgacagagtgagacaccgtctcaaaaaaaaaaacaaaaaacaaaaattatccaggtgtggcggtgggcgcctgtgaggcaggcgaatctcttgaacccgggaggcggaggttgcagtgagccaagatcacaccattgcactccagcctgggcaacaagagtgaaattccatctcaaaaagaaaccaaaaaaacaaaaaaaaaacatgccgtttgagtactgtgtttttggtgttgtccaaggaaaattaaaaacctgtagcatgaataatgtttgtttttcatttcgaatcttgtgaatgtattaaatatatcgctcttaagagacggtgaagttcctatttcaagttttttttgttttgttttgtttttaaagctgttttttaatacattaaatggtgctgagtaaaggaaataggcagggtgtgttgtgtggtgttttaactaggcgcttctctctcagagagttttgaaacctgtttacataaaggcccangatgggaaggagatccaaacataagccaccagcctcattccaagtctcttctntttccaaccctggattttttttttttatttaacattgtttcttttagctttatttttcttataaaagaaatgtatcactataaaaaattacacactacagaaaaatattaagaagaaaaacattcacatcggaaacaaagttttttcccatgaaaacagaacccaaaagggtaagtggttagtatttcaccagcaattatgttgagaataaggccaggcgaggtggctcacgcctgtaatctcagcactttgggaggccagggcaggcagatcatctgaggtcaggagtttgagaccagcctggccaacatggtgaaaccctatctctactaaaaattaaa

SEQ ID NO: 441794 - DNA, 1157 bp, Homo sapiens
  misc_feature (19)..(19): n is a, c, g, or t
cctcgcctccgttacaacngcctacggtgctggaggatccttctgcgcacgcgcacagcctccggccggctatttccgcgagcgcgttccatcctctaccgagcgcgcgcgaagactacggaggtcgactcgggagcgcgcacgcagctccgccccgcgtccgacccgcggatcccgcggcgtccggcccgggtggtctggatcgcggagggaatgccccggagggcggagaactgggacgaggccgaggtaggcgcggaggaggcaggcgtcgaagagtacggccctgaagaagacggcggggaggagtcgggcgccgaggagtccggcccggaagagtccggcccggaggaactgggcgccgaggaggagatggaggccgggcggccgcggcccgtgctgcgctcggtgaactcgcgcgagccctcccaggtcatcttctgcaatcgcagtccgcgcgtcgtgctgcccgtatggctcaacttcgacggcgagccgcagccctacccaacgctgccgcctggcacgggccgccgcatccacagctaccgaggtcacctttggctcttcagagatgcagggacacacgatgggcttctggttaaccaaactgaattatttgtgccatctctcaatgttgacggacagcctatttttgccaatatcacactgccagtgtatactctgaaagagcgatgcctccaggttgtccggagcctagtcaagcctgagaattacaggagactggacatcgtcaggtcgctctacgaagatctggaagaccacccaaatgtgcagaaagacctggagcggctgacacaggagcgcattgcacatcaacggatgggagattgaagatttctgttgaaacttacactgtttcatctcagcttttgatggattgacattctacagttgtgataatagcatttttgtaacttgccatccgcacagaaaatacgagaaaatctgcatgtttgattatagtattaatggacaaataagtttttgctaaatgtgagtatttctgttcctttttgtaaatatgtgacattcctgattgatttgggtttttttgttgttgttgttttgttttgttttgtttttttgagatggagtctcactcttgtctgcactccaacctgtcgacagtctaa

SEQ ID NO: 441795 - DNA, 606 bp, Homo sapiens
  misc_feature (19)..(19): n is a, c, g, or t
cctcgcctccgttacaacngcctacggtgctggaggatccttctgcgcacgcgcacagcctccggccggctatttccgcgagcgcgttccatcctctaccgagcgcgcgcgaagactacggaggtcgactcgggagcgcgcacgcagctccgccccgcgtccgacccgcggatcccgcggcgtccggcccgggtggtctggatcgcggagggaatgccccggagggcggagaactgggacgaggccgaggtaggcgcggaggaggcaggcgtcgaagagtacggccctgaagaagacggcggggaggagtcgggcgccgaggagtccggcccggaagagtccggcccggaggaactgggcgccgaggaggagatggaggccgggcggccgcggcccgtgctgcgctcggtgaactcgcgcgagccctcccaggtcatcttctgcaatcgcagtccgcgcgtcgtgctgcccgtatggctcaacttcgacggcgagccgcagccctacccaacgctgccgcctggcacgggccgccgcatccacagctaccgaggtacgggcccggcgcttaggcccgacccagcagggacgatagcacggtctgaa

SEQ ID NO: 441796 - DNA, 4178 bp, Homo sapiens
  misc_feature (19)..(19): n is a, c, g, or t
  misc_feature (3784)..(3784): n is a, c, g, or t
  misc_feature (3837)..(3837): n is a, c, g, or t
cctcgcctccgttacaacngcctacggtgctggaggatccttctgcgcacgcgcacagcctccggccggctatttccgcgagcgcgttccatcctctaccgagcgcgcgcgaagactacggaggtcgactcgggagcgcgcacgcagctccgccccgcgtccgacccgcggatcccgcggcgtccggcccgggtggtctggatcgcggagggaatgccccggagggcggagaactgggacgaggccgaggtaggcgcggaggaggcaggcgtcgaagagtacggccctgaagaagacggcggggaggagtcgggcgccgaggagtccggcccggaagagtccggcccggaggaactgggcgccgaggaggagatggaggccgggcggccgcggcccgtgctgcgctcggtgaactcgcgcgagccctcccaggtcatcttctgcaatcgcagtccgcgcgtcgtgctgcccgtatggctcaacttcgacggcgagccgcagccctacccaacgctgccgcctggcacgggccgccgcatccacagctaccgaggtcacctttggctcttcagagatgcagggacacacgatgggcttctggttaaccaaactgaattatttgtgccatctctcaatgttgacggacagcctatttttgccaatatcacactgccagtgtatactctgaaagagcgatgcctccaggttgtccggagcctagtcaagcctgagaattacaggagactggacatcgtcaggtcgctctacgaagatctggaagaccacccaaatgtgcagaaagacctggagcggctgacacaggagcgcattgcacatcaacggatgggagattgaagatttctgttgaaacttacactgtttcatctcagcttttgatggtactgatgagtcttgatctagatacaggactggttccttccttagtttcaaagtgtctcattctcagagtaaaataggcaccattgcttaaaagaaagttaactgacttcactaggcattgtgatgtttaggggcaaacatcacaaaatgtaatttaatgcctgcccattagagaagtatttatcaggagaaggtggtggcatttttgcttcctagtaagtcaggacagcttgtatgtaaggaggtttatataagtaattcagtgggaattgcagcatatcgtttaattttaagaaggcattggcatctgcttttaatggatgtataatacatccattctacatccgtagcggttggtgacttgtctgcctcctgctttgggaagactgaggcatccgtgaggcagggacaagtctttctcctctttgagaccccagtgcctgcacatcatgagccttcagtcagggtttgtcagaggaacaaaccaggggacactttgttagaaagtgcttagaggttctgcctctatttttgttggggggtgggagaggggaccttaaaatgtgtacagtgaacaaatgtcttaaagggaatcatttttgtaggaagcattttttataattttctaagtcgtgcactttctcggtccactcttgttgaagtgctgttttattactgtttctaaactaggattgacattctacagttgtgataatagcatttttgtaacttgccatccgcacagaaaatacgagaaaatctgcatgtttgattatagtattaatggacaaataagtttttgctaaatgtgagtatttctgttcctttttgtaaatatgtgacattcctgattgatttgggtttttttgttgttgttgttttgttttgttttgtttttttgagatggagtctcactcttgtcacccaggctggagtgcagtggcgccatctcggctcactgcaacctctgcctcctgagttcacgtaatcctcctgagtagctgggattacaggtgcctgccaccacgctggccaatttttgtacttttagtagagacagtgtttcgccatgttggccaggctggtttcaaactcctgacctcaggtgatccgcccacctcagcctcccaaaatggtgggattacaggtgtgtgggccaccgtgcctggctgattcagcattttttatcaggcaggaccaggtggcacttccacctccagcctctggtcctaccaatggattcatggagtagcctggactgtttcatagttttctaaatgtacaaattcttataggctagacttagattcattaactcaaattcaatgcttctatcagactcagttttttgtaactaatagatttttttttccacttttgttctactccttccctaatagctttttaaaaaaatctccccagtagagaaacatttggaaaagacagaaaactaaaaaggaagaaaaaagatccctattagatacacttcttaaatacaatcacattaacattttgagctatttccttccagcctttttagggcagattttggttggtttttacatagttgagattgtactgttcatacagttttataccctttttcatttaactttataacttaaatattgctctatgttagtataagcttttcacaaacattagtatagtctcccttttataattaatgtttgtgggtatttcttggcatgcatctttaattccttatcctagcctttgggcacaattcctgtgctcaaaaatgagagtgacggctggcatggtggctcccgcctgtaatcccagtactttgggaagccaaggtaagaggattgcttgagcccagaacttcaagatgagcctgggctcatagtgagaacccatctatacaaaaaatttttaaaaattagcatggcggcacacatctgtaatcctagctacttggcaggctgaggtgagaagatcattggagtttaggaattggaggcggcagtgagccatgagtatgccactgcactccagcctgggggacagagcaagaccctgcctcaaaaaaaaaaaaaaacaaattacaggtgtgagccaccgcgtccagccagctttattattttttttaagctgtctttgtgtcaaaatgatagttcatgctcctcttgttaaaacctgcaggccgagcacagtggctcatgcctgtaatcccagcattttgggagaccaaggcggatggatcacctgaggtcaggagctcaagaccagcctggctaacatggtgaaacctcatctccacttaaaatacaaaaattgccggccgcggcggctcatgcctgtaatcccagcactttgggaggcctaggcgggtggatcacgaggtcaggaaatcgagaccatcctggctaacacgggtgaaaccccgtctctattaaaaaatagaaaaaattaggcgggcgtggtggtgagcgcctgtgaggcaggcgaatctcttgaacccgggaggcggaggttgcagtgagccaagatcacaccattgcactccagcctgggcaacaagagtgaaattccatctcaaaaagaaaccaaaaaaacaaaaaaaaaacatgccgtttgagtactgtgtttttggtgttgtccaaggaaaattaaaaacctgtagcatgaataatgtttgtttttcatttcgaatcttgtgaatgtattaaatatatcgctcttaagagacggtgaagttcctatttcaagttttttttgttttgttttgtttttaaagctgttttttaatacattaaatggtgctgagtaaaggaaataggcagggtgtgttgtgtggtgttttaactaggcgcttctctctcagagagttttgaaacctgtttacataaaggcccangatgggaaggagatccaaacataagccaccagcctcattccaagtctcttctntttccaaccctggattttttttttttatttaacattgtttcttttagctttatttttcttataaaagaaatgtatcactataaaaaattacacactacagaaaaatattaagaagaaaaacattcacatcggaaacaaagttttttcccatgaaaacagaacccaaaagggtaagtggttagtatttcaccagcaattatgttgagaataaggccaggcgaggtggctcacgcctgtaatctcagcactttgggaggccagggcaggcagatcatctgaggtcaggagtttgagaccagcctggccaacatggtgaaaccctatctctactaaaaattaaa

SEQ ID NO: 441797 - DNA, 4878 bp, Homo sapiens
  misc_feature (19)..(19): n is a, c, g, or t
  misc_feature (2971)..(2971): n is a, c, g, or t
  misc_feature (2982)..(2982): n is a, c, g, or t
  misc_feature (2990)..(2990): n is a, c, g, or t
  misc_feature (3018)..(3018): n is a, c, g, or t
  misc_feature (3179)..(3179): n is a, c, g, or t
  misc_feature (3257)..(3257): n is a, c, g, or t
  misc_feature (3382)..(3382): n is a, c, g, or t
  misc_feature (3384)..(3384): n is a, c, g, or t
  misc_feature (3396)..(3396): n is a, c, g, or t
  misc_feature (3422)..(3422): n is a, c, g, or t
  misc_feature (4484)..(4484): n is a, c, g, or t
  misc_feature (4537)..(4537): n is a, c, g, or t
cctcgcctccgttacaacngcctacggtgctggaggatccttctgcgcacgcgcacagcctccggccggctatttccgcgagcgcgttccatcctctaccgagcgcgcgcgaagactacggaggtcgactcgggagcgcgcacgcagctccgccccgcgtccgacccgcggatcccgcggcgtccggcccgggtggtctggatcgcggagggaatgccccggagggcggagaactgggacgaggccgaggtaggcgcggaggaggcaggcgtcgaagagtacggccctgaagaagacggcggggaggagtcgggcgccgaggagtccggcccggaagagtccggcccggaggaactgggcgccgaggaggagatggaggccgggcggccgcggcccgtgctgcgctcggtgaactcgcgcgagccctcccaggtcatcttctgcaatcgcagtccgcgcgtcgtgctgcccgtatggctcaacttcgacggcgagccgcagccctacccaacgctgccgcctggcacgggccgccgcatccacagctaccgaggtcacctttggctcttcagagatgcagggacacacgatgggcttctggttaaccaaactgaattatttgtgccatctctcaatgttgacggacagcctatttttgccaatatcacactgccagtgtatactctgaaagagcgatgcctccaggttgtccggagcctagtcaagcctgagaattacaggagactggacatcgtcaggtcgctctacgaagatctggaagaccacccaaatgtgcagaaagacctggagcggctgacacaggagcgcattgcacatcaacggatgggagattgaagatttctgttgaaacttacactgtttcatctcagcttttgatggtactgatgagtcttgatctagatacaggactggttccttccttagtttcaaagtgtctcattctcagagtaaaataggcaccattgcttaaaagaaagttaactgacttcactaggcattgtgatgtttaggggcaaacatcacaaaatgtaatttaatgcctgcccattagagaagtatttatcaggagaaggtggtggcatttttgcttcctagtaagtcaggacagcttgtatgtaaggaggtttatataagtaattcagtgggaattgcagcatatcgtttaattttaagaaggcattggcatctgcttttaatggatgtataatacatccattctacatccgtagcggttggtgacttgtctgcctcctgctttgggaagactgaggcatccgtgaggcagggacaagtctttctcctctttgagaccccagtgcctgcacatcatgagccttcagtcagggtttgtcagaggaacaaaccaggggacactttgttagaaagtgcttagaggttctgcctctatttttgttggggggtgggagaggggaccttaaaatgtgtacagtgaacaaatgtcttaaagggaatcatttttgtaggaagcattttttataattttctaagtcgtgcactttctcggtccactcttgttgaagtgctgttttattactgtttctaaactaggattgacattctacagttgtgataatagcatttttgtaacttgccatccgcacagaaaatacgagaaaatctgcatgtttgattatagtattaatggacaaataagtttttgctaaatgtgagtatttctgttcctttttgtaaatatgtgacattcctgattgatttgggtttttttgttgttgttgttttgttttgttttgtttttttgagatggagtctcactcttgtcacccaggctggagtgcagtggcgccatctcggctcactgcaacctctgcctcctgagttcacgtaatcctcctgagtagctgggattacaggtgcctgccaccacgctggccaatttttgtacttttagtagagacagtgtttcgccatgttggccaggctggtttcaaactcctgacctcaggtgatccgcccacctcagcctcccaaaatggtgggattacaggtgtgtgggccaccgtgcctggctgattcagcattttttatcaggcaggaccaggtggcacttccacctccagcctctggtcctaccaatggattcatggagtagcctggactgtttcatagttttctaaatgtacaaattcttataggctagacttagattcattaactcaaattcaatgcttctatcagactcagttttttgtaactaatagatttttttttccacttttgttctactccttccctaatagctttttaaaaaaatctccccagtagagaaacatttggaaaagacagaaaactaaaaaggaagaaaaaagatccctattagatacacttcttaaatacaatcacattaacattttgagctatttccttccagcctttttagggcagattttggttggtttttacatagttgagattgtactgttcatacagttttataccctttttcatttaactttataacttaaatattgctctatgttagtataagcttttcacaaacattagtatagtctcccttttataattaatgtttgtgggtatttcttggcatgcatctttaattccttatcctagcctttgggcacaattcctgtgctcaaaaatgagagtgacggctggcatggtggctcccgcctgtaatcccagtactttgggaagccaaggtaagaggattgcttgagcccagaacttcaagatgagcctgggctcatagtgagaacccatctatacaaaaaatttttaaaaattagcatggcggcacacatctgtaatcctagctacttggcaggctgaggtgagaagatcattggagtttaggaattggaggcggcagtgagccatgagtatgccactgcactccagcctgggggacagagcaagaccctgcctcaaaaaaaaaaaaaaacaaaantcaggccgggnatggtggntcacgcctgtaatcccagcactttgggnggtcgaggtgggcagatcacctgaggtcaggagttcgagaccagcctggccaacatggtaaaaccccatttctactaaaaaatacaagaattagctgggtgtggtggcgcatgcctgtaatcctagctactcaggaggctgaggcaggagaatcacttgancccaggaggcgaagattgcagtgagctgatatcgcaccattgtactccagcctgtgtgacagagcaatactcttgtcncaaaaaaaaaaaaaattcaaatcagagtgaagtgaatgagacactccagttttccttctactccgaattttagctcctcctttcaacattcaacaaatagtcttttttttttttttttttttttngngatggagtctcnctctgttgcccaggctggagtgcagnggtgcgatctctgctcactacaagctctgcctcccgagttcaagtgattctcctggctcaccctcctgagctgggattacaggcgcctgccaccatgcctggctaattttgtgtttttagtggagacggggtttcaccatgttgtccaggatggtcttgatctcctgaccttgtgatccacccacctcagcctcccaaagtgctgggattacaggtgtgagccaccgcgtccagccagctttattattttttttaagctgtctttgtgtcaaaatgatagttcatgctcctcttgttaaaacctgcaggccgagcacagtggctcatgcctgtaatcccagcactttgggaggcctaggcgggtggatcacgaggtcaggaaatcgagaccatcctggctaacacgggtgaaaccccgtctctattaaaaaatagaaaaaattaggcgggcgtggtggtgagcgcctgtagtcccagctactcgagagcctgaggcaggagaatggcatgaacctggaaggcggagcttgcagtgagctgagatggtgccactgcactctaacctgggcgacagagtgagacaccgtctcaaaaaaaaaaacaaaaaacaaaaattatccaggtgtggcggtgggcgcctgtgaggcaggcgaatctcttgaacccgggaggcggaggttgcagtgagccaagatcacaccattgcactccagcctgggcaacaagagtgaaattccatctcaaaaagaaaccaaaaaaacaaaaaaaaaacatgccgtttgagtactgtgtttttggtgttgtccaaggaaaattaaaaacctgtagcatgaataatgtttgtttttcatttcgaatcttgtgaatgtattaaatatatcgctcttaagagacggtgaagttcctatttcaagttttttttgttttgttttgtttttaaagctgttttttaatacattaaatggtgctgagtaaaggaaataggcagggtgtgttgtgtggtgttttaactaggcgcttctctctcagagagttttgaaacctgtttacataaaggcccangatgggaaggagatccaaacataagccaccagcctcattccaagtctcttctntttccaaccctggattttttttttttatttaacattgtttcttttagctttatttttcttataaaagaaatgtatcactataaaaaattacacactacagaaaaatattaagaagaaaaacattcacatcggaaacaaagttttttcccatgaaaacagaacccaaaagggtaagtggttagtatttcaccagcaattatgttgagaataaggccaggcgaggtggctcacgcctgtaatctcagcactttgggaggccagggcaggcagatcatctgaggtcaggagtttgagaccagcctggccaacatggtgaaaccctatctctactaaaaattaaa

SEQ ID NO: 441798 - DNA, 3947 bp, Homo sapiens
  misc_feature (3553)..(3553): n is a, c, g, or t
  misc_feature (3606)..(3606): n is a, c, g, or t
ggtgagacttctccgccgcctccgccgcagacgccgccgggcggcgcgtccgcgcgtcgtgctgcccgtatggctcaacttcgacggcgagccgcagccctacccaacgctgccgcctggcacgggccgccgcatccacagctaccgaggtcacctttggctcttcagagatgcagggacacacgatgggcttctggttaaccaaactgaattatttgtgccatctctcaatgttgacggacagcctatttttgccaatatcacactgccagtgtatactctgaaagagcgatgcctccaggttgtccggagcctagtcaagcctgagaattacaggagactggacatcgtcaggtcgctctacgaagatctggaagaccacccaaatgtgcagaaagacctggagcggctgacacaggagcgcattgcacatcaacggatgggagattgaagatttctgttgaaacttacactgtttcatctcagcttttgatggtactgatgagtcttgatctagatacaggactggttccttccttagtttcaaagtgtctcattctcagagtaaaataggcaccattgcttaaaagaaagttaactgacttcactaggcattgtgatgtttaggggcaaacatcacaaaatgtaatttaatgcctgcccattagagaagtatttatcaggagaaggtggtggcatttttgcttcctagtaagtcaggacagcttgtatgtaaggaggtttatataagtaattcagtgggaattgcagcatatcgtttaattttaagaaggcattggcatctgcttttaatggatgtataatacatccattctacatccgtagcggttggtgacttgtctgcctcctgctttgggaagactgaggcatccgtgaggcagggacaagtctttctcctctttgagaccccagtgcctgcacatcatgagccttcagtcagggtttgtcagaggaacaaaccaggggacactttgttagaaagtgcttagaggttctgcctctatttttgttggggggtgggagaggggaccttaaaatgtgtacagtgaacaaatgtcttaaagggaatcatttttgtaggaagcattttttataattttctaagtcgtgcactttctcggtccactcttgttgaagtgctgttttattactgtttctaaactaggattgacattctacagttgtgataatagcatttttgtaacttgccatccgcacagaaaatacgagaaaatctgcatgtttgattatagtattaatggacaaataagtttttgctaaatgtgagtatttctgttcctttttgtaaatatgtgacattcctgattgatttgggtttttttgttgttgttgttttgttttgttttgtttttttgagatggagtctcactcttgtcacccaggctggagtgcagtggcgccatctcggctcactgcaacctctgcctcctgagttcacgtaatcctcctgagtagctgggattacaggtgcctgccaccacgctggccaatttttgtacttttagtagagacagtgtttcgccatgttggccaggctggtttcaaactcctgacctcaggtgatccgcccacctcagcctcccaaaatggtgggattacaggtgtgtgggccaccgtgcctggctgattcagcattttttatcaggcaggaccaggtggcacttccacctccagcctctggtcctaccaatggattcatggagtagcctggactgtttcatagttttctaaatgtacaaattcttataggctagacttagattcattaactcaaattcaatgcttctatcagactcagttttttgtaactaatagatttttttttccacttttgttctactccttccctaatagctttttaaaaaaatctccccagtagagaaacatttggaaaagacagaaaactaaaaaggaagaaaaaagatccctattagatacacttcttaaatacaatcacattaacattttgagctatttccttccagcctttttagggcagattttggttggtttttacatagttgagattgtactgttcatacagttttataccctttttcatttaactttataacttaaatattgctctatgttagtataagcttttcacaaacattagtatagtctcccttttataattaatgtttgtgggtatttcttggcatgcatctttaattccttatcctagcctttgggcacaattcctgtgctcaaaaatgagagtgacggctggcatggtggctcccgcctgtaatcccagtactttgggaagccaaggtaagaggattgcttgagcccagaacttcaagatgagcctgggctcatagtgagaacccatctatacaaaaaatttttaaaaattagcatggcggcacacatctgtaatcctagctacttggcaggctgaggtgagaagatcattggagtttaggaattggaggcggcagtgagccatgagtatgccactgcactccagcctgggggacagagcaagaccctgcctcaaaaaaaaaaaaaaacaaattacaggtgtgagccaccgcgtccagccagctttattattttttttaagctgtctttgtgtcaaaatgatagttcatgctcctcttgttaaaacctgcaggccgagcacagtggctcatgcctgtaatcccagcattttgggagaccaaggcggatggatcacctgaggtcaggagctcaagaccagcctggctaacatggtgaaacctcatctccacttaaaatacaaaaattgccggccgcggcggctcatgcctgtaatcccagcactttgggaggcctaggcgggtggatcacgaggtcaggaaatcgagaccatcctggctaacacgggtgaaaccccgtctctattaaaaaatagaaaaaattaggcgggcgtggtggtgagcgcctgtagtcccagctactcgagagcctgaggcaggagaatggcatgaacctggaaggcggagcttgcagtgagctgagatggtgccactgcactctaacctgggcgacagagtgagacaccgtctcaaaaaaaaaaacaaaaaacaaaaattatccaggtgtggcggtgggcgcctgtgaggcaggcgaatctcttgaacccgggaggcggaggttgcagtgagccaagatcacaccattgcactccagcctgggcaacaagagtgaaattccatctcaaaaagaaaccaaaaaaacaaaaaaaaaacatgccgtttgagtactgtgtttttggtgttgtccaaggaaaattaaaaacctgtagcatgaataatgtttgtttttcatttcgaatcttgtgaatgtattaaatatatcgctcttaagagacggtgaagttcctatttcaagttttttttgttttgttttgtttttaaagctgttttttaatacattaaatggtgctgagtaaaggaaataggcagggtgtgttgtgtggtgttttaactaggcgcttctctctcagagagttttgaaacctgtttacataaaggcccangatgggaaggagatccaaacataagccaccagcctcattccaagtctcttctntttccaaccctggattttttttttttatttaacattgtttcttttagctttatttttcttataaaagaaatgtatcactataaaaaattacacactacagaaaaatattaagaagaaaaacattcacatcggaaacaaagttttttcccatgaaaacagaacccaaaagggtaagtggttagtatttcaccagcaattatgttgagaataaggccaggcgaggtggctcacgcctgtaatctcagcactttgggaggccagggcaggcagatcatctgaggtcaggagtttgagaccagcctggccaacatggtgaaaccctatctctactaaaaattaaa

SEQ ID NO: 441799 - DNA, 4957 bp, Homo sapiens
  misc_feature (19)..(19): n is a, c, g, or t
  misc_feature (2916)..(2916): n is a, c, g, or t
  misc_feature (2927)..(2927): n is a, c, g, or t
  misc_feature (2935)..(2935): n is a, c, g, or t
  misc_feature (2963)..(2963): n is a, c, g, or t
  misc_feature (3124)..(3124): n is a, c, g, or t
  misc_feature (3202)..(3202): n is a, c, g, or t
  misc_feature (3327)..(3327): n is a, c, g, or t
  misc_feature (3329)..(3329): n is a, c, g, or t
  misc_feature (3341)..(3341): n is a, c, g, or t
  misc_feature (3367)..(3367): n is a, c, g, or t
  misc_feature (4563)..(4563): n is a, c, g, or t
  misc_feature (4616)..(4616): n is a, c, g, or t
cctcgcctccgttacaacngcctacggtgctggaggatccttctgcgcacgcgcacagcctccggccggctatttccgcgagcgcgttccatcctctaccgagcgcgcgcgaagactacggaggtcgactcgggagcgcgcacgcagctccgccccgcgtccgacccgcggatcccgcggcgtccggcccgggtggtctggatcgcggagggaatgccccggagggcggagaactgggacgaggccgaggtaggcgcggaggaggcaggcgtcgaagagtacggccctgaagaagacggcggggaggagtcgggcgccgaggagtccggcccggaagagtccggcccggaggaactgggcgccgaggaggagatggaggccgggcggccgcggcccgtgctgcgctcggtgaactcgcgcgagccctcccaggtcatcttctgcaatcgcagtccgcgcgtcgtgctgcccgtatggctcaacttcgacggcgagccgcagccctacccaacgctgccgcctggcacgggccgccgcatccacagctaccgaggtcacctttggctcttcagagatgcagggacacacgatgggcttctggttaaccaaactgaattatttgtgccatctctcaatgttgacggacagcctatttttgccaatatcacactgccagtgtatactctgaaagagcgatgcctccaggttgtccggagcctagtcaagcctgagaattacaggagactggacatcgtcaggtcgctctacgaagatctggaagaccacccaaatgtgcagaaagacctggagcggctgacacaggagcgcattgcacatcaacggatgggagattgaagatttctgttgaaacttacactgtttcatctcagcttttgatggtactgatgagtcttgatctagatacaggactggttccttccttagtttcaaagtgtctcattctcagagtaaaataggcaccattgcttaaaagaaagttaactgacttcactaggcattgtgatgtttaggggcaaacatcacaaaatgtaatttaatgcctgcccattagagaagtatttatcaggagaaggtggtggcatttttgcttcctagtaagtcaggacagcttgtatgtaaggaggtttatataagtaattcagtgggaattgcagcatatcgtttaattttaagaaggcattggcatctgcttttaatggatgtataatacatccattctacatccgtagcggttggtgacttgtctgcctcctgctttgggaagactgaggcatccgtgaggcagggacaagtctttctcctctttgagaccccagtgcctgcacatcatgagccttcagtcagggtttgtcagaggaacaaaccaggggacactttgttagaaagtgcttagaggttctgcctctatttttgttggggggtgggagaggggaccttaaaatgtgtacagtgaacaaatgtcttaaagggaatcatttttgtaggaagcattttttataattttctaagtcgtgcactttctcggtccactcttgttgaagtgctgttttattactgtttctaaactaggattgacattctacagttgtgataatagcatttttgtaacttgccatccgcacagaaaatacgagaaaatctgcatgtttgattatagtattaatggacaaataagtttttgctaaatgtgagtatttctgttcctttttgtaaatatgtgacattcctgattgatttgggtttttttgttgttgttgttttgttttgttttgtttttttgagatggagtctcactcttgtcacccaggctggagtgcagtggcgccatctcggctcactgcaacctctgcctcctgagttcacgtaatcctcctgagtagctgggattacaggtgcctgccaccacgctggccaatttttgtacttttagtagagacagtgtttcgccatgttggccaggctggtttcaaactcctgacctcaggtgatccgcccacctcagcctcccaaaatggtgggattacaggtgtgtgggccaccgtgcctggctgattcagcattttttatcaggcaggaccaggtggcacttccacctccagcctctggtcctaccaatggattcatggagtagcctggactgtttcatagttttctaaatgtacaaattcttataggctagacttagattcattaactcaaattcaatgcttctatcagactcagttttttgtaactaatagatttttttttccacttttgttctactccttccctaatagctttttaaaaaaatctccccagtagagaaacatttggaaaagacagaaaactaaaaaggaagaaaaaagatccctattagatacacttcttaaatacaatcacattaacattttgagctatttccttccagcctttttagggcagattttggttggtttttacatagttgagattgtactgttcatacagttttataccctttttcatttaactttataacttaaatattgctctatgttagtataagcttttcacaaacattagtatagtctcccttttataattaatgtttgtgggtatttcttggcatgcatctttaattccttatcctagcctttgggcacaattcctgtgctcagaagccaaggtaagaggattgcttgagcccagaacttcaagatgagcctgggctcatagtgagaacccatctatacaaaaaatttttaaaaattagcatggcggcacacatctgtaatcctagctacttggcaggctgaggtgagaagatcattggagtttaggaattggaggcggcagtgagccatgagtatgccactgcactccagcctgggggacagagcaagaccctgcctcaaaaaaaaaaaaaaacaaaantcaggccgggnatggtggntcacgcctgtaatcccagcactttgggnggtcgaggtgggcagatcacctgaggtcaggagttcgagaccagcctggccaacatggtaaaaccccatttctactaaaaaatacaagaattagctgggtgtggtggcgcatgcctgtaatcctagctactcaggaggctgaggcaggagaatcacttgancccaggaggcgaagattgcagtgagctgatatcgcaccattgtactccagcctgtgtgacagagcaatactcttgtcncaaaaaaaaaaaaaattcaaatcagagtgaagtgaatgagacactccagttttccttctactccgaattttagctcctcctttcaacattcaacaaatagtcttttttttttttttttttttttngngatggagtctcnctctgttgcccaggctggagtgcagnggtgcgatctctgctcactacaagctctgcctcccgagttcaagtgattctcctggctcaccctcctgagctgggattacaggcgcctgccaccatgcctggctaattttgtgtttttagtggagacggggtttcaccatgttgtccaggatggtcttgatctcctgaccttgtgatccacccacctcagcctcccaaagtgctgggattacaggtgtgagccaccgcgtccagccagctttattattttttttaagctgtctttgtgtcaaaatgatagttcatgctcctcttgttaaaacctgcaggccgagcacagtggctcatgcctgtaatcccagcattttgggagaccaaggcggatggatcacctgaggtcaggagctcaagaccagcctggctaacatggtgaaacctcatctccacttaaaatacaaaaattgccggccgcggcggctcatgcctgtaatcccagcactttgggaggcctaggcgggtggatcacgaggtcaggaaatcgagaccatcctggctaacacgggtgaaaccccgtctctattaaaaaatagaaaaaattaggcgggcgtggtggtgagcgcctgtagtcccagctactcgagagcctgaggcaggagaatggcatgaacctggaaggcggagcttgcagtgagctgagatggtgccactgcactctaacctgggcgacagagtgagacaccgtctcaaaaaaaaaaacaaaaaacaaaaattatccaggtgtggcggtgggcgcctgtgaggcaggcgaatctcttgaacccgggaggcggaggttgcagtgagccaagatcacaccattgcactccagcctgggcaacaagagtgaaattccatctcaaaaagaaaccaaaaaaacaaaaaaaaaacatgccgtttgagtactgtgtttttggtgttgtccaaggaaaattaaaaacctgtagcatgaataatgtttgtttttcatttcgaatcttgtgaatgtattaaatatatcgctcttaagagacggtgaagttcctatttcaagttttttttgttttgttttgtttttaaagctgttttttaatacattaaatggtgctgagtaaaggaaataggcagggtgtgttgtgtggtgttttaactaggcgcttctctctcagagagttttgaaacctgtttacataaaggcccangatgggaaggagatccaaacataagccaccagcctcattccaagtctcttctntttccaaccctggattttttttttttatttaacattgtttcttttagctttatttttcttataaaagaaatgtatcactataaaaaattacacactacagaaaaatattaagaagaaaaacattcacatcggaaacaaagttttttcccatgaaaacagaacccaaaagggtaagtggttagtatttcaccagcaattatgttgagaataaggccaggcgaggtggctcacgcctgtaatctcagcactttgggaggccagggcaggcagatcatctgaggtcaggagtttgagaccagcctggccaacatggtgaaaccctatctctactaaaaattaaa

SEQ ID NO: 441800 - DNA, 4339 bp, Homo sapiens
  misc_feature (19)..(19): n is a, c, g, or t
  misc_feature (3945)..(3945): n is a, c, g, or t
  misc_feature (3998)..(3998): n is a, c, g, or t
cctcgcctccgttacaacngcctacggtgctggaggatccttctgcgcacgcgcacagcctccggccggctatttccgcgagcgcgttccatcctctaccgagcgcgcgcgaagactacggaggtcgactcgggagcgcgcacgcagctccgccccgcgtccgacccgcggatcccgcggcgtccggcccgggtggtctggatcgcggagggaatgccccggagggcggagaactgggacgaggccgaggtaggcgcggaggaggcaggcgtcgaagagtacggccctgaagaagacggcggggaggagtcgggcgccgaggagtccggcccggaagagtccggcccggaggaactgggcgccgaggaggagatggaggccgggcggccgcggcccgtgctgcgctcggtgaactcgcgcgagccctcccaggtcatcttctgcaatcgcagtccgcgcgtcgtgctgcccgtatggctcaacttcgacggcgagccgcagccctacccaacgctgccgcctggcacgggccgccgcatccacagctaccgagagtctcactgtgtcacccaggctggagtgcagtggcgtgtgatcttggctcactgcaacctctgcctctcgggttcaagcgattctcctgcttcagcagctgggactacagtgtatactctgaaagagcgatgcctccaggttgtccggagcctagtcaagcctgagaattacaggagactggacatcgtcaggtcgctctacgaagatctggaagaccacccaaatgtgcagaaagacctggagcggctgacacaggagcgcattgcacatcaacggatgggagattgaagatttctgttgaaacttacactgtttcatctcagcttttgatggtactgatgagtcttgatctagatacaggactggttccttccttagtttcaaagtgtctcattctcagagtaaaataggcaccattgcttaaaagaaagttaactgacttcactaggcattgtgatgtttaggggcaaacatcacaaaatgtaatttaatgcctgcccattagagaagtatttatcaggagaaggtggtggcatttttgcttcctagtaagtcaggacagcttgtatgtaaggaggtttatataagtaattcagtgggaattgcagcatatcgtttaattttaagaaggcattggcatctgcttttaatggatgtataatacatccattctacatccgtagcggttggtgacttgtctgcctcctgctttgggaagactgaggcatccgtgaggcagggacaagtctttctcctctttgagaccccagtgcctgcacatcatgagccttcagtcagggtttgtcagaggaacaaaccaggggacactttgttagaaagtgcttagaggttctgcctctatttttgttggggggtgggagaggggaccttaaaatgtgtacagtgaacaaatgtcttaaagggaatcatttttgtaggaagcattttttataattttctaagtcgtgcactttctcggtccactcttgttgaagtgctgttttattactgtttctaaactaggattgacattctacagttgtgataatagcatttttgtaacttgccatccgcacagaaaatacgagaaaatctgcatgtttgattatagtattaatggacaaataagtttttgctaaatgtgagtatttctgttcctttttgtaaatatgtgacattcctgattgatttgggtttttttgttgttgttgttttgttttgttttgtttttttgagatggagtctcactcttgtcacccaggctggagtgcagtggcgccatctcggctcactgcaacctctgcctcctgagttcacgtaatcctcctgagtagctgggattacaggtgcctgccaccacgctggccaatttttgtacttttagtagagacagtgtttcgccatgttggccaggctggtttcaaactcctgacctcaggtgatccgcccacctcagcctcccaaaatggtgggattacaggtgtgtgggccaccgtgcctggctgattcagcattttttatcaggcaggaccaggtggcacttccacctccagcctctggtcctaccaatggattcatggagtagcctggactgtttcatagttttctaaatgtacaaattcttataggctagacttagattcattaactcaaattcaatgcttctatcagactcagttttttgtaactaatagatttttttttccacttttgttctactccttccctaatagctttttaaaaaaatctccccagtagagaaacatttggaaaagacagaaaactaaaaaggaagaaaaaagatccctattagatacacttcttaaatacaatcacattaacattttgagctatttccttccagcctttttagggcagattttggttggtttttacatagttgagattgtactgttcatacagttttataccctttttcatttaactttataacttaaatattgctctatgttagtataagcttttcacaaacattagtatagtctcccttttataattaatgtttgtgggtatttcttggcatgcatctttaattccttatcctagcctttgggcacaattcctgtgctcaaaaatgagagtgacggctggcatggtggctcccgcctgtaatcccagtactttgggaagccaaggtaagaggattgcttgagcccagaacttcaagatgagcctgggctcatagtgagaacccatctatacaaaaaatttttaaaaattagcatggcggcacacatctgtaatcctagctacttggcaggctgaggtgagaagatcattggagtttaggaattggaggcggcagtgagccatgagtatgccactgcactccagcctgggggacagagcaagaccctgcctcaaaaaaaaaaaaaaacaaattacaggtgtgagccaccgcgtccagccagctttattattttttttaagctgtctttgtgtcaaaatgatagttcatgctcctcttgttaaaacctgcaggccgagcacagtggctcatgcctgtaatcccagcattttgggagaccaaggcggatggatcacctgaggtcaggagctcaagaccagcctggctaacatggtgaaacctcatctccacttaaaatacaaaaattgccggccgcggcggctcatgcctgtaatcccagcactttgggaggcctaggcgggtggatcacgaggtcaggaaatcgagaccatcctggctaacacgggtgaaaccccgtctctattaaaaaatagaaaaaattaggcgggcgtggtggtgagcgcctgtagtcccagctactcgagagcctgaggcaggagaatggcatgaacctggaaggcggagcttgcagtgagctgagatggtgccactgcactctaacctgggcgacagagtgagacaccgtctcaaaaaaaaaaacaaaaaacaaaaattatccaggtgtggcggtgggcgcctgtgaggcaggcgaatctcttgaacccgggaggcggaggttgcagtgagccaagatcacaccattgcactccagcctgggcaacaagagtgaaattccatctcaaaaagaaaccaaaaaaacaaaaaaaaaacatgccgtttgagtactgtgtttttggtgttgtccaaggaaaattaaaaacctgtagcatgaataatgtttgtttttcatttcgaatcttgtgaatgtattaaatatatcgctcttaagagacggtgaagttcctatttcaagttttttttgttttgttttgtttttaaagctgttttttaatacattaaatggtgctgagtaaaggaaataggcagggtgtgttgtgtggtgttttaactaggcgcttctctctcagagagttttgaaacctgtttacataaaggcccangatgggaaggagatccaaacataagccaccagcctcattccaagtctcttctntttccaaccctggattttttttttttatttaacattgtttcttttagctttatttttcttataaaagaaatgtatcactataaaaaattacacactacagaaaaatattaagaagaaaaacattcacatcggaaacaaagttttttcccatgaaaacagaacccaaaagggtaagtggttagtatttcaccagcaattatgttgagaataaggccaggcgaggtggctcacgcctgtaatctcagcactttgggaggccagggcaggcagatcatctgaggtcaggagtttgagaccagcctggccaacatggtgaaaccctatctctactaaaaattaaa

SEQ ID NO: 441801 - DNA, 2575 bp, Homo sapiens
  misc_feature (19)..(19): n is a, c, g, or t
  misc_feature (2181)..(2181): n is a, c, g, or t
  misc_feature (2234)..(2234): n is a, c, g, or t
cctcgcctccgttacaacngcctacggtgctggaggatccttctgcgcacgcgcacagcctccggccggctatttccgcgagcgcgttccatcctctaccgagcgcgcgcgaagactacggaggtcgactcgggagcgcgcacgcagctccgccccgcgtccgacccgcggatcccgcggcgtccggcccgggtggtctggatcgcggagggaatgccccggagggcggagaactgggacgaggccgaggtaggcgcggaggaggcaggcgtcgaagagtacggccctgaagaagacggcggggaggagtcgggcgccgaggagtccggcccggaagagtccggcccggaggaactgggcgccgaggaggagatggaggccgggcggccgcggcccgtgctgcgctcggtgaactcgcgcgagccctcccaggtcatcttctgcaatcgcagtccgcgcgtcgtgctgcccgtatggctcaacttcgacggcgagccgcagccctacccaacgctgccgcctggcacgggccgccgcatccacagctaccgaggtcacctttggctcttcagagatgcagggacacacgatgggcttctggttaaccaaactgaattatttgtgccatctctcaatgttgacggacagcctatttttgccaatatcacactgccagtgtatactctgaaagagcgatgcctccaggttgtccggagcctagtcaagcctgagaattacaggagactggacatcgtcaggtcgctctacgaagatctggaagaccacccaaatgtgcagaaagacctggagcggctgacacaggagcgcattgcacatcaacggatgggagattgaagatttctgttgaaacttacactgtttcatctcagcttttgatggtactgatgagtcttgatctagatacaggactggttccttccttagtttcaaagtgtctcattctcagagtaaaataggcaccattgcttaaaagaaagttaactgacttcactaggcattgtgatgtttaggggcaaacatcacaaaatgtaatttaatgcctgcccattagagaagtatttatcaggagaaggtggtggcatttttgcttcctagtaagtcaggacagcttgtatgtaaggaggtttatataagtaattcagtgggaattgcagcatatcgtttaattttaagaaggcattggcatctgcttttaatggatgtataatacatccattctacatccgtagcggttggtgacttgtctgcctcctgctttgggaagactgaggcatccgtgaggcagggacaagtctttctcctctttgagaccccagtgcctgcacatcatgagccttcagtcagggtttgtcagaggaacaaaccaggggacactttgttagaaagtgcttagaggttctgcctctatttttgttggggggtgggagaggggaccttaaaatgtgtacagtgaacaaatgtcttaaagggaatcatttttgtaggaagcattttttataattttctaagtcgtgcactttctcggtccactcttgttgaagtgctgttttattactgtttctaaactaggattgacattctacagttgtgataatagcatttttgtaacttgccatccgcacagaaaatacgagaaaatctgcatgtttgattatagtattaatggacaaataagtttttgctaaatgtgagtatttctgttcctttttgtaaatatgtgacattcctgattgatttgggtttttttgttgttgttgttttgttttgttttgtttttttgagatggagtctcactcttgtctgcactccagcctgggcaacaagagtgaaattccatctcaaaaagaaaccaaaaaaacaaaaaaaaaacatgccgtttgagtactgtgtttttggtgttgtccaaggaaaattaaaaacctgtagcatgaataatgtttgtttttcatttcgaatcttgtgaatgtattaaatatatcgctcttaagagacggtgaagttcctatttcaagttttttttgttttgttttgtttttaaagctgttttttaatacattaaatggtgctgagtaaaggaaataggcagggtgtgttgtgtggtgttttaactaggcgcttctctctcagagagttttgaaacctgtttacataaaggcccangatgggaaggagatccaaacataagccaccagcctcattccaagtctcttctntttccaaccctggattttttttttttatttaacattgtttcttttagctttatttttcttataaaagaaatgtatcactataaaaaattacacactacagaaaaatattaagaagaaaaacattcacatcggaaacaaagttttttcccatgaaaacagaacccaaaagggtaagtggttagtatttcaccagcaattatgttgagaataaggccaggcgaggtggctcacgcctgtaatctcagcactttgggaggccagggcaggcagatcatctgaggtcaggagtttgagaccagcctggccaacatggtgaaaccctatctctactaaaaattaaa

SEQ ID NO: 441802 - DNA, 3040 bp, Homo sapiens
  misc_feature (19)..(19): n is a, c, g, or t
  misc_feature (2646)..(2646): n is a, c, g, or t
  misc_feature (2699)..(2699): n is a, c, g, or t
cctcgcctccgttacaacngcctacggtgctggaggatccttctgcgcacgcgcacagcctccggccggctatttccgcgagcgcgttccatcctctaccgagcgcgcgcgaagactacggaggtcgactcgggagcgcgcacgcagctccgccccgcgtccgacccgcggatcccgcggcgtccggcccgggtggtctggatcgcggagggaatgccccggagggcggagaactgggacgaggccgaggtaggcgcggaggaggcaggcgtcgaagagtacggccctgaagaagacggcggggaggagtcgggcgccgaggagtccggcccggaagagtccggcccggaggaactgggcgccgaggaggagatggaggccgggcggccgcggcccgtgctgcgctcggtgaactcgcgcgagccctcccaggtcatcttctgcaatcgcagtccgcgcgtcgtgctgcccgtatggctcaacttcgacggcgagccgcagccctacccaacgctgccgcctggcacgggccgccgcatccacagctaccgagtcctcatgactccagtgggccagttctgcgtagtccctgccctcgtggagaacacattcctcctggggagactgacagatgcaaagacaggaacaagccagggtcatgttggcgccggaagagccgaccgtgtgtggcgtgggaaattgacttacctgcctgctgggagatggaggggttgcggtgtgtgggccaccgtgcctggctgattcagcattttttatcaggcaggaccaggtggcacttccacctccagcctctggtcctaccaatggattcatggagtagcctggactgtttcatagttttctaaatgtacaaattcttataggctagacttagattcattaactcaaattcaatgcttctatcagactcagttttttgtaactaatagatttttttttccacttttgttctactccttccctaatagctttttaaaaaaatctccccagtagagaaacatttggaaaagacagaaaactaaaaaggaagaaaaaagatccctattagatacacttcttaaatacaatcacattaacattttgagctatttccttccagcctttttagggcagattttggttggtttttacatagttgagattgtactgttcatacagttttataccctttttcatttaactttataacttaaatattgctctatgttagtataagcttttcacaaacattagtatagtctcccttttataattaatgtttgtgggtatttcttggcatgcatctttaattccttatcctagcctttgggcacaattcctgtgctcaaaaatgagagtgacggctggcatggtggctcccgcctgtaatcccagtactttgggaagccaaggtaagaggattgcttgagcccagaacttcaagatgagcctgggctcatagtgagaacccatctatacaaaaaatttttaaaaattagcatggcggcacacatctgtaatcctagctacttggcaggctgaggtgagaagatcattggagtttaggaattggaggcggcagtgagccatgagtatgccactgcactccagcctgggggacagagcaagaccctgcctcaaaaaaaaaaaaaaacaaattacaggtgtgagccaccgcgtccagccagctttattattttttttaagctgtctttgtgtcaaaatgatagttcatgctcctcttgttaaaacctgcaggccgagcacagtggctcatgcctgtaatcccagcattttgggagaccaaggcggatggatcacctgaggtcaggagctcaagaccagcctggctaacatggtgaaacctcatctccacttaaaatacaaaaattgccggccgcggcggctcatgcctgtaatcccagcactttgggaggcctaggcgggtggatcacgaggtcaggaaatcgagaccatcctggctaacacgggtgaaaccccgtctctattaaaaaatagaaaaaattaggcgggcgtggtggtgagcgcctgtagtcccagctactcgagagcctgaggcaggagaatggcatgaacctggaaggcggagcttgcagtgagctgagatggtgccactgcactctaacctgggcgacagagtgagacaccgtctcaaaaaaaaaaacaaaaaacaaaaattatccaggtgtggcggtgggcgcctgtgaggcaggcgaatctcttgaacccgggaggcggaggttgcagtgagccaagatcacaccattgcactccagcctgggcaacaagagtgaaattccatctcaaaaagaaaccaaaaaaacaaaaaaaaaacatgccgtttgagtactgtgtttttggtgttgtccaaggaaaattaaaaacctgtagcatgaataatgtttgtttttcatttcgaatcttgtgaatgtattaaatatatcgctcttaagagacggtgaagttcctatttcaagttttttttgttttgttttgtttttaaagctgttttttaatacattaaatggtgctgagtaaaggaaataggcagggtgtgttgtgtggtgttttaactaggcgcttctctctcagagagttttgaaacctgtttacataaaggcccangatgggaaggagatccaaacataagccaccagcctcattccaagtctcttctntttccaaccctggattttttttttttatttaacattgtttcttttagctttatttttcttataaaagaaatgtatcactataaaaaattacacactacagaaaaatattaagaagaaaaacattcacatcggaaacaaagttttttcccatgaaaacagaacccaaaagggtaagtggttagtatttcaccagcaattatgttgagaataaggccaggcgaggtggctcacgcctgtaatctcagcactttgggaggccagggcaggcagatcatctgaggtcaggagtttgagaccagcctggccaacatggtgaaaccctatctctactaaaaattaaa

SEQ ID NO: 441803 - DNA, 1211 bp, Homo sapiens
ggtgagacttctccgccgcctccgccgcagacgccgccgggcggcgcgtccgcgcgtcgtgctgcccgtatggctcaacttcgacggcgagccgcagccctacccaacgctgccgcctggcacgggccgccgcatccacagctaccgaggtcacctttggctcttcagagatgcagggacacacgatgggcttctggttaaccaaactgaattatttgtgccatctctcaatgttgacggacagcctatttttgccaatatcacactgccagtgtatactctgaaagagcgatgcctccaggttgtccggagcctagtcaagcctgagaattacaggagactggacatcgtcaggtcgctctacgaagatctggaagaccacccaaatgtgcagaaagacctggagcggctgacacaggagcgcattgcacatcaacggatgggagattgaagatttctgttgaaacttacactgtttcatctcagcttttgatggtactgatgagtcttgatctagatacaggactggttccttccttagtttcaaagtgtctcattctcagagtaaaataggcaccattgcttaaaagaaagttaactgacttcactaggcattgtgatgtttaggggcaaacatcacaaaatgtaatttaatgcctgcccattagagaagtatttatcaggagaaggtggtggcatttttgcttcctagtaagtcaggacagcttgtatgtaaggaggtttatataagtaattcagtgggaattgcagcatatcgtttaattttaagaaggcattggcatctgcttttaatggatgtataatacatccattctacatccgtagcggttggtgacttgtctgcctcctgctttgggaagactgaggcatccgtgaggcagggacaagtctttctcctctttgagaccccagtgcctgcacatcatgagccttcagtcagggtttgtcagaggaacaaaccaggggacactttgttagaaagtgcttagaggttctgcctctatttttgttggggggtgggagaggggaccttaaaatgtgtacagtgaacaaatgtcttaaagggaatcatttttgtaggaagcattttttataattttctaagtcgtgcactttctcggtccactcttgttgaatgtcaatcctagtttagaaacagtaataaaaccgacggcgtgggtcgacgatat

SEQ ID NO: 441804 - DNA, 826 bp, Homo sapiens
gcctcaacctcctgggctcaagccatccttccagctcatgcggatgatttattcccatttttcttgagacatgccaaacaaatatttcctgtgttggactgtaaggatgatctacgtaaaatcagtgacttaagaataccacctaactggtacccagatgctagagccatgcagcggaagataatatttcattcaggccccacaaacagtggaaagacttatcacgcaatccagaaatacttctcagcaaagtctggagtgtattgtggccctctaaaattactggcacatgagatcttcgaaaagagtaatgctgctggtgtgccatgtgacttggtgacaggtgaagagcgtgtgacagttcagccaaatgggaaacaggcttcacatgtttcttgtacagttgagatgtgcagtgttacaactccttatgaagtggctgtaattgatgaaattcaaatgattagagatccagccagaggatgggcctggaccagagcacttctaggactgtgtgctgaagaggttcatttgtgtggagaacctgctgctattgacctggtgatggagcttatgtacacaacgggggaggaagtggagatctctcttctattctctccttcctcttcttgttcttcatattctcctactcctctttcttcttctactactcgttttttctcttcttctcttatatgtacatcttctcactttcctctcctctatgtcccactcatcactctctatacttcatcttcttctactcttcacctcccttctatcttctccctttctcatttccattctcatccctctccctttctcc

SEQ ID NO: 441805 - DNA, 2484 bp, Homo sapiens
agcggactgtccgccgccgtgtccgcggctgcgccagacagtgtagaacctgcggcctcgatgtccttctcccgtgccctattgtgggctcggctcccggcggggcgccaggctggccaccgggcagccatctgctctgcccttcgtccccactttgggccctttcccggggttctggggcaagtttctgtccttgccaccgcctcctcctctgcctccggtggctccaaaataccaaacacgtccttgttcgtgcccctgactgtgaaacctcagggccccagcgccgacggcgacgtcggggccgagctaacccggcctctggacaagaatgaagtaaagaaggtcttagacaaattttacaagaggaaagaaattcagaaactgggtgctgattatggacttgatgctcgtctcttccaccaagctttcataagctttagaaattatattatgcagtctcattccctggatgtggacattcacattgttttgaatgatatttgcttcggtgcagctcatgcggatgatttattcccatttttcttgagacatgccaaacaaatatttcctgtgttggactgtaaggatgatctacgtaaaatcagtgacttaagaataccacctaactggtacccagatgctagagccatgcagcggaagataatatttcattcaggccccacaaacagtggaaagacttatcacgcaatccagaaatacttctcagcaaagtctggagtgtattgtggccctctaaaattactggcacatgagatcttcgaaaagagtaatgctgctggtgtgccatgtgacttggtgacaggtgaagagcgtgtgacagttcagccaaatgggaaacaggcttcacatgtttcttgtacagttgagatgtgcagtgttacaactccttatgaagtggctgtaattgatgaaattcaaatgattagagatccagccagaggatgggcctggaccagagcacttctaggactgtgtgctgaagaggttcatttgtgtggagaacctgctgctattgacctggtgatggagcttatgtacacaacgggggaggaagtggaggttcgagactataagaggcttacccccatttctgtgctggaccatgcactagaatctttagataaccttcggcctggggactgcattgtctgttttagcaagaatgatatttattctgtgagtcggcagattgaaattcggggattagaatcagctgttatatatggcagtctcccacctgggaccaaacttgctcaagcaaaaaagtttaatgatcccaatgacccatgcaaaatcttggttgctacagatgcaattggcatgggacttaatttgagcataaggagaattattttttactcccttataaagcccagtatcaatgaaaagggagagagagaactagaaccaatcacaacctctcaagccctgcagattgctggcagagctggcagattcagctcacggtttaaagaaggagaggttacaacaatgaatcatgaagatctcagtttattaaaggaaattttgaagaggcctgtggatcctataagggcagctggtcttcatccaactgctgagcagattgaaatgtttgcctaccatctccctgatgcaacactgtccaatctcattgatatttttgtagacttttcacaagttgatgggcagtattttgtctgcaatatggatgattttaaattttctgcagagttgatccagcatattccactaagtctgcgagtgaggtatgttttctgcacagctcctatcaacaagaagcagccttttgtgtgttcttcactgttacagtttgccaggcagtatagcaggaatgagcccctgacctttgcatggttacgccgatacatcaaatggcctttacttccacctaagaatattaaagacctcatggatcttgaagctgtccacgatgtcttggatctttacttgtggctaagctaccgatttatggatatgtttccagatgccagccttattcgagatctccagaaagaactagatggtattatccaagatggtgtgcacaatatcactaaattgattaaaatgtctgagacgcataagctgttgaatttggagggctttccatcagggagccagtcacgattgtcaggaaccttaaagagccaagctagaaggacacgcggcaccaaagctctagggagtaaagctactgagccacccagccccgatgcaggagagctgtcccttgcttccagattggtgcagcaaggactcctcactccagacatgctgaaacagctagaaaaagagtggatgacacaacaaactgaacacaacaaagaaaaaacagagtctgggactcatccaaaagggacgagaagaaagaagaaggaacctgattcggactagttttctgttcctgtttttttttttttatttaattttgcaaataaaaatttattttgaatcctt

SEQ ID NO: 441806 - DNA, 2619 bp, Homo sapiens
agcggactgtccgccgccgtgtccgcggctgcgccagacagtgtagaacctgcggcctcgatgtccttctcccgtgccctattgtgggctcggctcccggcggggcgccaggctggccaccgggcagccatctgctctgcccttcgtccccactttgggccctttcccggggttctggggcaagtttctgtccttgccaccgcctcctcctctgcctccggtggctccaaaataccaaacacgtccttgttcgtgcccctgactgtgaaacctcagggccccagcgccgacggcgacgtcggggccgagctaacccggcctctggacaagactattccaattcacctgaaaatgtaaatgtctttgctgcttcctgtaagaagatagaataaagacatgggtttgtcagcactagattttcttctggtggagaatccttagatacttcattgggtctgtgtgccagatgaagtaaagaaggtcttagacaaattttacaagaggaaagaaattcagaaactgggtgctgattatggacttgatgctcgtctcttccaccaagctttcataagctttagaaattatattatgcagtctcattccctggatgtggacattcacattgttttgaatgatatttgcttcggtgcagctcatgcggatgatttattcccatttttcttgagacatgccaaacaaatatttcctgtgttggactgtaaggatgatctacgtaaaatcagtgacttaagaataccacctaactggtacccagatgctagagccatgcagcggaagataatatttcattcaggccccacaaacagtggaaagacttatcacgcaatccagaaatacttctcagcaaagtctggagtgtattgtggccctctaaaattactggcacatgagatcttcgaaaagagtaatgctgctggtgtgccatgtgacttggtgacaggtgaagagcgtgtgacagttcagccaaatgggaaacaggcttcacatgtttcttgtacagttgagatgtgcagtgttacaactccttatgaagtggctgtaattgatgaaattcaaatgattagagatccagccagaggatgggcctggaccagagcacttctaggactgtgtgctgaagaggttcatttgtgtggagaacctgctgctattgacctggtgatggagcttatgtacacaacgggggaggaagtggaggttcgagactataagaggcttacccccatttctgtgctggaccatgcactagaatctttagataaccttcggcctggggactgcattgtctgttttagcaagaatgatatttattctgtgagtcggcagattgaaattcggggattagaatcagctgttatatatggcagtctcccacctgggaccaaacttgctcaagcaaaaaagtttaatgatcccaatgacccatgcaaaatcttggttgctacagatgcaattggcatgggacttaatttgagcataaggagaattattttttactcccttataaagcccagtatcaatgaaaagggagagagagaactagaaccaatcacaacctctcaagccctgcagattgctggcagagctggcagattcagctcacggtttaaagaaggagaggttacaacaatgaatcatgaagatctcagtttattaaaggaaattttgaagaggcctgtggatcctataagggcagctggtcttcatccaactgctgagcagattgaaatgtttgcctaccatctccctgatgcaacactgtccaatctcattgatatttttgtagacttttcacaagttgatgggcagtattttgtctgcaatatggatgattttaaattttctgcagagttgatccagcatattccactaagtctgcgagtgaggtatgttttctgcacagctcctatcaacaagaagcagccttttgtgtgttcttcactgttacagtttgccaggcagtatagcaggaatgagcccctgacctttgcatggttacgccgatacatcaaatggcctttacttccacctaagaatattaaagacctcatggatcttgaagctgtccacgatgtcttggatctttacttgtggctaagctaccgatttatggatatgtttccagatgccagccttattcgagatctccagaaagaactagatggtattatccaagatggtgtgcacaatatcactaaattgattaaaatgtctgagacgcataagctgttgaatttggagggctttccatcagggagccagtcacgattgtcaggaaccttaaagagccaagctagaaggacacgcggcaccaaagctctagggagtaaagctactgagccacccagccccgatgcaggagagctgtcccttgcttccagattggtgcagcaaggactcctcactccagacatgctgaaacagctagaaaaagagtggatgacacaacaaactgaacacaacaaagaaaaaacagagtctgggactcatccaaaagggacgagaagaaagaagaaggaacctgattcggactagttttctgttcctgtttttttttttttatttaattttgcaaataaaaatttattttgaatcctt

SEQ ID NO: 441807 - DNA, 1902 bp, Homo sapiens
agcggactgtccgccgccgtgtccgcggctgcgccagacagtgtagaacctgcggcctcgatgtccttctcccgtgccctattgtgggctcggctcccggcggggcgccaggctggccaccgggcagccatctgctctgcccttcgtccccactttgggccctttcccggggttctggggcaagtttctgtccttgccaccgcctcctcctctgcctccggtggctccaaaataccaaacacgtccttgttcgtgcccctgactgtgaaacctcagggccccagcgccgacggcgacgtcggggccgagctaacccggcctctggacaagaatgaagtggctgtaattgatgaaattcaaatgattagagatccagccagaggatgggcctggaccagagcacttctaggactgtgtgctgaagaggttcatttgtgtggagaacctgctgctattgacctggtgatggagcttatgtacacaacgggggaggaagtggaggttcgagactataagaggcttacccccatttctgtgctggaccatgcactagaatctttagataaccttcggcctggggactgcattgtctgttttagcaagaatgatatttattctgtgagtcggcagattgaaattcggggattagaatcagctgttatatatggcagtctcccacctgggaccaaacttgctcaagcaaaaaagtttaatgatcccaatgacccatgcaaaatcttggttgctacagatgcaattggcatgggacttaatttgagcataaggagaattattttttactcccttataaagcccagtatcaatgaaaagggagagagagaactagaaccaatcacaacctctcaagccctgcagattgctggcagagctggcagattcagctcacggtttaaagaaggagaggttacaacaatgaatcatgaagatctcagtttattaaaggaaattttgaagaggcctgtggatcctataagggcagctggtcttcatccaactgctgagcagattgaaatgtttgcctaccatctccctgatgcaacactgtccaatctcattgatatttttgtagacttttcacaagttgatgggcagtattttgtctgcaatatggatgattttaaattttctgcagagttgatccagcatattccactaagtctgcgagtgaggtatgttttctgcacagctcctatcaacaagaagcagccttttgtgtgttcttcactgttacagtttgccaggcagtatagcaggaatgagcccctgacctttgcatggttacgccgatacatcaaatggcctttacttccacctaagaatattaaagacctcatggatcttgaagctgtccacgatgtcttggatctttacttgtggctaagctaccgatttatggatatgtttccagatgccagccttattcgagatctccagaaagaactagatggtattatccaagatggtgtgcacaatatcactaaattgattaaaatgtctgagacgcataagctgttgaatttggagggctttccatcagggagccagtcacgattgtcaggaaccttaaagagccaagctagaaggacacgcggcaccaaagctctagggagtaaagctactgagccacccagccccgatgcaggagagctgtcccttgcttccagattggtgcagcaaggactcctcactccagacatgctgaaacagctagaaaaagagtggatgacacaacaaactgaacacaacaaagaaaaaacagagtctgggactcatccaaaagggacgagaagaaagaagaaggaacctgattcggactagttttctgttcctgtttttttttttttatttaattttgcaaataaaaatttattttgaatcctt

SEQ ID NO: 441808 - DNA, 1171 bp, Homo sapiens
agcggactgtccgccgccgtgtccgcggctgcgccagacagtgtagaacctgcggcctcgatgtccttctcccgtgccctattgtgggctcggctcccggcggggcgccaggctggccaccgggcagccatctgctctgcccttcgtccccactttgggccctttcccggggttctggggcaagtttctgtccttgccaccgcctcctcctctgcctccggtggctccaaaataccaaacacgtccttgttcgtgcccctgactgtgaaacctcagggccccagcgccgacggcgacgtcggggccgagctaacccggcctctggacaagaatgaagtaaagaaggtcttagacaaattttacaagaggaaagaaattcagaaactgggtgctgattatggacttgatgctcgtctcttccaccaagctttcataagctttagaaattatattatgcagtctcattccctggatgtggacattcacattgttttgaatgatatttgcttcggtgcagctcatgcggatgatttattcccatttttcttgagacatgccaaacaaatatttcctgtgttggactgtaaggatgatctacgtaaaatcagtgacttaagaataccacctaactggtacccagatgctagagccatgcagcggaagataatatttcattcaggccccacaaacagtggaaagacttatcacgcaatccagaaatacttctcagcaaagtctggagtgtattgtggccctctaaaattactggcacatgagatcttcgaaaagagtaatgctgctggtgtgccatgtgacttggtgacaggtgaagagcgtgtgacagttcagccaaatgggaaacaggcttcacatgtttcttgtacagttgagatgtgcagtgttacaactccttgtatgtatatgctgtttaagaaactatggtttggtatttttaattttttttttttttcaagacagagtcttgctctgttgtccaggctggaatgcaatggtactatctcggctcactgcgacctctgcctccccagttcaagcgattctcctgcctcagcctcccaagtagccgggattacaggtgcccgccaccacacccggctaatttttgtatttttactagagacggggtttctccatgttggtcaggctggtc

SEQ ID NO: 441809 - DNA, 473 bp, Homo sapiens
tgatattttttctcttttactcaaattcttggcatttacttcatatggtgagagcttagcctgaatgggactttatcgtgcaataacttaagaaaatttgtcctttttgaaaaaaaaaaaatcagcttatgattgttttttcttttactaaaaggcagctggtcttcatccaactgctgagcagattgaaatgtttgcctaccatctccctgatgcaacactgtccaatctcattgtaagtggaaactccctttcacatctcccctaaaaatgttgatatgtcaggtgattactggttaacctcatgagcatgaatggatagtctgcctttgagaagttgctatttataaaatttattttacaagtgaaaattttttctcaaaatcttttgggactttagccctgaggaatttcctctcagtatttcaggtggggaaggatatgagggagtgattaaagcaagcctttatgga

SEQ ID NO: 441810 - DNA, 2600 bp, Homo sapiens
agcggactgtccgccgccgtgtccgcggctgcgccagacagtgtagaacctgcggcctcgatgtccttctcccgtgccctattgtgggctcggctcccggcggggcgccaggctggccaccgggcagccatctgctctgcccttcgtccccactttgggccctttcccggggttctggggcaagtttctgtccttgccaccgcctcctcctctgcctccggtggctccaaaataccaaacacgtccttgttcgtgcccctgactgtgaaacctcagggccccagcgccgacggcgacgtcggggccgagctaacccggcctctggacaagaatgaagtaaagaaggtcttagacaaattttacaagaggaaagaaattcagaaactgggtgctgattatggacttgatgctcgtctcttccaccaagctttcataagctttagaaattatattatgcagtctcattccctggatgtggacattcacattgttttgaatgatatttgcttcggtgcagctcatgcggatgatttattcccatttttcttgagacatgccaaacaaatatttcctgtgttggactgtaaggatgatctacgtaaaatcagtgacttaagaataccacctaactggtacccagatgctagagccatgcagcggaagataatatttcattcaggccccacaaacagtggaaagacttatcacgcaatccagaaatacttctcagcaaagtctggagtgtattgtggccctctaaaattactggcacatgagatcttcgaaaagagtaatgctgctggtgtgccatgtgacttggtgacaggtgaagagcgtgtgacagttcagccaaatgggaaacaggcttcacatgtttcttgtacagttgagatgtgcagtgttacaactccttatgaagtggctgtaattgatgaaattcaaatgattagagatccagccagaggatgggcctggaccagagcacttctaggactgtgtgctgaagaggttcatttgtgtggagaacctgctgctattgacctggtgatggagcttatgtacacaacgggggaggaagtggaggttcgagactataagaggcttacccccatttctgtgctggaccatgcactagaatctttagataaccttcggcctggggactgcattgtctgttttagcaagaatgatatttattctgtgagtcggcagattgaaattcggggattagaatcagctgttatatatggcagtctcccacctgggaccaaacttgctcaagcaaaaaagtttaatgatcccaatgacccatgcaaaatcttggttgctacagatgcaattggcatgggacttaatttgagcataaggagaattattttttactcccttataaagcccagtatcaatgaaaagggagagagagaactagaaccaatcacaacctctcaagccctgcagattgctggcagagctggcagattcagctcacggtttaaagaaggagaggttacaacaatgaatcatgaagatctcagtttattaaaggaaattttgaagaggcctgtggatcctataagggcagctggtcttcatccaactgctgagcagattgaaatgtttgcctaccatctccctgatgcaacactgtccaatctcattgatatttttgtagacttttcacaagttgatgggcagtattttgtctgcaatatggatgattttaaattttctgcagagttgatccagcatattccactaagtctgcgagtgaggtatgttttctgcacagctcctatcaacaagaagcagccttttgtgtgttcttcactgttacagtttgccaggcagtatagcaggaatgagcccctgacctttgcatggttacgccgatacatcaaatggcctttacttccacctaagaatattaaagacctcatggatcttgaagctgtccacgatgtcttggatctttacttgtggctaagctaccgatttatggatatgtttccagatgccagccttattcgagatctccagaaagaactagatggtattatccaagatggtgtgcacaatatcactaaattgattaaaatgtctgagacgcataagctgttgaatttggagggctttccatcagggagccagtcacgattgtcaggaaccttaaagagccaagctagaaggacacgcggcaccaaagctctagggagtaaagctactgagccacccagccccgatgcaggagagctgtcccttgcttccagattggtgcagcaaggactcctcactccagacatgctgaaacagctagaaaaagagtggatgacacaacaaactgaacacaacaaagaaaaaacagagtctgggactcatccaaaagggacgagaagaaagaagaaggaacctgattcggactagttttctgttcctgtttttttttttttatttaattttgcaaataaaaatttattttgaatccttaaaacaacaagcgaacacccaaaacacaaaacgggaccagacagacaacaagaataccaccccggaaggcacaatcccacacacaacataacgggggtccccacaaaaaaaatcgc

SEQ ID NO: 441811 - DNA, 2620 bp, Homo sapiens
gactccatgtccttctgccgtgcgctatgggtgggctcggctcccgggcggtgccgccgaggcgtgggcacaggcgtcagtgcgatgctgcatctgcccttactgctacccacacttagtggacccattctgctcgcggcggtttctcggaggccagatatacatgctccgttagccaaacgtgactcacgtcctgcatgcacatccgagctgcgctcacgaggatagtacctatagagcgagggatccttgtgttgtcagagccctcttgaacgtgtagaagagcttccagggtgccctaggagccagaacggacgaccgtcagggcgcacggatggcttaaccacccggtgccgtgctgtgcacgatatgacattggacagtatagacgaatagtgtactctaagcacgagaacagtatattacgacatgaaggaaacacgcaagagtatccatcacatagcctgcgtgtcgacttgaatatactgagaacttcgtattgcatcgattcttcgtatttgcgacctacagactttatcatagaaactattttaaataaattgactattatgtcagctactcaatcgctccatggaactgctggaacaattcacacttgcgtgtttagtcattgatatcggcttcgagtgcggctcatgcggatgatttattcccatttttcttgagacatgccaaacaaatatttcctgtgttggactgtaaggatgatctacgtaaaatcagtgacttaagaataccacctaactggtacccagatgctagagccatgcagcggaagataatatttcattcaggccccacaaacagtggaaagacttatcacgcaatccagaaatacttctcagcaaagtctggagtgtattgtggccctctaaaattactggcacatgagatcttcgaaaagagtaatgctgctggtgtgccatgtgacttggtgacaggtgaagagcgtgtgacagttcagccaaatgggaaacaggcttcacatgtttcttgtacagttgagatgtgcagtgttacaactccttatgaagtggctgtaattgatgaaattcaaatgattagagatccagccagaggatgggcctggaccagagcacttctaggactgtgtgctgaagaggttcatttgtgtggagaacctgctgctattgacctggtgatggagcttatgtacacaacgggggaggaagtggaggttcgagactataagaggcttacccccatttctgtgctggaccatgcactagaatctttagataaccttcggcctggggactgcattgtctgttttagcaagaatgatatttattctgtgagtcggcagattgaaattcggggattagaatcagctgttatatatggcagtctcccacctgggaccaaacttgctcaagcaaaaaagtttaatgatcccaatgacccatgcaaaatcttggttgctacagatgcaattggcatgggacttaatttgagcataaggagaattattttttactcccttataaagcccagtatcaatgaaaagggagagagagaactagaaccaatcacaacctctcaagccctgcagattgctggcagagctggcagattcagctcacggtttaaagaaggagaggttacaacaatgaatcatgaagatctcagtttattaaaggaaattttgaagaggcctgtggatcctataagggcagctggtcttcatccaactgctgagcagattgaaatgtttgcctaccatctccctgatgcaacactgtccaatctcattgatatttttgtagacttttcacaagttgatgggcagtattttgtctgcaatatggatgattttaaattttctgcagagttgatccagcatattccactaagtctgcgagtgaggtatgttttctgcacagctcctatcaacaagaagcagccttttgtgtgttcttcactgttacagtttgccaggcagtatagcaggaatgagcccctgacctttgcatggttacgccgatacatcaaatggcctttacttccacctaagaatattaaagacctcatggatcttgaagctgtccacgatgtcttggatctttacttgtggctaagctaccgatttatggatatgtttccagatgccagccttattcgagatctccagaaagaactagatggtattatccaagatggtgtgcacaatatcactaaattgattaaaatgtctgagacgcataagctgttgaatttggagggctttccatcagggagccagtcacgattgtcaggaaccttaaagagccaagctagaaggacacgcggcaccaaagctctagggagtaaagctactgagccacccagccccgatgcaggagagctgtcccttgcttccagattggtgcagcaaggactcctcactccagacatgctgaaacagctagaaaaagagtggatgacacaacaaactgaacacaacaaagaaaaaacagagtctgggactcatccaaaagggacgagaagaaagaagaaggaacctgattcggactagttttctgttcctgtttttttttttttatttaattttgcaaataaaaatttattttgaatcctt

SEQ ID NO: 441812 - DNA, 1106 bp, Homo sapiens
agcggactgtccgccgccgtgtccgcggctgcgccagacagtgtagaacctgcggcctcgatgtccttctcccgtgccctattgtgggctcggctcccggcggggcgccaggctggccaccgggcagccatctgctctgcccttcgtccccactttgggccctttcccggggttctggggcaagtttctgtccttgccaccgcctcctcctctgcctccggtggctccaaaataccaaacacgtccttgttcgtgcccctgactgtgaaacctcagggccccagcgccgacggcgacgtcggggccgagctaacccggcctctggacaagaatgaagtaaagaaggtcttagacaaattttacaagaggaaagaaattcagaaactgggtgctgattatggacttgatgctcgtctcttccaccaagctttcataagctttagaaattatattatgcagtctcattccctggatgtggacattcacattgttttgaatgatatttgcttcggtgcagctcatgcggatgatttattcccatttttcttgagacatgccaaacaaatatttcctgtgttggactgtaaggatgatctacgtaaaatcagtgacttaagaataccacctaactggtacccagatgctagagccatgcagcggaagataatatttcattcaggccccacaaacagtggaaagacttatcacgcaatccagaaatacttctcagcaaagtctggagtgtattgtggccctctaaaattactggcacatgagatcttcgaaaagagtaatgctgctggtgtgccatgtgacttggtgacaggtgaagagcgtgtgacagttcagccaaatgggaaacaggcttcacatgtttcttgtacagttgagatgtgcagtgttacaactccttatgaagtggctgtaattgatgaaattcaaatgattagagatccagccagaggatgggcctggaccagagcacttctaggttggtggtcgtaatgctataaaacccgtgctttatgacatctgcgctgagatgcatttttatctgcttgccattgccaaccaaatagagtcacctagaacctttctttttgaca

SEQ ID NO: 441813 - DNA, 3724 bp, Homo sapiens
ttcccacttccgacccccattccccacctaagccttgggtgcttgtggcctctcctcttgtgcccatgtactgcccacccagatgcacctcggcttgccctcatgtccccatctccttgcccaggagcccctgagtgtgtccctccttggccctgtggccacaggggagctgttccctccacaaaggctgctcttctgctctgtgcctgggcctcacccccaaaccccacccccagaactgcaatgagcgcttccagtacaagtaccagctgcggtcacacatgagcatccacattggccacaagcagttcatgtgccaatggtgcggcaaggacttcaacatgaagcagtacttcgatgagcacatgaagacccacacaggagagaagccgtacatctgcgagatctgtggcaagagcttcaccagccggcccaacatgaagcggcaccggcgcacgcacacgggcgagaagccgtacccgtgcgacgtgtgtggccagcgcttccgcttctccaacatgctcaaggcccacaaggagaagtgcttccgcgtcagccacaccctggccggcgacggcgtccccgctgccccaggcctgcccccaacccagccccaggcgcacgcactgcccctgctcccggggctgccccagaccctgccgcccccgccccacctgccgcccccgcctccgctcttccccaccactgccagccccggcgggaggatgaacgccaacaactagctgccgagctgcacccgtgcacccgctggggcctggagtcagggcccactccaggagggacccactgccttcccggggagcacagtagtgcgggcctgggccctgctccacctccagaagtggctggatgtaccctgcctgaggccccgacgaggaggggtatgcaggctggcaggccccagagctggtggagggcatctcactcccaagtgccccccctttctgtgactccttgaagcctttacttttttttttttttggaagtgaaggaaaaagaaactatttacagcactcccctccaggtgaggggggtgctgggggtctgcagcagaaagaaaggggcctgggcagcaggtgtggccagtccctctgccaaggcctgtgccagaggggttggccagttggagcctgggtcagcctcagcagcctatccccatgtcctctatgcccctaatttgcttcctcatcttggagggtttggggagaagttggcgtgccacccccacaacccctgaggaggtgtagacccagtctgagagccgcaagcactgaggcagggcctgagactggacctgggtgagcgtggggggtggagggtggcgaggtgcggagactgcagaccagtgcttcactgtgtggagtggggcaggcaggggctggaccccagggacttgccttccccacccactctgctgccagcaggcccagggatccctgacctgcaccaggtggcaccaagggtcctgagtcctggagatgtccccagaagctgctgtgcctcacagcgctgtgagccagaccctccttgggcagacaggctgactggcagcaccagctttgggggcagagtcctaggatgaggcttgggcagtgctggtagggtttcaaggtgctattagtggggcaggggcagggcggctgctcacagagcaccccagttcctcaccagctactctggccatatatcccacaccagaaggaacaagtgtggctgtgtccatctctgctcccccaaaggcccgctctaggccttatcctccctctaggtcctgccacaacctgtccctggctggctccagcgtcctcgtccctcctgggcctgtgcaccggtgggtggggcgcccatagcactgccggtaaaggagcctgcatgttcaggcccctcgggggattggggggactggggaggcgcagcctagacccaattgcttgcccccatgaggctagcactaataggaaacccttttttgttgtcatttaatgtctttattcctgcctttaatatggggaggaaggttccataagctacatgtttcctagttaagctctttcctattgtgtttatacagttttgtttgttatactctttgcaccttaaacccccaccactccccgacactattgccttcccagcatggctggagtgggaagaggcttgggccccgggggaatggttagggggactgaacccctctgaccttatgaggcccatggcactggggcagggagctggggacattttaatcatcaataaacgaagcactttattctgtacagatttgggcaggcccaaggtgcccgagtgatctgaggatttataatccaagccacaccaccctggttgttctctgggcttggagggtacagtgccagcagcttccttgcccaattgatgttggagctgtagacgtacgctcaggcgctcctgctgtcctgggggagagaaggttcgcccctccccgaggaagaaggcttctggtcaggacccccaccccaaggctggggactccaggctcctgctttactgtagctctttttcttccttgcactccttgatctttgggcttccgtgatgtcctcagggtccccccctccctgttgctatttttaatctctagtcccagtgcctggcagctctttggagctggctcacattttcccaaaaaaagttgatctctcccagtgggctgtaggcagggtcctccatgggtttccaacccccatcactggcaccaggatctcccacaggcactggtggtgtcatcacctgctggccccactacagcctgagtaggcctgagtggccgtggccaggctgagacctgtcaggccatactgacaagcagaggtcagagacactggtggggagctggcaatgaaaccctgtcctgggacatgggtttcatgttcttgtacacttcccctctgggatcaggtgaggggtccagacagctgaccagacagcttgacagctggtcaagacggtcacgggagctctaggtgggcacaaccaacccctctcctgggaggcccctgccccactggggataggagcctgtgtccctggtgctaagcactctcttcacttgggccattgttggtgggggctcctttccggccagaccacaaggccagaagcaataatggcacctcagcagttccagtatggataggggttcctgttttactagcttttacatctttttatttaaaacaaaacaacacaaaaaaacaatgtgcccccagatgtcagaatgaggcgactagggcaccatactcactttccagggctgggggaagggggacgcaggatcatcccctcccaaggagatctgtgggggtcccaccgtccatctggacttctcagcctgtttggctagaactcaggcctggagtctgggtctgccccctccccggctccttggggctctctggtctcaggccagctggcgatgggtggctagagtgatgaactcaagccctgtggccacagttctgggagccttcaaccctggctcatgctgccatagtctccacggtgcccttcacagagggcttggtagtggcagaatggccatgcccaggtgtgtgttgagaccattgacaactgctcgtgtacaggcaccccacagccccagagcatggggcacagcaggcatgcgagtgagaggatgaaggggaataaagtcagtacaactcgt

SEQ ID NO: 441814 - DNA, 266 bp, Homo sapiens
gctcccctccccccgggtctggcctccagccccggcattcgctctcctcctttcacagttctgggagccttcaaccctggctcatgctgccatagtctccacggtgcccttcacagagggcttggtagtggcagaatggccatgcccaggtgtgtgttgagaccattgacaactgctcgtgtacaggcaccccacagccccagagcatggggcacagcaggcatgcgagtgagaggatgaaggggaataaagtcagtacaactcgt

SEQ ID NO: 441815 - DNA, 4310 bp, Homo sapiens
gaagaggaaggtggtggcagtggacgggaggaggaggaggaggaagagggtggcagtcagggagaagaggaagaagaggaggaggacgggcacagtgagcaggaagaggaagaggaggaggaagaggaggaagggcctagtgagcaggatcaagagagctctgaggaggaggagggggaggagggggaggctgggggcaagcaggggccacggggaagccgaagcagccgggcagacccccctccccacagtcacatggccacacggtcccgggagaacgcccggcgccggggtacccctgaacctgaagaagctgggcggcggggtgggaagaggccaaagccaccccctggagtggcctctgcatcggcccgagggccgccagccactgatgggctgggggccaaggtgaagctggaggagaagcagcaccatccatgccagaagtgcccacgagttttcaacaaccgctggtacctggagaaacacatgaatgtgacccacagccgcatgcagatctgcgaccagtgcggcaagcgcttcctgctggagagcgagctgctgctgcacaggcagacagactgcgagcgcaacatccagtgtgtgacatgtggcaaagctttcaagaagctttggtccctccatgagcataacaagattgtgcacggctacgcagagaagaagttctcatgcgagatctgtgagaagaagttctacaccatggcccacgtgcgtaagcacatggttgcccacaccaaggacatgcccttcacctgcgagacctgcggaaagtccttcaagcgcagcatgtccctcaaggtgcactcactgcagcactcaggggagaagccgttcagatgtgagaactgcaatgagcgcttccagtacaagtaccagctgcggtcacacatgagcatccacattggccacaagcagttcatgtgccaatggtgcggcaaggacttcaacatgaagcagtacttcgatgagcacatgaagacccacacaggagagaagccgtacatctgcgagatctgtggcaagagcttcaccagccggcccaacatgaagcggcaccggcgcacgcacacgggcgagaagccgtacccgtgcgacgtgtgtggccagcgcttccgcttctccaacatgctcaaggcccacaaggagaagtgcttccgcgtcagccacaccctggccggcgacggcgtccccgctgccccaggcctgcccccaacccagccccaggcgcacgcactgcccctgctcccggggctgccccagaccctgccgcccccgccccacctgccgcccccgcctccgctcttccccaccactgccagccccggcgggaggatgaacgccaacaactagctgccgagctgcacccgtgcacccgctggggcctggagtcagggcccactccaggagggacccactgccttcccggggagcacagtagtgcgggcctgggccctgctccacctccagaagtggctggatgtaccctgcctgaggccccgacgaggaggggtatgcaggctggcaggccccagagctggtggagggcatctcactcccaagtgccccccctttctgtgactccttgaagcctttacttttttttttttttggaagtgaaggaaaaagaaactatttacagcactcccctccaggtgaggggggtgctgggggtctgcagcagaaagaaaggggcctgggcagcaggtgtggccagtccctctgccaaggcctgtgccagaggggttggccagttggagcctgggtcagcctcagcagcctatccccatgtcctctatgcccctaatttgcttcctcatcttggagggtttggggagaagttggcgtgccacccccacaacccctgaggaggtgtagacccagtctgagagccgcaagcactgaggcagggcctgagactggacctgggtgagcgtggggggtggagggtggcgaggtgcggagactgcagaccagtgcttcactgtgtggagtggggcaggcaggggctggaccccagggacttgccttccccacccactctgctgccagcaggcccagggatccctgacctgcaccaggtggcaccaagggtcctgagtcctggagatgtccccagaagctgctgtgcctcacagcgctgtgagccagaccctccttgggcagacaggctgactggcagcaccagctttgggggcagagtcctaggatgaggcttgggcagtgctggtagggtttcaaggtgctattagtggggcaggggcagggcggctgctcacagagcaccccagttcctcaccagctactctggccatatatcccacaccagaaggaacaagtgtggctgtgtccatctctgctcccccaaaggcccgctctaggccttatcctccctctaggtcctgccacaacctgtccctggctggctccagcgtcctcgtccctcctgggcctgtgcaccggtgggtggggcgcccatagcactgccggtaaaggagcctgcatgttcaggcccctcgggggattggggggactggggaggcgcagcctagacccaattgcttgcccccatgaggctagcactaataggaaacccttttttgttgtcatttaatgtctttattcctgcctttaatatggggaggaaggttccataagctacatgtttcctagttaagctctttcctattgtgtttatacagttttgtttgttatactctttgcaccttaaacccccaccactccccgacactattgccttcccagcatggctggagtgggaagaggcttgggccccgggggaatggttagggggactgaacccctctgaccttatgaggcccatggcactggggcagggagctggggacattttaatcatcaataaacgaagcactttattctgtacagatttgggcaggcccaaggtgcccgagtgatctgaggatttataatccaagccacaccaccctggttgttctctgggcttggagggtacagtgccagcagcttccttgcccaattgatgttggagctgtagacgtacgctcaggcgctcctgctgtcctgggggagagaaggttcgcccctccccgaggaagaaggcttctggtcaggacccccaccccaaggctggggactccaggctcctgctttactgtagctctttttcttccttgcactccttgatctttgggcttccgtgatgtcctcagggtccccccctccctgttgctatttttaatctctagtcccagtgcctggcagctctttggagctggctcacattttcccaaaaaaagttgatctctcccagtgggctgtaggcagggtcctccatgggtttccaacccccatcactggcaccaggatctcccacaggcactggtggtgtcatcacctgctggccccactacagcctgagtaggcctgagtggccgtggccaggctgagacctgtcaggccatactgacaagcagaggtcagagacactggtggggagctggcaatgaaaccctgtcctgggacatgggtttcatgttcttgtacacttcccctctgggatcaggtgaggggtccagacagctgaccagacagcttgacagctggtcaagacggtcacgggagctctaggtgggcacaaccaacccctctcctgggaggcccctgccccactggggataggagcctgtgtccctggtgctaagcactctcttcacttgggccattgttggtgggggctcctttccggccagaccacaaggccagaagcaataatggcacctcagcagttccagtatggataggggttcctgttttactagcttttacatctttttatttaaaacaaaacaacacaaaaaaacaatgtgcccccagatgtcagaatgaggcgactagggcaccatactcactttccagggctgggggaagggggacgcaggatcatcccctccagcctgtttggctagaactcaggcctggagtctgggtctgccccctccccggctccttggggctctctggtctcaggccagctggcgatgggtggctagagtgatgaactcaagccctgtggccacagttctgggagccttcaaccctggctcatgctgccatagtctccacggtgcccttcacagagggcttggtagtggcagaatggccatgcccaggtgtgtgttgagaccattgacaactgctcgtgtacaggcaccccacagccccagagcatggggcacagcaggcatgcgagtgagaggatgaaggggaataaagtcagtacaactcgt

SEQ ID NO: 441816 - DNA, 3773 bp, Homo sapiens
gaagaggaaggtggtggcagtggacgggaggaggaggaggaggaagagggtggcagtcagggagaagaggaagaagaggaggaggacgggcacagtgagcaggaagaggaagaggaggaggaagaggaggaagggcctagtgagcaggatcaagagagctctgaggaggaggagggggaggagggggaggctgggggcaagcaggggccacggggaagccgaagcagccgggcagacccccctccccacagtcacatggccacacggtcccgggagaacgcccggcgccggggtacccctgaacctgaagaagctgggcggcggggtgggaagaggccaaagccaccccctggagtggcctctgcatcggcccgagggccgccagccactgatgggctgggggccaaggtgaagctggaggagaagcagcaccatccatgccagaagtgcccacgagttttcaacaaccgctggtacctggagaaacacatgaatgtgacccacagccgcatgcagatctgcgaccagtgcggcaagcgcttcctgctggagagcgagctgctgctgcacaggcagacagactgcgagcgcaacatccagtgtgtgacatgtggcaaagctttcaagaagctttggtccctccatgagcataacaagattgtgcacggctacgcagagaagaagttctcatgcgagatctgtgagaagaagttctacaccatggcccacgtgcgtaagcacatggttgcccacaccaaggacatgcccttcacctgcgagacctgcggaaagtccttcaagcgcagcatgtccctcaaggtgcactcactgcagcactcaggggagaagccgttcagatgtgagaactgcaatgagcgcttccagtacaagtaccagctgcggtcacacatgagcatccacattggccacaagcagttcatgtgccaatggtgcggcaaggacttcaacatgaagcagtacttcgatgagcacatgaagacccacacaggagagaagccgtacatctgcgagatctgtggcaagagcttcaccagccggcccaacatgaagcggcaccggcgcacgcacacgggcgagaagccgtacccgtgcgacgtgtgtggccagcgcttccgcttctccaacatgctcaaggcccacaaggagaagtgcttccgcgtcagccacaccctggccggcgacggcgtccccgctgccccaggcctgcccccaacccagccccaggcgcacgcactgcccctgctcccggggctgccccagaccctgccgcccccgccccacctgccgcccccgcctccgctcttccccaccactgccagccccggcgggaggatgaacgccaacaactagctgccgagctgcacccgtgcacccgctggggcctggagtcagggcccactccaggagggacccactgccttcccggggagcacagtagtgcgggcctgggccctgctccacctccagaagtggctggatgtaccctgcctgaggccccgacgaggaggggtatgcaggctggcaggccccagagctggtggagggcatctcactcccaagtgccccccctttctgtgactccttgaagcctttacttttttttttttttggaagtgaaggaaaaagaaactatttacagcactcccctccaggtgaggggggtgctgggggtctgcagcagaaagaaaggggcctgggcagcaggtgtggccagtccctctgccaaggcctgtgccagaggggttggccagttggagcctgggtcagcctcagcagcctatccccatgtcctctatgcccctaatttgcttcctcatcttggagggtttggggagaagttggcgtgccacccccacaacccctgaggaggtgtagacccagtctgagagccgcaagcactgaggcagggcctgagactggacctgggtgagcgtggggggtggagggtggcgaggtgcggagactgcagaccagtgcttcactgtgtggagtggggcaggcaggggctggaccccagggacttgccttccccacccactctgctgccagcaggcccagggatccctgacctgcaccaggtggcaccaagggtcctgagtcctggagatgtccccagaagctgctgtgcctcacagcgctgtgagccagaccctccttgggcagacaggctgactggcagcaccagctttgggggcagagtcctaggatgaggcttgggcagtgctggtagggtttcaaggtgctattagtggggcaggggcagggcggctgctcacagagcaccccagttcctcaccagctactctggccatatatcccacaccagaaggaacaagtgtggctgtgtccatctctgctcccccaaaggcccgctctaggccttatcctccctctaggtcctgccacaacctgtccctggctggctccagcgtcctcgtccctcctgggcctgtgcaccggtgggtggggcgcccatagcactgccggtaaaggagcctgcatgttcaggcccctcgggggattggggggactggggaggcgcagcctagacccaattgcttgcccccatgaggctagcactaataggaaacccttttttgttgtcatttaatgtctttattcctgcctttaatatggggaggaaggttccataagctacatgtttcctagttaagctctttcctattgtgtttatacagttttgtttgttatactctttgcaccttaaacccccaccactccccgacactattgccttcccagcatggctggagtgggaagaggcttgggccccgggggaatggttagggggactgaacccctctgaccttatgaggcccatggcactggggcagggagctggggacattttaatcatcaataaacgaagcactttattctgtacagatttgggcaggcccaaggtgcccgagtgatctgaggatttataatccaagccacaccaccctggttgttctctgggcttggagggtacagtgccagcagcttccttgcccaattgatgttggagctgtagacgtacgctcaggcgctcctgctgtcctgggggagagaaggttcgcccctccccgaggaagaaggcttctggtcaggacccccaccccaaggctggggactccaggctcctgctttactgtagctctttttcttccttgcactccttgatctttgggcttccgtgatgtcctcagggtccccccctccctgttgctatttttaatctctagtcccagtgcctggcagctctttggagctggctcacattttcccaaaaaaagttgatctctcccagtgggctgtaggcagggtcctccatgggtttccaacccccatcactggcaccaggatctcccacaggcactggtggtgtcatcacctgctggccccactacagcagcctgtttggctagaactcaggcctggagtctgggtctgccccctccccggctccttggggctctctggtctcaggccagctggcgatgggtggctagagtgatgaactcaagccctgtggccacagttctgggagccttcaaccctggctcatgctgccatagtctccacggtgcccttcacagagggcttggtagtggcagaatggccatgcccaggtgtgtgttgagaccattgacaactgctcgtgtacaggcaccccacagccccagagcatggggcacagcaggcatgcgagtgagaggatgaaggggaataaagtcagtacaactcgt

SEQ ID NO: 441817 - DNA, 1038 bp, Homo sapiens
ggggggttggaaacccatggaggaccctgcctacagcccactgggagagatcaacccccatcactggcaccaggatctcccacaggcactggtggtgtcatcacctgctggccccactacagcctgagtaggcctgagtggccgtggccaggctgagacctgtcaggccatactgacaagcagaggtcagagacactggtggggagctggcaatgaaaccctgtcctgggacatgggtttcatgttcttgtacacttcccctctgggatcaggtgaggggtccagacagctgaccagacagcttgacagctggtcaagacggtcacgggagctctaggtgggcacaaccaacccctctcctgggaggcccctgccccactggggataggagcctgtgtccctggtgctaagcactctcttcacttgggccattgttggtgggggctcctttccggccagaccacaaggccagaagcaataatggcacctcagcagttccagtatggataggggttcctgttttactagcttttacatctttttatttaaaacaaaacaacacaaaaaaacaatgtgcccccagatgtcagaatgaggcgactagggcaccatactcactttccagggctgggggaagggggacgcaggatcatcccctcccaaggagatctgtgggggtcccaccgtccatctggacttctcagcctgtttggctagaactcaggcctggagtctgggtctgccccctccccggctccttggggctctctggtctcaggccagctggcgatgggtggctagagtgatgaactcaagccctgtggccacagttctgggagccttcaaccctggctcatgctgccatagtctccacggtgcccttcacagagggcttggtagtggcagaatggccatgcccaggtgtgtgttgagaccattgacaactgctcgtgtacaggcaccccacagccccagagcatggggcacagcaggcatgcgagtgagaggatgaaggggaataaagtcagtacaactcgt

SEQ ID NO: 441818 - DNA, 427 bp, Homo sapiens
tgtgtgtttgggggtgtttaaggagttttcatccccaaccttagaaacatcagagctggctggctgttggcatcaagggctctccagcatatttcaagtgggaaaactgaggccagacgggggcagtagcttgcccaagtccaagaccctggggactcaggacccagggcctcaagtcctcttattctgcagtgtgtgacatgtggcaaagctttcaagaagctttggtccctccatgagcataacaagattgtgcacggctacgcagagaagaagttctcatgcgagatctgtgagaagaagttctacaccatggcccacgtgcgtaagcacatggttggtaagtctgggccactgggggatggagccagaggatagagatggaccagcttctggctggtggatgggaaagacttcacatccaagg

SEQ ID NO: 441819 - DNA, 4352 bp, Homo sapiens
gaagaggaaggtggtggcagtggacgggaggaggaggaggaggaagagggtggcagtcagggagaagaggaagaagaggaggaggacgggcacagtgagcaggaagaggaagaggaggaggaagaggaggaagggcctagtgagcaggatcaagagagctctgaggaggaggagggggaggagggggaggctgggggcaagcaggggccacggggaagccgaagcagccgggcagacccccctccccacagtcacatggccacacggtcccgggagaacgcccggcgccggggtacccctgaacctgaagaagctgggcggcggggtgggaagaggccaaagccaccccctggagtggcctctgcatcggcccgagggccgccagccactgatgggctgggggccaaggtgaagctggaggagaagcagcaccatccatgccagaagtgcccacgagttttcaacaaccgctggtacctggagaaacacatgaatgtgacccacagccgcatgcagatctgcgaccagtgcggcaagcgcttcctgctggagagcgagctgctgctgcacaggcagacagactgcgagcgcaacatccagtgtgtgacatgtggcaaagctttcaagaagctttggtccctccatgagcataacaagattgtgcacggctacgcagagaagaagttctcatgcgagatctgtgagaagaagttctacaccatggcccacgtgcgtaagcacatggttgcccacaccaaggacatgcccttcacctgcgagacctgcggaaagtccttcaagcgcagcatgtccctcaaggtgcactcactgcagcactcaggggagaagccgttcagatgtgagaactgcaatgagcgcttccagtacaagtaccagctgcggtcacacatgagcatccacattggccacaagcagttcatgtgccaatggtgcggcaaggacttcaacatgaagcagtacttcgatgagcacatgaagacccacacaggagagaagccgtacatctgcgagatctgtggcaagagcttcaccagccggcccaacatgaagcggcaccggcgcacgcacacgggcgagaagccgtacccgtgcgacgtgtgtggccagcgcttccgcttctccaacatgctcaaggcccacaaggagaagtgcttccgcgtcagccacaccctggccggcgacggcgtccccgctgccccaggcctgcccccaacccagccccaggcgcacgcactgcccctgctcccggggctgccccagaccctgccgcccccgccccacctgccgcccccgcctccgctcttccccaccactgccagccccggcgggaggatgaacgccaacaactagctgccgagctgcacccgtgcacccgctggggcctggagtcagggcccactccaggagggacccactgccttcccggggagcacagtagtgcgggcctgggccctgctccacctccagaagtggctggatgtaccctgcctgaggccccgacgaggaggggtatgcaggctggcaggccccagagctggtggagggcatctcactcccaagtgccccccctttctgtgactccttgaagcctttacttttttttttttttggaagtgaaggaaaaagaaactatttacagcactcccctccaggtgaggggggtgctgggggtctgcagcagaaagaaaggggcctgggcagcaggtgtggccagtccctctgccaaggcctgtgccagaggggttggccagttggagcctgggtcagcctcagcagcctatccccatgtcctctatgcccctaatttgcttcctcatcttggagggtttggggagaagttggcgtgccacccccacaacccctgaggaggtgtagacccagtctgagagccgcaagcactgaggcagggcctgagactggacctgggtgagcgtggggggtggagggtggcgaggtgcggagactgcagaccagtgcttcactgtgtggagtggggcaggcaggggctggaccccagggacttgccttccccacccactctgctgccagcaggcccagggatccctgacctgcaccaggtggcaccaagggtcctgagtcctggagatgtccccagaagctgctgtgcctcacagcgctgtgagccagaccctccttgggcagacaggctgactggcagcaccagctttgggggcagagtcctaggatgaggcttgggcagtgctggtagggtttcaaggtgctattagtggggcaggggcagggcggctgctcacagagcaccccagttcctcaccagctactctggccatatatcccacaccagaaggaacaagtgtggctgtgtccatctctgctcccccaaaggcccgctctaggccttatcctccctctaggtcctgccacaacctgtccctggctggctccagcgtcctcgtccctcctgggcctgtgcaccggtgggtggggcgcccatagcactgccggtaaaggagcctgcatgttcaggcccctcgggggattggggggactggggaggcgcagcctagacccaattgcttgcccccatgaggctagcactaataggaaacccttttttgttgtcatttaatgtctttattcctgcctttaatatggggaggaaggttccataagctacatgtttcctagttaagctctttcctattgtgtttatacagttttgtttgttatactctttgcaccttaaacccccaccactccccgacactattgccttcccagcatggctggagtgggaagaggcttgggccccgggggaatggttagggggactgaacccctctgaccttatgaggcccatggcactggggcagggagctggggacattttaatcatcaataaacgaagcactttattctgtacagatttgggcaggcccaaggtgcccgagtgatctgaggatttataatccaagccacaccaccctggttgttctctgggcttggagggtacagtgccagcagcttccttgcccaattgatgttggagctgtagacgtacgctcaggcgctcctgctgtcctgggggagagaaggttcgcccctccccgaggaagaaggcttctggtcaggacccccaccccaaggctggggactccaggctcctgctttactgtagctctttttcttccttgcactccttgatctttgggcttccgtgatgtcctcagggtccccccctccctgttgctatttttaatctctagtcccagtgcctggcagctctttggagctggctcacattttcccaaaaaaagttgatctctcccagtgggctgtaggcagggtcctccatgggtttccaacccccatcactggcaccaggatctcccacaggcactggtggtgtcatcacctgctggccccactacagcctgagtaggcctgagtggccgtggccaggctgagacctgtcaggccatactgacaagcagaggtcagagacactggtggggagctggcaatgaaaccctgtcctgggacatgggtttcatgttcttgtacacttcccctctgggatcaggtgaggggtccagacagctgaccagacagcttgacagctggtcaagacggtcacgggagctctaggtgggcacaaccaacccctctcctgggaggcccctgccccactggggataggagcctgtgtccctggtgctaagcactctcttcacttgggccattgttggtgggggctcctttccggccagaccacaaggccagaagcaataatggcacctcagcagttccagtatggataggggttcctgttttactagcttttacatctttttatttaaaacaaaacaacacaaaaaaacaatgtgcccccagatgtcagaatgaggcgactagggcaccatactcactttccagggctgggggaagggggacgcaggatcatcccctcccaaggagatctgtgggggtcccaccgtccatctggacttctcagcctgtttggctagaactcaggcctggagtctgggtctgccccctccccggctccttggggctctctggtctcaggccagctggcgatgggtggctagagtgatgaactcaagccctgtggccacagttctgggagccttcaaccctggctcatgctgccatagtctccacggtgcccttcacagagggcttggtagtggcagaatggccatgcccaggtgtgtgttgagaccattgacaactgctcgtgtacaggcaccccacagccccagagcatggggcacagcaggcatgcgagtgagaggatgaaggggaataaagtcagtacaactcgt

SEQ ID NO: 441820 - DNA, 2925 bp, Homo sapiens
gaagaggaaggtggtggcagtggacgggaggaggaggaggaggaagagggtggcagtcagggagaagaggaagaagaggaggaggacgggcacagtgagcaggaagaggaagaggaggaggaagaggaggaagggcctagtgagcaggatcaagagagctctgaggaggaggagggggaggagggggaggctgggggcaagcaggggccacggggaagccgaagcagccgggcagacccccctccccacagtcacatggccacacggtcccgggagaacgcccggcgccggggtacccctgaacctgaagaagctgggcggcggggtgggaagaggccaaagccaccccctggagtggcctctgcatcggcccgagggccgccagccactgatgggctgggggccaaggtgaagctggaggagaagcagcaccatccatgccagaagtgcccacgagttttcaacaaccgctggtacctggagaaacacatgaatgtgacccacagccgcatgcagatctgcgaccagtgcggcaagcgcttcctgctggagagcgagctgctgctgcacaggcagacagactgcgagcgcaacatccagtgtgtgacatgtggcaaagctttcaagaagctttggtccctccatgagcataacaagattgtgcacggctacgcagagaagaagttctcatgcgagatctgtgagaagaagttctacaccatggcccacgtgcgtaagcacatggttgcccacaccaaggacatgcccttcacctgcgagacctgcggaaagtccttcaagcgcagcatgtccctcaaggtgcactcactgcagcactcaggggagaagccgttcagatgtgagaactgcaatgagcgcttccagtacaagtaccagctgcggtcacacatgagcatccacattggccacaagcagttcatgtgccaatggtgcggcaaggacttcaacatgaagcagtacttcgatgagcacatgaagacccacacaggagagaagccgtacatctgcgagatctgtggcaagagcttcaccagccggcccaacatgaagcggcaccggcgcacgcacacgggcgagaagccgtacccgtgcgacgtgtgtggccagcgcttccgcttctccaacatgctcaaggcccacaaggagaagtgcttccgcgtcagccacaccctggccggcgacggcgtccccgctgccccaggcctgcccccaacccagccccaggcgcacgcactgcccctgctcccggggctgccccagaccctgccgcccccgccccacctgccgcccccgcctccgctcttccccaccactgccagccccggcgggaggatgaacgccaacaactagctgccgagctgcacccgtgcacccgctggggcctggagtcagggcccactccaggagggacccactgccttcccggggagcacagtagtgcgggcctgggccctgctccacctccagaagtggctggatgtaccctgcctgaggccccgacgaggaggggtatgcaggctggcaggccccagagctggtggagggcatctcactcccaagtgccccccctttctgtgactccttgaagcctttacttttttttttttttggaagtgaaggaaaaagaaactatttacagcactcccctccaggtgaggggggtgctgggggtctgcagcagaaagaaaggggcctgggcagcaggtgtggccagtccctctgccaaggcctgtgccagaggggttggccagttggagcctgggtcagcctcagcagcctatccccatgtcctctatgcccctaatttgcttcctcatcttggagggtttggggagaagttggcgtgccacccccacaacccctgaggaggtgtagacccagtctgagagccgcaagcactgaggcagggcctgagactggacctgggtgagcgtggggggtggagggtggcgaggtgcggagactgcagaccagtgcttcactgtgtggagtggggcaggcaggggctggaccccagggacttgccttccccacccactctgctgccagcaggcccagggatccctgacctgcaccaggtggcaccaagggtcctgagtcctggagatgtccccagaagctgctgtgcctcacagcgctgtgagccagaccctccttgggcagacaggctgactggcagcaccagctttgggggcagagtcctaggatgaggcttgggcagtgctggtagggtttcaaggtgctattagtggggcaggggcagggcggctgctcacagagcaccccagttcctcaccagctactctggccatatatcccacaccagaaggaacaagtgtggctgtgtccatctctgctcccccaaaggcccgctctaggccttatcctccctctaggtcctgccacaacctgtccctggctggctccagcgtcctcgtccctcctgggcctgtgcaccggtgggtggggcgcccatagcactgccggtaaaggagcctgcatgttcaggcccctcgggggattggggggactggggaggcgcagcctagacccaattgcttgcccccatgaggctagcactaataggaaacccttttttgttgtcatttaatgtctttattcctgcctttaatatggggaggaaggttccataagctacatgtttcctagttaagctctttcctattgtgtttatacagttttgtttgttatactctttgcaccttaaacccccaccactccccgacactattgccttcccagcatggctggagtgggaagaggcttgggccccgggggaatggttagggggactgaacccctctgaccttatgaggcccatggcactggggcagggagctggggacattttaatcatcaataaacgaagcactttattctgta

SEQ ID NO: 441821 - DNA, 2506 bp, Homo sapiens
agcgggattttctgctccggttggtgagcgcgcctgcgcgttgacggcgattttgcgttctgaggctgcagcgtcggcatcttgagctgccggttcgcgagttcgaggccaggttccgcctgtcgtgggttcgcaccccggacgcgatgctattcgacaaggtgaaagcgttctcggtgcagttggacggcgcgaccgcgggcgtcgagcccgtgtttagcggcggccaggccgtggcgggccgggtgctgctggagctgtcaagcgccgcgcgtgtgggtgccctgaggctgcgcgcgcggggccgcgcccacgtgcactggaccgagtcgcgcagcgcgggctcgagcacggcttacacgcagagctacagtgaacgcgtggaggtcgtgagccaccgcgccacgctcctggcgccagataccggggagaccacgacgctgcctcctgggcgccatgagttcctgttcagcttccagctgcccccgaccctggtgacatccttcgagggcaaacacggtagtgtccgctactgtatcaaggccaccctgcaccggccctgggtcccagcacgccgggcaaggaaggtgttcactgtcatcgagcctgtggacatcaacacgccagccctgctggcacctcaagcgggggctcgggaaaaggttgcccgatcctggtactgtaaccgtggcctagtctccctttcggccaagatcgaccgcaagggctacaccccaggagaggtcatccctgtctttgccgagatcgacaacggctccacacgtcctgtgctgcctcgggcagccgtggtgcagacacagacgttcatggcccgaggcgcccgaaagcagaaacgggcagtggtggccagcctcgcgggcgagccggtgggccccgggcagcgggcgctgtggcagggccgggcactgcggatccccccagtgggtccttccatcctgcactgccgcgttctacacgtggactacgcactcaaggtctgtgtggatatcccaggaacgtccaagctgctgctggagctgccactggtgatcggcaccattcccttgcacccttttggcagccgttcctccagcgtgggcagccacgccagcttcctgctggactggaggctgggggccttgccggagcggcctgaggctcctcctgagtactcggaggtggtagccgacactgaggaggcagccttggggcagagccccttcccgcttccgcaggaccccgacatgagccttgaaggcccgttcttcgcctacatccaagagttccgctaccgcccgccacccctgtactctgaggaggatccaaacccactcttgggggacatgaggccgcgctgcatgacttgctgaacggcacagggacccctcgaggaacaaggttgcacaccagctttcagccaccatgactgtggggagtggctggaccaagggctgacctccccgactgcatcaaagttggggaaccaagtctcagagtgaggcgggggcctttcggatatcacatgggacagaggaagagcccggctggaatctgacttacctggaccgctgtccttgtgaggcattgaatgcccagtgcagtatccgagagactgtttaataacctgtcttcccagccaattggtggtgctggaatcccctaggagccttcagtctgggagaaacagagccagacatagacagttccagcatcacagaaccagaagaagagacctgcaactgtgagagtccagacaggaagcagagaaggcgtccttgcggaaagggcattttagctgaggctttggagtacgaataggagctcagcaggcagacgaatgaggaataaaggtcagagaaggtcagagctgagtgacgtttggaatccaccccgtttattgtagaactgggggttcagagggcaggtgcctcagagttgaggccacacagtgaggtctggtgggtgaaaggacccaggaacgaggcgttcaggaaagcaggttgtcagagctatgtggagtctgtgggtggcaggggcagccgctccagcctttgaagactttgaaagccagagattcctggcgcaggcttggacttcctgggagctcctccaagtacccaggggcatcagagctgcctgggtgttacatggcccagggaacccaggttcagggtaggacaggcaagaccagatacccaatgtgcaaagtgaaaacactgggctccctgttaaacgatgaagaattcaagacagtgacagcattacgtcacccctggggacagaggtcagcctaaggtgacacacggggactactgtgcttccggaggctccctgtgtcctggaggagaaaagcattagagggggcagctggacaagctcccaactgcagagtcccagccctggctggggcagggccccggcctgggactcagcatttctgatatgccttaagaattcattctgttttgtacaattattttttaaaagtaaacgtgtggagaaagaa

SEQ ID NO: 441822 - DNA, 626 bp, Homo sapiens
agcgggattttctgctccggttggtgagcgcgcctgcgcgttgacggcgattttgcgttctgaggctgcagcgtcggcatcttgagctgccggttcgcgagttcgaggccaggttccgcctgtcgtgggttcgcaccccggacgcgatgctattcgacaaggtgaaagcgttctcggtgcagttggacggcgcgaccgcgggcgtcgagcccgtgtttagcggcggccaggccgtggcgggccgggtgctgctggagctgtcaagcgccgcgcgtgtgggtgccctgaggctgcgcgcgcggggccgcgcccacgtgcactggaccgagtcgcgcagcgcgggctcgagcacggcttacacgcagagctacagtgaacgcgtggaggtcgtgagccaccgcgccacgctcctggcgccagataccggggagaccacgacgctgcctcctgggcgccatgagttcctgttcagcttccagctgcccccctggacaagctcccaactgcagagtcccagccctggctggggcagggccccggcctgggactcagcatttctgatatgccttaagaattcattctgttttgtacaattattttttaaaagtaaacgtgtggagaaagaa

SEQ ID NO: 441823 - DNA, 885 bp, Homo sapiens
gaccaggaagttcgccgacgacgcgcccgccctgggccaccggcgccggcccaagttcgccgggggggcccggaggaagcttgggggacgcgacgggggaacgcggaaaccccggggatctgcaggcgcgcccgggccgtgtgccttctctccgcgtgtccaaaccgtgtccccagccgcgcgccatgcgctctgggggcgtgcgcagcttcgcgctggagctggcgcggggcccgggcggcgcctaccgcggcggggagcggctgtgcggccgggtgctgctggaggcggcggcgccgctgcgggtgcgagcgctcgaggtgaaggcgcgcggcggggcggccacccactggttggagggtcgcagcgtgggcgtcaacgccgtatccagcgactacgcggccgcggagacctacctgcggcgtcggcagctgctgctccgagataccggggagaccacgacgctgcctcctgggcgccatgagttcctgttcagcttccagctgcccccgaccctggtgacatccttcgagggcaaacacggtagtgtccgctactgtatcaaggccaccctgcaccggccctgggtcccagcacgccgggcaaggaaggtgttcactgtcatcgagcctgtggacatcaacacgccagccctgctggcacctcaagcgggggctcgggaaaaggttgcccgatcctggtactgtaaccgtggcctagtctccctttcggccaagatcgaccgcaagggctacaccccaggagaggtcatccctgtctttgccgagatcgcgggcccctgcaccccgagcatccgccccgggtggcacgtccccgagcccaccaggccggccccgtctccccatccgtctagtccgctcgcgg

SEQ ID NO: 441824 - DNA, 2632 bp, Homo sapiens
agcgggattttctgctccggttggtgagcgcgcctgcgcgttgacggcgattttgcgttctgaggctgcagcgtcggcatcttgagctgccggttcgcgagttcgaggccaggttccgcctgtcgtgggttcgcaccccggacgcgatgctattcgacaaggtgaaagcgttctcggtgcagttggacggcgcgaccgcgggcgtcgagcccgtgtttagcggcggccaggccgtggcgggccgggtgctgctggagctgtcaagcgccgcgcgtgtgggtgccctgaggctgcgcgcgcggggccgcgcccacgtgcactggaccgagtcgcgcagcgcgggctcgagcacggcttacacgcagagctacagtgaacgcgtggaggtcgtgagccaccgcgccacgctcctggcgccaggtacggatggaggacccctgctccaacaccagttgtgtgcctcccaccacctggacggcggtacctccgtcagccctgggaccccagcgcaaccgctcagtcgcctcctttttctcctacctgcagataccggggagaccacgacgctgcctcctgggcgccatgagttcctgttcagcttccagctgcccccgaccctggtgacatccttcgagggcaaacacggtagtgtccgctactgtatcaaggccaccctgcaccggccctgggtcccagcacgccgggcaaggaaggtgttcactgtcatcgagcctgtggacatcaacacgccagccctgctggcacctcaagcgggggctcgggaaaaggttgcccgatcctggtactgtaaccgtggcctagtctccctttcggccaagatcgaccgcaagggctacaccccaggagaggtcatccctgtctttgccgagatcgacaacggctccacacgtcctgtgctgcctcgggcagccgtggtgcagacacagacgttcatggcccgaggcgcccgaaagcagaaacgggcagtggtggccagcctcgcgggcgagccggtgggccccgggcagcgggcgctgtggcagggccgggcactgcggatccccccagtgggtccttccatcctgcactgccgcgttctacacgtggactacgcactcaaggtctgtgtggatatcccaggaacgtccaagctgctgctggagctgccactggtgatcggcaccattcccttgcacccttttggcagccgttcctccagcgtgggcagccacgccagcttcctgctggactggaggctgggggccttgccggagcggcctgaggctcctcctgagtactcggaggtggtagccgacactgaggaggcagccttggggcagagccccttcccgcttccgcaggaccccgacatgagccttgaaggcccgttcttcgcctacatccaagagttccgctaccgcccgccacccctgtactctgaggaggatccaaacccactcttgggggacatgaggccgcgctgcatgacttgctgaacggcacagggacccctcgaggaacaaggttgcacaccagctttcagccaccatgactgtggggagtggctggaccaagggctgacctccccgactgcatcaaagttggggaaccaagtctcagagtgaggcgggggcctttcggatatcacatgggacagaggaagagcccggctggaatctgacttacctggaccgctgtccttgtgaggcattgaatgcccagtgcagtatccgagagactgtttaataacctgtcttcccagccaattggtggtgctggaatcccctaggagccttcagtctgggagaaacagagccagacatagacagttccagcatcacagaaccagaagaagagacctgcaactgtgagagtccagacaggaagcagagaaggcgtccttgcggaaagggcattttagctgaggctttggagtacgaataggagctcagcaggcagacgaatgaggaataaaggtcagagaaggtcagagctgagtgacgtttggaatccaccccgtttattgtagaactgggggttcagagggcaggtgcctcagagttgaggccacacagtgaggtctggtgggtgaaaggacccaggaacgaggcgttcaggaaagcaggttgtcagagctatgtggagtctgtgggtggcaggggcagccgctccagcctttgaagactttgaaagccagagattcctggcgcaggcttggacttcctgggagctcctccaagtacccaggggcatcagagctgcctgggtgttacatggcccagggaacccaggttcagggtaggacaggcaagaccagatacccaatgtgcaaagtgaaaacactgggctccctgttaaacgatgaagaattcaagacagtgacagcattacgtcacccctggggacagaggtcagcctaaggtgacacacggggactactgtgcttccggaggctccctgtgtcctggaggagaaaagcattagagggggcagctggacaagctcccaactgcagagtcccagccctggctggggcagggccccggcctgggactcagcatttctgatatgccttaagaattcattctgttttgtacaattattttttaaaagtaaacgtgtggagaaagaa

SEQ ID NO: 441825 - DNA, 3448 bp, Homo sapiens
agcgggattttctgctccggttggtgagcgcgcctgcgcgttgacggcgattttgcgttctgaggctgcagcgtcggcatcttgagctgccggttcgcgagttcgaggccaggttccgcctgtcgtgggttcgcaccccggacgcgatgctattcgacaaggtgaaagcgttctcggtgcagttggacggcgcgaccgcgggcgtcgagcccgtgtttagcggcggccaggccgtggcgggccgggtgctgctggagctgtcaagcgccgcgcgtgtgggtgccctgaggctgcgcgcgcggggccgcgcccacgtgcactggaccgagtcgcgcagcgcgggctcgagcacggcttacacgcagagctacagtgaacgcgtggaggtcgtgagccaccgcgccacgctcctggcgccagataccggggagaccacgacgctgcctcctgggcgccatgagttcctgttcagcttccagctgcccccgaccctggtgacatccttcgagggcaaacacggtagtgtccgctactgtatcaaggccaccctgcaccggccctgggtcccagcacgccgggcaaggaaggtgttcactgtcatcgagcctgtggacatcaacacgccagccctgctggcacctcaagcgggggctcgggaaaaggttgcccgatcctggtactgtaaccgtggcctagtctccctttcggccaagatcgaccgcaagggctacaccccaggagaggtcatccctgtctttgccgagatcgacaacggctccacacgtcctgtgctgcctcgggcagccgtggtgcagacacagacgttcatggcccgaggcgcccgaaagcagaaacgggcagtggtggccagcctcgcgggcgagccggtgggccccgggcagcgggcgctgtggcagggccgggcactgcggatccccccagtgggtccttccatcctgcactgccgcgttctacacgtggactacgcactcaaggtctgtgtggatatcccaggaacgtccaagctgctgctggagctgccactggtgatcggcaccattcccttgcacccttttggcagccgttcctccagcgtgggcagccacgccagcttcctgctggactggaggctgggggccttgccggagcggcctgaggctcctcctgagtactcggaggtggtagccgacactgaggaggcagccttggggcagagccccttcccgcttccgcaggaccccgacatgagccttgaaggcccgttcttcgcctacatccaagagttccgctaccgcccgccacccctgtactctgaggaggatccaaacccactcttgggggacatgaggccgcgctgcatgacttgctgaacggcacagggacccctcgaggaacaaggttgcacaccagctttcagccaccatgactgtggggagtggctggaccaagggctgacctccccgactgcatcaaagttggggaaccaagtctcagagtgaggcgggggcctttcggatatcacatgggacagaggaagagcccggctggaatctgacttacctggaccgctgtccttgtgaggcattgaatgcccagtgcagtatccgagagactgtttaataacctgtcttcccagccaattggtggtgctggaatcccctaggagccttcagtctgggagaaacagagccagacatagacagttccagcatcacagaaccagaagaagagacctgcaactgtgagagtccagacaggaagcagagaaggcgtccttgcggaaagggcattttagctgaggctttggagtacgaataggagctcagcaggcagacgaatgaggaataaaggtcagagaaggtcagagctgagtgacgtttggaatccaccccgtttattgtagaactgggggttcagagggcaggtgcctcagagttgaggccacacagtgaggtctggtgggtgaaaggacccaggaacgaggcgttcaggaaagcaggttgtcagagctatgtggagtctgtgggtggcaggggcagccgctccagcctttgaagactttgaaagccagagattcctggcgcaggcttggacttcctgggagctcctccaagtacccaggggcatcagagctgcctgggtgttacatggcccagggaacccaggttcagggtaggacaggcaagaccagatacccaatgtgcaaagtgaaaacactgggctccctgttaaacgatgaagaattcaagacagtgacagcattacgtcacccctggggacagaggtcagcctaaggtgacacacggggactactgtgcttccggaggctccctgtgtcctggaggagaaaagcattagagggggcagctggacaagctcccaactgcagagtcccagccctggctggggcagggccccggcctgggactcagcatttctgatatgccttaagaattcattctgttttgtacaattattttttaaaagtaaacgtgtggagaaagaaaaaaaaaaaaaaaaaaaaaaaaaaaaaaaaaaaaaaaaaaaaaaaaaaaaaaaaaaaaaaaaaaaaaaaaaaaaaaaaaaaaaaaaaaaaaaaaaagggggggggggggggcgaaatagaaatattgtcctatgaggagtggaggaaagaaaatataaaacacgacacaaccagttgttttatagaagagaaggggaggacaacaaaaggaggagaaaatattatattaatatacgcgaggaggagggacaagtaaaaaaacaagttagaggagaaacaagcgacgaccgcgcagacgcacgcacgacacataaggagggagaaccaagcaccacagcattcggggagtcggggacgagaccccaccagacgggcggaggaaggcccacacaccacgacgaagaagaagaaagatacagaccaggcgccaggaggacaaaaaactaaaaaaacaaacgcagggagcgagcacgaggagaggagcagacaacacccaccgcacaggtagaaggagggggcagggacggaaagaaggaaaaactcgcccaggcgggaggagagagacgcagcaaaacaaaacaccaaaaatttacacaccaggcgggggggacggaacaacatgaggacagagcgggaaggaggcacgacgacgaacgcaaccgagagacctcgagacgcgcaggggcacaaaccagccagaacgcggcacagcagcaccgacgagcgagagagagagcggagaccagaggagcgaggaggaggcgaaagagggaaggaggacggggaagagcggagagagcgatgacgagacgacgaacggcaggaacggaggcgggcgagagggaggcaaaaggaagagaggagcagggaagcgaagagaggaagagagaaggaccaagcagacgagcaagccggaagcgcagggaagaagacggacgagca

SEQ ID NO: 441826 - DNA, 2829 bp, Homo sapiens
agcgggattttctgctccggttggtgagcgcgcctgcgcgttgacggcgattttgcgttctgaggctgcagcgtcggcatcttgagctgccggttcgcgagttcgaggccaggttccgcctgtcgtgggttcgcaccccggacgcgatgctattcgacaaggtgaaagcgttctcggtgcagttggacggcgcgaccgcgggcgtcgagcccgtgtttagcggcggccaggccgtggcgggccgggtgctgctggagctgtcaagcgccgcgcgtgtgggtgccctgaggctgcgcgcgcggggccgcgcccacgtgcactggaccgagtcgcgcagcgcgggctcgagcacggcttacacgcagagctacagtgaacgcgtggaggtcgtgagccaccgcgccacgctcctggcgccaggtacggatggaggacccctgctccaacaccagttgtgtgcctcccaccacctggacggcggtacctccgtcagccctgggaccccagcgcaaccgctcagtcgcctcctttttctcctacctgcagataccggggagaccacgacgctgcctcctgggcgccatgagttcctgttcagcttccagctgcccccccccgtaagtcctctggggtgcagggttgccctaagcctgcagccccttccagattggtacctccaatactggatatctgggcacctctgagccccaagactctccccctgggaggcccccggagtgtctgtgtctccttctccctgcctgcttgtctctgtatcttgtcccctgaagtcccgtccctccaccctaggaccctggtgacatccttcgagggcaaacacggtagtgtccgctactgtatcaaggccaccctgcaccggccctgggtcccagcacgccgggcaaggaaggtgttcactgtcatcgagcctgtggacatcaacacgccagccctgctggcacctcaagcgggggctcgggaaaaggttgcccgatcctggtactgtaaccgtggcctagtctccctttcggccaagatcgaccgcaagggctacaccccaggagaggtcatccctgtctttgccgagatcgacaacggctccacacgtcctgtgctgcctcgggcagccgtggtgcagacacagacgttcatggcccgaggcgcccgaaagcagaaacgggcagtggtggccagcctcgcgggcgagccggtgggccccgggcagcgggcgctgtggcagggccgggcactgcggatccccccagtgggtccttccatcctgcactgccgcgttctacacgtggactacgcactcaaggtctgtgtggatatcccaggaacgtccaagctgctgctggagctgccactggtgatcggcaccattcccttgcacccttttggcagccgttcctccagcgtgggcagccacgccagcttcctgctggactggaggctgggggccttgccggagcggcctgaggctcctcctgagtactcggaggtggtagccgacactgaggaggcagccttggggcagagccccttcccgcttccgcaggaccccgacatgagccttgaaggcccgttcttcgcctacatccaagagttccgctaccgcccgccacccctgtactctgaggaggatccaaacccactcttgggggacatgaggccgcgctgcatgacttgctgaacggcacagggacccctcgaggaacaaggttgcacaccagctttcagccaccatgactgtggggagtggctggaccaagggctgacctccccgactgcatcaaagttggggaaccaagtctcagagtgaggcgggggcctttcggatatcacatgggacagaggaagagcccggctggaatctgacttacctggaccgctgtccttgtgaggcattgaatgcccagtgcagtatccgagagactgtttaataacctgtcttcccagccaattggtggtgctggaatcccctaggagccttcagtctgggagaaacagagccagacatagacagttccagcatcacagaaccagaagaagagacctgcaactgtgagagtccagacaggaagcagagaaggcgtccttgcggaaagggcattttagctgaggctttggagtacgaataggagctcagcaggcagacgaatgaggaataaaggtcagagaaggtcagagctgagtgacgtttggaatccaccccgtttattgtagaactgggggttcagagggcaggtgcctcagagttgaggccacacagtgaggtctggtgggtgaaaggacccaggaacgaggcgttcaggaaagcaggttgtcagagctatgtggagtctgtgggtggcaggggcagccgctccagcctttgaagactttgaaagccagagattcctggcgcaggcttggacttcctgggagctcctccaagtacccaggggcatcagagctgcctgggtgttacatggcccagggaacccaggttcagggtaggacaggcaagaccagatacccaatgtgcaaagtgaaaacactgggctccctgttaaacgatgaagaattcaagacagtgacagcattacgtcacccctggggacagaggtcagcctaaggtgacacacggggactactgtgcttccggaggctccctgtgtcctggaggagaaaagcattagagggggcagctggacaagctcccaactgcagagtcccagccctggctggggcagggccccggcctgggactcagcatttctgatatgccttaagaattcattctgttttgtacaattattttttaaaagtaaacgtgtggagaaagaa

SEQ ID NO: 441827 - DNA, 1288 bp, Homo sapiens
gaccaggaagttcgccgacgacgcgcccgccctgggccaccggcgccggcccaagttcgccgggggggcccggaggaagcttgggggacgcgacgggggaacgcggaaaccccggggatctgcaggcgcgcccgggccgtgtgccttctctccgcgtgtccaaaccgtgtccccagccgcgcgccatgcgctctgggggcgtgcgcagcttcgcgctggagctggcgcggggcccgggcggcgcctaccgcggcggggagcggctgtgcggccgggtgctgctggaggcggcggcgccgctgcgggtgcgagcgctcgaggtgaaggcgcgcggcggggcggccacccactggttggagggtcgcagcgtgggcgtcaacgccgtatccagcgactacgcggccgcggagacctacctgcggcgtcggcagctgctgctccgagataccggggagaccacgacgctgcctcctgggcgccatgagttcctgttcagcttccagctgcccccagacctgcaactgtgagagtccagacaggaagcagagaaggcgtccttgcggaaagggcattttagctgaggctttggagtacgaataggagctcagcaggcagacgaatgaggaataaaggtcagagaaggtcagagctgagtgacgtttggaatccaccccgtttattgtagaactgggggttcagagggcaggtgcctcagagttgaggccacacagtgaggtctggtgggtgaaaggacccaggaacgaggcgttcaggaaagcaggttgtcagagctatgtggagtctgtgggtggcaggggcagccgctccagcctttgaagactttgaaagccagagattcctggcgcaggcttggacttcctgggagctcctccaagtacccaggggcatcagagctgcctgggtgttacatggcccagggaacccaggttcagggtaggacaggcaagaccagatacccaatgtgcaaagtgaaaacactgggctccctgttaaacgatgaagaattcaagacagtgacagcattacgtcacccctggggacagaggtcagcctaaggtgacacacggggactactgtgcttccggaggctccctgtgtcctggaggagaaaagcattagagggggcagctggacaagctcccaactgcagagtcccagccctggctggggcagggccccggcctgggactcagcatttctgatatgccttaagaattcattctgttttgtacaattattttttaaaagtaaacgtgtggagaaagaa

SEQ ID NO: 441828 - DNA, 1404 bp, Homo sapiens
gaccaggaagttcgccgacgacgcgcccgccctgggccaccggcgccggcccaagttcgccgggggggcccggaggaagcttgggggacgcgacgggggaacgcggaaaccccggggatctgcaggcgcgcccgggccgtgtgccttctctccgcgtgtccaaaccgtgtccccagccgcgcgccatgcgctctgggggcgtgcgcagcttcgcgctggagctggcgcggggcccgggcggcgcctaccgcggcggggagcggctgtgcggccgggtgctgctggaggcggcggcgccgctgcgggtgcgagcgctcgaggtgaaggcgcgcggcggggcggccacccactggttggagggtcgcagcgtgggcgtcaacgccgtatccagcgactacgcggccgcggagacctacctgcggcgtcggcagctgctgctccgagataccggggagaccacgacgctgcctcctgggcgccatgagttcctgttcagcttccagctgcccccgaccctggtgacatccttcgagggcaaacacggtagtgtccgctactgtatcaaggccaccctgcaccggccctgggtcccagcacgccgggcaaggaaggtgttcactgtcatcgagcctgtggacatcaacacgccagccctgctggcacctcaagcgggggctcgggaaaaggttgcccgatcctggtactgtaaccgtggcctagtctccctttcggccaagatcgaccgcaagggctacaccccaggagaggtcatccctgtctttgccgagatcgacaacggctccacacgtcctgtgctgcctcgggcagccgtggtgcagacacagacgttcatggcccgaggcgcccgaaagcagaaacgggcagtggtggccagcctcgcgggcgagccggtgggccccgggcagcgggcgctgtggcagggccgggcactgcggatccccccagtgggtccttccatcctgcactgccgcgttctacacgtggactacgcactcaaggtctgtgtggatatccccaggcacgtacaagagcttgatgcttgacaagcatgcacacataggatgaatccggccaccaatatcacatatggacacccattatagcggaacccggtatacctacccaagacgatgggaaccaagccaaaagacacaagataacacaaggggcatgggaaccatggacagggagccatgggagcggcaccaattaggacgagacaagccgggaccatgacagggaataccctacaccgtgcacgataccgtcggaacgagagtgaacaaaccccgcaacacctatgacaggaagaggaagacccaacagagaaagccaacaaacacacacataaccagaataacaccgcagggaaccccggaacat

SEQ ID NO: 441829 - DNA, 752 bp, Homo sapiens
agcgggattttctgctccggttggtgagcgcgcctgcgcgttgacggcgattttgcgttctgaggctgcagcgtcggcatcttgagctgccggttcgcgagttcgaggccaggttccgcctgtcgtgggttcgcaccccggacgcgatgctattcgacaaggtgaaagcgttctcggtgcagttggacggcgcgaccgcgggcgtcgagcccgtgtttagcggcggccaggccgtggcgggccgggtgctgctggagctgtcaagcgccgcgcgtgtgggtgccctgaggctgcgcgcgcggggccgcgcccacgtgcactggaccgagtcgcgcagcgcgggctcgagcacggcttacacgcagagctacagtgaacgcgtggaggtcgtgagccaccgcgccacgctcctggcgccaggtacggatggaggacccctgctccaacaccagttgtgtgcctcccaccacctggacggcggtacctccgtcagccctgggaccccagcgcaaccgctcagtcgcctcctttttctcctacctgcagataccggggagaccacgacgctgcctcctgggcgccatgagttcctgttcagcttccagctgcccccctggacaagctcccaactgcagagtcccagccctggctggggcagggccccggcctgggactcagcatttctgatatgccttaagaattcattctgttttgtacaattattttttaaaagtaaacgtgtggagaaagaa

SEQ ID NO: 441830 - DNA, 2530 bp, Homo sapiens
gaccaggaagttcgccgacgacgcgcccgccctgggccaccggcgccggcccaagttcgccgggggggcccggaggaagcttgggggacgcgacgggggaacgcggaaaccccggggatctgcaggcgcgcccgggccgtgtgccttctctccgcgtgtccaaaccgtgtccccagccgcgcgccatgcgctctgggggcgtgcgcagcttcgcgctggagctggcgcggggcccgggcggcgcctaccgcggcggggagcggctgtgcggccgggtgctgctggaggcggcggcgccgctgcgggtgcgagcgctcgaggtgaaggcgcgcggcggggcggccacccactggttggagggtcgcagcgtgggcgtcaacgccgtatccagcgactacgcggccgcggagacctacctgcggcgtcggcagctgctgctccgagataccggggagaccacgacgctgcctcctgggcgccatgagttcctgttcagcttccagctgcccccgaccctggtgacatccttcgagggcaaacacggtagtgtccgctactgtatcaaggccaccctgcaccggccctgggtcccagcacgccgggcaaggaaggtgttcactgtcatcgagcctgtggacatcaacacgccagccctgctggcacctcaagcgggggctcgggaaaaggttgcccgatcctggtactgtaaccgtggcctagtctccctttcggccaagatcgaccgcaagggctacaccccaggagaggtcatccctgtctttgccgagatcgacaacggctccacacgtcctgtgctgcctcgggcagccgtggtgcagacacagacgttcatggcccgaggcgcccgaaagcagaaacgggcagtggtggccagcctcgcgggcgagccggtgggccccgggcagcgggcgctgtggcagggccgggcactgcggatccccccagtgggtccttccatcctgcactgccgcgttctacacgtggactacgcactcaaggtctgtgtggatatcccaggaacgtccaagctgctgctggagctgccactggtgatcggcaccattcccttgcacccttttggcagccgttcctccagcgtgggcagccacgccagcttcctgctggactggaggctgggggccttgccggagcggcctgaggctcctcctgagtactcggaggtggtagccgacactgaggaggcagccttggggcagagccccttcccgcttccgcaggaccccgacatgagccttgaaggcccgttcttcgcctacatccaagagttccgctaccgcccgccacccctgtactctgaggaggatccaaacccactcttgggggacatgaggccgcgctgcatgacttgctgaacggcacagggacccctcgaggaacaaggttgcacaccagctttcagccaccatgactgtggggagtggctggaccaagggctgacctccccgactgcatcaaagttggggaaccaagtctcagagtgaggcgggggcctttcggatatcacatgggacagaggaagagcccggctggaatctgacttacctggaccgctgtccttgtgaggcattgaatgcccagtgcagtatccgagagactgtttaataacctgtcttcccagccaattggtggtgctggaatcccctaggagccttcagtctgggagaaacagagccagacatagacagttccagcatcacagaaccagaagaagagacctgcaactgtgagagtccagacaggaagcagagaaggcgtccttgcggaaagggcattttagctgaggctttggagtacgaataggagctcagcaggcagacgaatgaggaataaaggtcagagaaggtcagagctgagtgacgtttggaatccaccccgtttattgtagaactgggggttcagagggcaggtgcctcagagttgaggccacacagtgaggtctggtgggtgaaaggacccaggaacgaggcgttcaggaaagcaggttgtcagagctatgtggagtctgtgggtggcaggggcagccgctccagcctttgaagactttgaaagccagagattcctggcgcaggcttggacttcctgggagctcctccaagtacccaggggcatcagagctgcctgggtgttacatggcccagggaacccaggttcagggtaggacaggcaagaccagatacccaatgtgcaaagtgaaaacactgggctccctgttaaacgatgaagaattcaagacagtgacagcattacgtcacccctggggacagaggtcagcctaaggtgacacacggggactactgtgcttccggaggctccctgtgtcctggaggagaaaagcattagagggggcagctggacaagctcccaactgcagagtcccagccctggctggggcagggccccggcctgggactcagcatttctgatatgccttaagaattcattctgttttgtacaattattttttaaaagtaaacgtgtggagaaagaa

SEQ ID NO: 441831 - DNA, 2538 bp, Homo sapiens
  misc_feature (2494)..(2494): n is a, c, g, or t
agcgggattttctgctccggttggtgagcgcgcctgcgcgttgacggcgattttgcgttctgaggctgcagcgtcggcatcttgagctgccggttcgcgagttcgaggccaggttccgcctgtcgtgggttcgcaccccggacgcgatgctattcgacaaggtgaaagcgttctcggtgcagttggacggcgcgaccgcgggcgtcgagcccgtgtttagcggcggccaggccgtggcgggccgggtgctgctggagctgtcaagcgccgcgcgtgtgggtgccctgaggctgcgcgcgcggggccgcgcccacgtgcactggaccgagtcgcgcagcgcgggctcgagcacggcttacacgcagagctacagtgaacgcgtggaggtcgtgagccaccgcgccacgctcctggcgccagataccggggagaccacgacgctgcctcctgggcgccatgagttcctgttcagcttccagctgcccccgaccctggtgacatccttcgagggcaaacacggtagtgtccgctactgtatcaaggccaccctgcaccggccctgggtcccagcacgccgggcaaggaaggtgttcactgtcatcgagcctgtggacatcaacacgccagccctgctggcacctcaagcgggggctcgggaaaaggttgcccgatcctggtactgtaaccgtggcctagtctccctttcggccaagatcgaccgcaagggctacaccccaggagaggtcatccctgtctttgccgagatcgacaacggctccacacgtcctgtgctgcctcgggcagccgtggtgcagacacagacgttcatggcccgaggcgcccgaaagcagaaacgggcagtggtggccagcctcgcgggcgagccggtgggccccgggcagcgggcgctgtggcagggccgggcactgcggatccccccagtgggtccttccatcctgcactgccgcgttctacacgtggactacgcactcaaggtctgtgtggatatcccaggaacgtccaagctgctgctggagctgccactggtgatcggcaccattcccttgcacccttttggcagccgttcctccagcgtgggcagccacgccagcttcctgctggactggaggctgggggccttgccggagcggcctgaggctcctcctgagtactcggaggtggtagccgacactgaggaggcagccttggggcagagccccttcccgcttccgcaggaccccgacatgagccttgaaggcccgttcttcgcctacatccaagagttccgctaccgcccgccacccctgtactctgaggaggatccaaacccactcttgggggacatgaggccgcgctgcatgacttgctgaacggcacagggacccctcgaggaacaaggttgcacaccagctttcagccaccatgactgtggggagtggctggaccaagggctgacctccccgactgcatcaaagttggggaaccaagtctcagagtgaggcgggggcctttcggatatcacatgggacagaggaagagcccggctggaatctgacttacctggaccgctgtccttgtgaggcattgaatgcccagtgcagtatccgagagactgtttaataacctgtcttcccagccaattggtggtgctggaatcccctaggagccttcagtctgggagaaacagagccagacatagacagttccagcatcacagaaccagaagaagagacctgcaactgtgagagtccagacaggaagcagagaaggcgtccttgcggaaagggcattttagctgaggctttggagtacgaataggagctcagcaggcagacgaatgaggaataaaggtcagagaaggtcagagctgagtgacgtttggaatccaccccgtttattgtagaactgggggttcagagggcaggtgcctcagagttgaggccacacagtgaggtctggtgggtgaaaggacccaggaacgaggcgttcaggaaagcaggttgtcagagctatgtggagtctgtgggtggcaggggcagccgctccagcctttgaagactttgaaagccagagattcctggcgcaggcttggacttcctgggagctcctccaagtacccaggggcatcagagctgcctgggtgttacatggcccagggaacccaggttcagggtaggacaggcaagaccagatacccaatgtgcaaagtgaaaacactgggctccctgttaaacgatgaagaattcaagacagtgacagcattacgtcacccctggggacagaggtcagcctaaggtgacacacggggactactgtgcttccggaggctccctgtgtcctggaggagaaaagcattagagggggcagctggacaagctcccaactgcagagtcccagccctggctggggcagggccccggcctgggactcagcatttctgatatgccttaagaacctttcaattggttgccttaattataaaaatgcccagcgnagaggtttaaagtctttctgtttcacataaggtgcaaccgtgcc

SEQ ID NO: 441832 - DNA, 1603 bp, Homo sapiens
agcgggattttctgctccggttggtgagcgcgcctgcgcgttgacggcgattttgcgttctgaggctgcagcgtcggcatcttgagctgccggttcgcgagttcgaggccaggttccgcctgtcgtgggttcgcaccccggacgcgatgctattcgacaaggtgaaagcgttctcggtgcagttggacggcgcgaccgcgggcgtcgagcccgtgtttagcggcggccaggccgtggcgggccgggtgctgctggagctgtcaagcgccgcgcgtgtgggtgccctgaggctgcgcgcgcggggccgcgcccacgtgcactggaccgagtcgcgcagcgcgggctcgagcacggcttacacgcagagctacagtgaacgcgtggaggtcgtgagccaccgcgccacgctcctggcgccagataccggggagaccacgacgctgcctcctgggcgccatgagttcctgttcagcttccagctgcccccgaccctggtgacatccttcgagggcaaacacggtagtgtccgctactgtatcaaggccaccctgcaccggccctgggtcccagcacgccgggcaaggaaggtgttcactgtcatcgagcctgtggacatcaacacgccagccctgctggcacctcaagcgggggctcgggaaaaggttgcccgatcctggtactgtaaccgtggcctagtctccctttcggccaagatcgaccgcaagggctacaccccaggagaggtcatccctgtctttgccgagatcgacaacggctccacacgtcctgtgctgcctcgggcagccgtggtgcagacacagacgttcatggcccgaggcgcccgaaagcagaaacgggcagtggtggccagcctcgcgggcgagccggtgggccccgggcagcgggcgctgtggcagggccgggcactgcggatccccccagtgggtccttccatcctgcactgccgcgttctacacgtggactacgcactcaaggtctgtgtggatatcccaggaacgtccaagctgctgctggagctgccactggtgatcggcaccattcccttgcacccttttggcagccgttcctccagcgtgggcagccacgccagcttcctgctggactggaggctgggggccttgccggagcggcctgaggctcctcctgagtactcggaggtggtagccgacactgaggaggcagccttggggcagagccccttcccgcttccgcaggaccccgacatgagccttgaaggcccgttcttcgcctacatccaagagttccgctaccgcccgccacccctgtactctgaggaggatccaaacccactcttgggggacatgaggccgcgctgcatgacttgctgaacggcacagggacccctcgaggaacaaggttgcacaccagctttcagccaccatgactgtggggggggggccgtggctgggggggcccccgcccacatttatcatccttcaatttgtttgtgcaacctcatttttcctggatgccaggcaagagctcagaagccaccagtgcaaatacaaaaggctgtcacactggcctttgccctcgctggcgggggctcctggctcggggg

SEQ ID NO: 441833 - DNA, 882 bp, Homo sapiens
aaaatagctaggtcgagcctgggtgtgaattggccgaggcagtggcgtgtggagcggccatgagtgaagtcacctccctccacgaggacgactggcgatctcggccttcccggggccctgccctcaccccgatccgggatgaggagtggggtggccactccccccggagtcccaggggatgggaccaggagcccgccagggagcaggcaggcgggggctggcgggccaggcggccccgggcccgctccgtggacgccctggacgacctcaccccgccgagcaccgccgagtcagggagcaggtctcccacgagtaatggtgggaggagaagccgggcctacatgcccccgcggagccgcagccgggacgacctctatgaccaagacgactcgagggacttcccacgctcccgggacccccactacgacgacttcaggtctcgggagcgccctcctgccgaccccaggtcccaccaccaccgtacccgggaccctcgggacaacggctccaggtccggggacctcccctatgatgggcggctactggaggaggctgtgaggaagaaggggtcggaggagaggaggagaccccacaaggaggaggaggaagaggcctactacccgcccgcgccgcccccgtactcggagaccgactcgcaggcgtcccgagagcgcaggctcaagaagaacttggccctgagtcgggaaagtttagtcgtctgatctgacgttttctacgtagcttttgtatttttttttttaatttgaaggaacactgatgaagccctgccatacccctcccgagtctaataaaacgtataatcacaaaataaaaaaaactctggggcgcacaatctgggcggcgggaagagggtttgactgc

SEQ ID NO: 441834 - DNA, 2179 bp, Homo sapiens
ctcacccctaagcccagccctcggctcccacccttgtgtacctgggccgaaccattcaccggagcgcgcagcgggtggagtgtggctcggaggaccgcggcgggtcaagcacctttctcccccatatctgaaagcatgccctttgtccacgtcgtttacgctcattaaaacttccagaatgcaacaggacggacttggagtagggacaaggaacggaagtgggaaggggaggagcgtgcacccctcctggccttggtgcgcgccgcgccccctaaggtactttggaagggacgcgcgggccagacgcgcccagacggccgcgatggcgctgttggccggcgggctctccagagggctgggctcccacccggccgccgcaggccgggacgcggtcgtcttcgtgtggcttctgcttagcacctggtgcacagctcctgccagggccatccaggtgaccgtgtccaacccctaccacgtggtgatcctcttccagcctgtgaccctgccctgtacctaccagatgacctcgacccccacgcaacccatcgtcatctggaagtacaagtctttctgccgggaccgcatcgccgatgccttctccccggccagcgtcgacaaccagctcaatgcccagctggcagccgggaacccaggctacaacccctacgtcgagtgccaggacagcgtgcgcaccgtcagggtcgtggccaccaagcagggcaacgctgtgaccctgggagattactaccagggccggaggattaccatcaccggaaatgctgacctgacctttgaccagacggcgtggggggacagtggtgtgtattactgctccgtggtctcagcccaggacctccaggggaacaatgaggcctacgcagagctcatcgtccttgactggctcttcgtggttgtggtatgcctggctgccttcctcatcttcctcctcctgggcatctgctggtgccagtgctgcccgcacacttgctgctgctacgtcaggtgcccctgctgcccagacaagtgctgctgccccgaggccctgtatgccgccggcaaagcagccacctcaggtgttcccagcatttatgcccccagcacctatgcccacctgtctcccgccaagaccccacccccaccagctatgattcccatgggccctgcctacaacgggtaccctggaggataccctggagacgttgacaggagtagctcagctggtggccaaggctcctatgtacccctgcttcgggacacggacagcagtgtggcctctgaagtccgcagtggctacaggattcaggccagccagcaggacgactccatgcgggtcctgtactacatggagaaggagctggccaacttcgacccttctcgacctggcccccccagtggccgtgtggagcgggccatgagtgaagtcacctccctccacgaggacgactggcgatctcggccttcccggggccctgccctcaccccgatccgggatgaggagtggggtggccactccccccggagtcccaggggatgggaccaggagcccgccagggagcaggcaggcgggggctggcgggccaggcggccccgggcccgctccgtggacgccctggacgacctcaccccgccgagcaccgccgagtcagggagcaggtctcccacgagtaatggtgggaggagaagccgggcctacatgcccccgcggagccgcagccgggacgacctctatgaccaagacgactcgagggacttcccacgctcccgggacccccactacgacgacttcaggtctcgggagcgccctcctgccgaccccaggtcccaccaccaccgtacccgggaccctcgggacaacggctccaggtccggggacctcccctatgatgggcggctactggaggaggctgtgaggaagaaggggtcggaggagaggaggagaccccacaaggaggaggaggaagaggcctactacccgcccgcgccgcccccgtactcggagaccgactcgcaggcgtcccgagagcgcaggctcaagaagaacttggccctgagtcgggaaagtttagtcgtctgatctgacgttttctacgtagcttttgtatttttttttttaatttgaaggaacactgatgaagccctgccatacccctcccgagtctaataaaacgtataatcacaa

SEQ ID NO: 441835 - DNA, 2236 bp, Homo sapiens
ctcacccctaagcccagccctcggctcccacccttgtgtacctgggccgaaccattcaccggagcgcgcagcgggtggagtgtggctcggaggaccgcggcgggtcaagcacctttctcccccatatctgaaagcatgccctttgtccacgtcgtttacgctcattaaaacttccagaatgcaacaggacggacttggagtagggacaaggaacggaagtgggaaggggaggagcgtgcacccctcctggccttggtgcgcgccgcgccccctaaggtactttggaagggacgcgcgggccagacgcgcccagacggccgcgatggcgctgttggccggcgggctctccagagggctgggctcccacccggccgccgcaggccgggacgcggtcgtcttcgtgtggcttctgcttagcacctggtgcacagctcctgccagggccatccaggtgaccgtgtccaacccctaccacgtggtgatcctcttccagcctgtgaccctgccctgtacctaccagatgacctcgacccccacgcaacccatcgtcatctggaagtacaagtctttctgccgggaccgcatcgccgatgccttctccccggccagcgtcgacaaccagctcaatgcccagctggcagccgggaacccaggctacaacccctacgtcgagtgccaggacagcgtgcgcaccgtcagggtcgtggccaccaagcagggcaacgctgtgaccctgggagattactaccagggccggaggattaccatcaccggaaatgctgacctgacctttgaccagacggcgtggggggacagtggtgtgtattactgctccgtggtctcagcccaggacctccaggggaacaatgaggcctacgcagagctcatcgtccttgggaggacctcaggggtggctgagctcttacctggttttcaggcggggcccatagaagactggctcttcgtggttgtggtatgcctggctgccttcctcatcttcctcctcctgggcatctgctggtgccagtgctgcccgcacacttgctgctgctacgtcaggtgcccctgctgcccagacaagtgctgctgccccgaggccctgtatgccgccggcaaagcagccacctcaggtgttcccagcatttatgcccccagcacctatgcccacctgtctcccgccaagaccccacccccaccagctatgattcccatgggccctgcctacaacgggtaccctggaggataccctggagacgttgacaggagtagctcagctggtggccaaggctcctatgtacccctgcttcgggacacggacagcagtgtggcctctgaagtccgcagtggctacaggattcaggccagccagcaggacgactccatgcgggtcctgtactacatggagaaggagctggccaacttcgacccttctcgacctggcccccccagtggccgtgtggagcgggccatgagtgaagtcacctccctccacgaggacgactggcgatctcggccttcccggggccctgccctcaccccgatccgggatgaggagtggggtggccactccccccggagtcccaggggatgggaccaggagcccgccagggagcaggcaggcgggggctggcgggccaggcggccccgggcccgctccgtggacgccctggacgacctcaccccgccgagcaccgccgagtcagggagcaggtctcccacgagtaatggtgggaggagaagccgggcctacatgcccccgcggagccgcagccgggacgacctctatgaccaagacgactcgagggacttcccacgctcccgggacccccactacgacgacttcaggtctcgggagcgccctcctgccgaccccaggtcccaccaccaccgtacccgggaccctcgggacaacggctccaggtccggggacctcccctatgatgggcggctactggaggaggctgtgaggaagaaggggtcggaggagaggaggagaccccacaaggaggaggaggaagaggcctactacccgcccgcgccgcccccgtactcggagaccgactcgcaggcgtcccgagagcgcaggctcaagaagaacttggccctgagtcgggaaagtttagtcgtctgatctgacgttttctacgtagcttttgtatttttttttttaatttgaaggaacactgatgaagccctgccatacccctcccgagtctaataaaacgtataatcacaa

SEQ ID NO: 441836 - DNA, 2089 bp, Homo sapiens
ctcacccctaagcccagccctcggctcccacccttgtgtacctgggccgaaccattcaccggagcgcgcagcgggtggagtgtggctcggaggaccgcggcgggtcaagcacctttctcccccatatctgaaagcatgccctttgtccacgtcgtttacgctcattaaaacttccagaatgcaacaggacggacttggagtagggacaaggaacggaagtgggaaggggaggagcgtgcacccctcctggccttggtgcgcgccgcgccccctaaggtactttggaagggacgcgcgggccagacgcgcccagacggccgcgatggcgctgttggccggcgggctctccagagggctgggctcccacccggccgccgcaggccgggacgcggtcgtcttcgtgtggcttctgcttagcacctggtgcacagctcctgccagggccatccaggtgaccgtgtccaacccctaccacgtggtgatcctcttccagcctgtgaccctgccctgtacctaccagatgacctcgacccccacgcaacccatcgtcatctggaagtacaagtctttctgccgggaccgcatcgccgatgccttctccccggccagcgtcgacaaccagctcaatgcccagctggcagccgggaacccaggctacaacccctacgtcgagtgccaggacagcgtgcgcaccgtcagggtcgtggccaccaagcagggcaacgctgtgaccctgggagattactaccagggccggaggattaccatcaccggaaatgctgacctgacctttgaccagacggcgtggggggacagtggtgtgtattactgctccgtggtctcagcccaggacctccaggggaacaatgaggcctacgcagagctcatcgtccttgggaggacctcaggggtggctgagctcttacctggttttcaggcggggcccatagaagtgtatgccgccggcaaagcagccacctcaggtgttcccagcatttatgcccccagcacctatgcccacctgtctcccgccaagaccccacccccaccagctatgattcccatgggccctgcctacaacgggtaccctggaggataccctggagacgttgacaggagtagctcagctggtggccaaggctcctatgtacccctgcttcgggacacggacagcagtgtggcctctgaagtccgcagtggctacaggattcaggccagccagcaggacgactccatgcgggtcctgtactacatggagaaggagctggccaacttcgacccttctcgacctggcccccccagtggccgtgtggagcgggccatgagtgaagtcacctccctccacgaggacgactggcgatctcggccttcccggggccctgccctcaccccgatccgggatgaggagtggggtggccactccccccggagtcccaggggatgggaccaggagcccgccagggagcaggcaggcgggggctggcgggccaggcggccccgggcccgctccgtggacgccctggacgacctcaccccgccgagcaccgccgagtcagggagcaggtctcccacgagtaatggtgggaggagaagccgggcctacatgcccccgcggagccgcagccgggacgacctctatgaccaagacgactcgagggacttcccacgctcccgggacccccactacgacgacttcaggtctcgggagcgccctcctgccgaccccaggtcccaccaccaccgtacccgggaccctcgggacaacggctccaggtccggggacctcccctatgatgggcggctactggaggaggctgtgaggaagaaggggtcggaggagaggaggagaccccacaaggaggaggaggaagaggcctactacccgcccgcgccgcccccgtactcggagaccgactcgcaggcgtcccgagagcgcaggctcaagaagaacttggccctgagtcgggaaagtttagtcgtctgatctgacgttttctacgtagcttttgtatttttttttttaatttgaaggaacactgatgaagccctgccatacccctcccgagtctaataaaacgtataatcacaa

SEQ ID NO: 441837 - DNA, 1979 bp, Homo sapiens
accccagtggaagtggagaagtcaggcgccaccaacaagcctctcccagccaggactttgcttagactcgctcctcccggcagggcgcacctaggcgggtccatcgccagccggggagaggggtttgggcagggagggaacaggtgcgcggcgggacccgccctatctcaacagctcctgccagggccatccaggtgaccgtgtccaacccctaccacgtggtgatcctcttccagcctgtgaccctgccctgtacctaccagatgacctcgacccccacgcaacccatcgtcatctggaagtacaagtctttctgccgggaccgcatcgccgatgccttctccccggccagcgtcgacaaccagctcaatgcccagctggcagccgggaacccaggctacaacccctacgtcgagtgccaggacagcgtgcgcaccgtcagggtcgtggccaccaagcagggcaacgctgtgaccctgggagattactaccagggccggaggattaccatcaccggaaatgctgacctgacctttgaccagacggcgtggggggacagtggtgtgtattactgctccgtggtctcagcccaggacctccaggggaacaatgaggcctacgcagagctcatcgtccttgggaggacctcaggggtggctgagctcttacctggttttcaggcggggcccatagaagactggctcttcgtggttgtggtatgcctggctgccttcctcatcttcctcctcctgggcatctgctggtgccagtgctgcccgcacacttgctgctgctacgtcaggtgcccctgctgcccagacaagtgctgctgccccgaggccctgtatgccgccggcaaagcagccacctcaggtgttcccagcatttatgcccccagcacctatgcccacctgtctcccgccaagaccccacccccaccagctatgattcccatgggccctgcctacaacgggtaccctggaggataccctggagacgttgacaggagtagctcagctggtggccaaggctcctatgtacccctgcttcgggacacggacagcagtgtggcctctgaagtccgcagtggctacaggattcaggccagccagcaggacgactccatgcgggtcctgtactacatggagaaggagctggccaacttcgacccttctcgacctggcccccccagtggccgtgtggagcgggccatgagtgaagtcacctccctccacgaggacgactggcgatctcggccttcccggggccctgccctcaccccgatccgggatgaggagtggggtggccactccccccggagtcccaggggatgggaccaggagcccgccagggagcaggcaggcgggggctggcgggccaggcggccccgggcccgctccgtggacgccctggacgacctcaccccgccgagcaccgccgagtcagggagcaggtctcccacgagtaatggtgggaggagaagccgggcctacatgcccccgcggagccgcagccgggacgacctctatgaccaagacgactcgagggacttcccacgctcccgggacccccactacgacgacttcaggtctcgggagcgccctcctgccgaccccaggtcccaccaccaccgtacccgggaccctcgggacaacggctccaggtccggggacctcccctatgatgggcggctactggaggaggctgtgaggaagaaggggtcggaggagaggaggagaccccacaaggaggaggaggaagaggcctactacccgcccgcgccgcccccgtactcggagaccgactcgcaggcgtcccgagagcgcaggctcaagaagaacttggccctgagtcgggaaagtttagtcgtctgatctgacgttttctacgtagcttttgtatttttttttttaatttgaaggaacactgatgaagccctgccatacccctcccgagtctaataaaacgtataatcacaa

SEQ ID NO: 441838 - DNA, 1612 bp, Homo sapiens
ggatacttgatttcggcttgtggggacagtggtggacccagcatctgggctttatataaagggcagctttgttgccctgtaaacacacagaccatgggtggccacttcttccagtaagttagctggggagttggaagtttaggtaaaaccttttgattgacaaatgttggcgaattaccatgctgttaaatgaaacattgttctgccaccctggggctgtgggtgcctgcgtgcaccctctgaaaaatcacacaggaagtggggtggggtctctgtgaagctggtgtcccccagcctcagggatgctgcagaaatggaatgaggaccaacagggactcagatgtccaaggaagctctacagcggagaggacggcttgggaaggaggtccaggcccaggtccctccggaacccaatgggtatggggcagcctggctcctgcctcatcccccttctcctgttgattgtgtcctcacagtgtatgccgccggcaaagcagccacctcaggtgttcccagcatttatgcccccagcacctatgcccacctgtctcccgccaagaccccacccccaccagctatgattcccatgggccctgcctacaacgggtaccctggaggataccctggagacgttgacaggagtagctcagctggtggccaaggctcctatgtacccctgcttcgggacacggacagcagtgtggcctctgaagtccgcagtggctacaggattcaggccagccagcaggacgactccatgcgggtcctgtactacatggagaaggagctggccaacttcgacccttctcgacctggcccccccagtggccgtgtggagcgggccatgagtgaagtcacctccctccacgaggacgactggcgatctcggccttcccggggccctgccctcaccccgatccgggatgaggagtggggtggccactccccccggagtcccaggggatgggaccaggagcccgccagggagcaggcaggcgggggctggcgggccaggcggccccgggcccgctccgtggacgccctggacgacctcaccccgccgagcaccgccgagtcagggagcaggtctcccacgagtaatggtgggaggagaagccgggcctacatgcccccgcggagccgcagccgggacgacctctatgaccaagacgactcgagggacttcccacgctcccgggacccccactacgacgacttcaggtctcgggagcgccctcctgccgaccccaggtcccaccaccaccgtacccgggaccctcgggacaacggctccaggtccggggacctcccctatgatgggcggctactggaggaggctgtgaggaagaaggggtcggaggagaggaggagaccccacaaggaggaggaggaagaggcctactacccgcccgcgccgcccccgtactcggagaccgactcgcaggcgtcccgagagcgcaggctcaagaagaacttggccctgagtcgggaaagtttagtcgtctgatctgacgttttctacgtagcttttgtatttttttttttaatttgaaggaacactgatgaagccctgccatacccctcccgagtctaataaaacgtataatcacaa

SEQ ID NO: 441839 - DNA, 1841 bp, Homo sapiens
ctcacccctaagcccagccctcggctcccacccttgtgtacctgggccgaaccattcaccggagcgcgcagcgggtggagtgtggctcggaggaccgcggcgggtcaagcacctttctcccccatatctgaaagcatgccctttgtccacgtcgtttacgctcattaaaacttccagaatgcaacaggacggacttggagtagggacaaggaacggaagtgggaaggggaggagcgtgcacccctcctggccttggtgcgcgccgcgccccctaaggtactttggaagggacgcgcgggccagacgcgcccagacggccgcgatggcgctgttggccggcgggctctccagagggctgggctcccacccggccgccgcaggccgggacgcggtcgtcttcgtgtggcttctgcttagcacctggtgcacagctcctgccagggccatccaggtgaccgtgtccaacccctaccacgtggtgatcctcttccagcctgtgaccctgccctgtacctaccagatgacctcgacccccacgcaacccatcgtcatctggaagtacaagtctttctgccgggaccgcatcgccgatgccttctccccggccagcgtcgacaaccagctcaatgcccagctggcagccgggaacccaggctacaacccctacgtcgagtgccaggacagcgtgcgcaccgtcagggtcgtggccaccaagcagggcaacgctgtgaccctgggagattactaccagggccggaggattaccatcaccggaaatgctgacctgacctttgaccagacggcgtggggggacagtggtgtgtattactgctccgtggtctcagcccaggacctccaggggaacaatgaggcctacgcagagctcatcgtccttgtgtatgccgccggcaaagcagccacctcaggtgttcccagcatttatgcccccagcacctatgcccacctgtctcccgccaagaccccacccccaccagctatgattcccatgggccctgcctacaacgggtaccctggaggataccctggagacgttgacaggagtagctcagctggtggccaaggctcctatgtacccctgcttcgggacacggacagcagtgtggcctctgaagtccgcagtggctacaggattcaggccagccagcaggacgactccatgcgggtcctgtactacatggagaaggagctggccaacttcgacccttctcgacctggcccccccagtggccgtgtggagcggggtggacgccctggacgacctcaccccgccgagcaccgccgagtcagggagcaggtctcccacgagtaatggtgggaggagaagccgggcctacatgcccccgcggagccgcagccgggacgacctctatgaccaagacgactcgagggacttcccacgctcccgggacccccactacgacgacttcaggtctcgggagcgccctcctgccgaccccaggtcccaccaccaccgtacccgggaccctcgggacaacggctccaggtccggggacctcccctatgatgggcggctactggaggaggctgtgaggaagaaggggtcggaggagaggaggagaccccacaaggaggaggaggaagaggcctactacccgcccgcgccgcccccgtactcggagaccgactcgcaggcgtcccgagagcgcaggctcaagaagaacttggccctgagtcgggaaagtttagtcgtctgatctgacgttttctacgtagcttttgtatttttttttttaatttgaaggaacactgatgaagccctgccatacccctcccgagtctaataaaacgtataatcacaa

SEQ ID NO: 441840 - DNA, 1090 bp, Homo sapiens
ctcacccctaagcccagccctcggctcccacccttgtgtacctgggccgaaccattcaccggagcgcgcagcgggtggagtgtggctcggaggaccgcggcgggtcaagcacctttctcccccatatctgaaagcatgccctttgtccacgtcgtttacgctcattaaaacttccagaatgcaacaggacggacttggagtagggacaaggaacggaagtgggaaggggaggagcgtgcacccctcctggccttggtgcgcgccgcgccccctaaggtactttggaagggacgcgcgggccagacgcgcccagacggccgcgatggcgctgttggccggcgggctctccagagggctgggctcccacccggccgccgcaggccgggacgcggtcgtcttcgtgtggcttctgcttagcacctggtgcacagctcctgccagggccatccaggtgaccgtgtccaacccctaccacgtggtgatcctcttccagcctgtgaccctgccctgtacctaccagatgacctcgacccccacgcaacccatcgtcatctggaagtacaagtctttctgccgggaccgcatcgccgatgccttctccccggccagcgtcgacaaccagctcaatgcccagctggcagccgggaacccaggctacaacccctacgtcgagtgccaggacagcgtgcgcaccgtcagggtcgtggccaccaagcagggcaacgctgtgaccctgggagattactaccagggccggaggattaccatcaccggaaatgctgacctgacctttgaccagacggcgtggggggacagtggtgtgtattactgctccgtggtctcagcccaggaccacaaggaggaggaggaagaggcctactacccgcccgcgccgcccccgtactcggagaccgactcgcaggcgtcccgagagcgcaggctcaagaagaacttggccctgagtcgggaaagtttagtcgtctgatctgacgttttctacgtagcttttgtatttttttttttaatttgaaggaacactgatgaagccctgccatacccctcccgagtctaataaaacgtataatcacaa

SEQ ID NO: 441841 - DNA, 2075 bp, Homo sapiens
ctcacccctaagcccagccctcggctcccacccttgtgtacctgggccgaaccattcaccggagcgcgcagcgggtggagtgtggctcggaggaccgcggcgggtcaagcacctttctcccccatatctgaaagcatgccctttgtccacgtcgtttacgctcattaaaacttccagaatgcaacaggacggacttggagtagggacaaggaacggaagtgggaaggggaggagcgtgcacccctcctggccttggtgcgcgccgcgccccctaaggtactttggaagggacgcgcgggccagacgcgcccagacggccgcgatggcgctctcctgccagggccatccaggtgaccgtgtccaacccctaccacgtggtgatcctcttccagcctgtgaccctgccctgtacctaccagatgacctcgacccccacgcaacccatcgtcatctggaagtacaagtctttctgccgggaccgcatcgccgatgccttctccccggccagcgtcgacaaccagctcaatgcccagctggcagccgggaacccaggctacaacccctacgtcgagtgccaggacagcgtgcgcaccgtcagggtcgtggccaccaagcagggcaacgctgtgaccctgggagattactaccagggccggaggattaccatcaccggaaatgctgacctgacctttgaccagacggcgtggggggacagtggtgtgtattactgctccgtggtctcagcccaggacctccaggggaacaatgaggcctacgcagagctcatcgtccttgggaggacctcaggggtggctgagctcttacctggttttcaggcggggcccatagaagactggctcttcgtggttgtggtatgcctggctgccttcctcatcttcctcctcctgggcatctgctggtgccagtgctgcccgcacacttgctgctgctacgtcaggtgcccctgctgcccagacaagtgctgctgccccgaggccctgtatgccgccggcaaagcagccacctcaggtgttcccagcatttatgcccccagcacctatgcccacctgtctcccgccaagaccccacccccaccagctatgattcccatgggccctgcctacaacgggtaccctggaggataccctggagacgttgacaggagtagctcagaagtccgcagtggctacaggattcaggccagccagcaggacgactccatgcgggtcctgtactacatggagaaggagctggccaacttcgacccttctcgacctggcccccccagtggccgtgtggagcgggccatgagtgaagtcacctccctccacgaggacgactggcgatctcggccttcccggggccctgccctcaccccgatccgggatgaggagtggggtggccactccccccggagtcccaggggatgggaccaggagcccgccagggagcaggcaggcgggggctggcgggccaggcggccccgggcccgctccgtggacgccctggacgacctcaccccgccgagcaccgccgagtcagggagcaggtctcccacgagtaatggtgggaggagaagccgggcctacatgcccccgcggagccgcagccgggacgacctctatgaccaagacgactcgagggacttcccacgctcccgggacccccactacgacgacttcaggtctcgggagcgccctcctgccgaccccaggtcccaccaccaccgtacccgggaccctcgggacaacggctccaggtccggggacctcccctatgatgggcggctactggaggaggctgtgaggaagaaggggtcggaggagaggaggagaccccacaaggaggaggaggaagaggcctactacccgcccgcgccgcccccgtactcggagaccgactcgcaggcgtcccgagagcgcaggctcaagaagaacttggccctgagtcgggaaagtttagtcgtctgatctgacgttttctacgtagcttttgtatttttttttttaatttgaaggaacactgatgaagccctgccatacccctcccgagtctaataaaacgtataatcacaa

SEQ ID NO: 441842 - DNA, 2032 bp, Homo sapiens
ctcacccctaagcccagccctcggctcccacccttgtgtacctgggccgaaccattcaccggagcgcgcagcgggtggagtgtggctcggaggaccgcggcgggtcaagcacctttctcccccatatctgaaagcatgccctttgtccacgtcgtttacgctcattaaaacttccagaatgcaacaggacggacttggagtagggacaaggaacggaagtgggaaggggaggagcgtgcacccctcctggccttggtgcgcgccgcgccccctaaggtactttggaagggacgcgcgggccagacgcgcccagacggccgcgatggcgctgttggccggcgggctctccagagggctgggctcccacccggccgccgcaggccgggacgcggtcgtcttcgtgtggcttctgcttagcacctggtgcacagctcctgccagggccatccaggtgaccgtgtccaacccctaccacgtggtgatcctcttccagcctgtgaccctgccctgtacctaccagatgacctcgacccccacgcaacccatcgtcatctggaagtacaagtctttctgccgggaccgcatcgccgatgccttctccccggccagcgtcgacaaccagctcaatgcccagctggcagccgggaacccaggctacaacccctacgtcgagtgccaggacagcgtgcgcaccgtcagggtcgtggccaccaagcagggcaacgctgtgaccctgggagattactaccagggccggaggattaccatcaccggaaatgctgacctgacctttgaccagacggcgtggggggacagtggtgtgtattactgctccgtggtctcagcccaggacctccaggggaacaatgaggcctacgcagagctcatcgtccttgtgtatgccgccggcaaagcagccacctcaggtgttcccagcatttatgcccccagcacctatgcccacctgtctcccgccaagaccccacccccaccagctatgattcccatgggccctgcctacaacgggtaccctggaggataccctggagacgttgacaggagtagctcagctggtggccaaggctcctatgtacccctgcttcgggacacggacagcagtgtggcctctgaagtccgcagtggctacaggattcaggccagccagcaggacgactccatgcgggtcctgtactacatggagaaggagctggccaacttcgacccttctcgacctggcccccccagtggccgtgtggagcgggccatgagtgaagtcacctccctccacgaggacgactggcgatctcggccttcccggggccctgccctcaccccgatccgggatgaggagtggggtggccactccccccggagtcccaggggatgggaccaggagcccgccagggagcaggcaggcgggggctggcgggccaggcggccccgggcccgctccgtggacgccctggacgacctcaccccgccgagcaccgccgagtcagggagcaggtctcccacgagtaatggtgggaggagaagccgggcctacatgcccccgcggagccgcagccgggacgacctctatgaccaagacgactcgagggacttcccacgctcccgggacccccactacgacgacttcaggtctcgggagcgccctcctgccgaccccaggtcccaccaccaccgtacccgggaccctcgggacaacggctccaggtccggggacctcccctatgatgggcggctactggaggaggctgtgaggaagaaggggtcggaggagaggaggagaccccacaaggaggaggaggaagaggcctactacccgcccgcgccgcccccgtactcggagaccgactcgcaggcgtcccgagagcgcaggctcaagaagaacttggccctgagtcgggaaagtttagtcgtctgatctgacgttttctacgtagcttttgtatttttttttttaatttgaaggaacactgatgaagccctgccatacccctcccgagtctaataaaacgtataatcacaa

SEQ ID NO: 441843 - DNA, 1997 bp, Homo sapiens
ctcacccctaagcccagccctcggctcccacccttgtgtacctgggccgaaccattcaccggagcgcgcagcgggtggagtgtggctcggaggaccgcggcgggtcaagcacctttctcccccatatctgaaagcatgccctttgtccacgtcgtttacgctcattaaaacttccagaatgcaacaggacggacttggagtagggacaaggaacggaagtgggaaggggaggagcgtgcacccctcctggccttggtgcgcgccgcgccccctaaggtactttggaagggacgcgcgggccagacgcgcccagacggccgcgatggcgctgttggccggcgggctctccagagggctgggctcccacccggccgccgcaggccgggacgcggtcgtcttcgtgtggcttctgcttagcacctggtgcacagctcctgccagggccatccaggtgaccgtgtccaacccctaccacgtggtgatcctcttccagcctgtgaccctgccctgtacctaccagatgacctcgacccccacgcaacgctgtgaccctgggagattactaccagggccggaggattaccatcaccggaaatgctgacctgacctttgaccagacggcgtggggggacagtggtgtgtattactgctccgtggtctcagcccaggacctccaggggaacaatgaggcctacgcagagctcatcgtccttgactggctcttcgtggttgtggtatgcctggctgccttcctcatcttcctcctcctgggcatctgctggtgccagtgctgcccgcacacttgctgctgctacgtcaggtgcccctgctgcccagacaagtgctgctgccccgaggccctgtatgccgccggcaaagcagccacctcaggtgttcccagcatttatgcccccagcacctatgcccacctgtctcccgccaagaccccacccccaccagctatgattcccatgggccctgcctacaacgggtaccctggaggataccctggagacgttgacaggagtagctcagctggtggccaaggctcctatgtacccctgcttcgggacacggacagcagtgtggcctctgaagtccgcagtggctacaggattcaggccagccagcaggacgactccatgcgggtcctgtactacatggagaaggagctggccaacttcgacccttctcgacctggcccccccagtggccgtgtggagcgggccatgagtgaagtcacctccctccacgaggacgactggcgatctcggccttcccggggccctgccctcaccccgatccgggatgaggagtggggtggccactccccccggagtcccaggggatgggaccaggagcccgccagggagcaggcaggcgggggctggcgggccaggcggccccgggcccgctccgtggacgccctggacgacctcaccccgccgagcaccgccgagtcagggagcaggtctcccacgagtaatggtgggaggagaagccgggcctacatgcccccgcggagccgcagccgggacgacctctatgaccaagacgactcgagggacttcccacgctcccgggacccccactacgacgacttcaggtctcgggagcgccctcctgccgaccccaggtcccaccaccaccgtacccgggaccctcgggacaacggctccaggtccggggacctcccctatgatgggcggctactggaggaggctgtgaggaagaaggggtcggaggagaggaggagaccccacaaggaggaggaggaagaggcctactacccgcccgcgccgcccccgtactcggagaccgactcgcaggcgtcccgagagcgcaggctcaagaagaacttggccctgagtcgggaaagtttagtcgtctgatctgacgttttctacgtagcttttgtatttttttttttaatttgaaggaacactgatgaagccctgccatacccctcccgagtctaataaaacgtataatcacaa

SEQ ID NO: 441844 - DNA, 1912 bp, Homo sapiens
ctcacccctaagcccagccctcggctcccacccttgtgtacctgggccgaaccattcaccggagcgcgcagcgggtggagtgtggctcggaggaccgcggcgggtcaagcacctttctcccccatatctgaaagcatgccctttgtccacgtcgtttacgctcattaaaacttccagaatgcaacaggacggacttggagtagggacaaggaacggaagtgggaaggggaggagcgtgcacccctcctggccttggtgcgcgccgcgccccctaaggtactttggaagggacgcgcgggccagacgcgcccagacggccgcgatggcgctgttggccggcgggctctccagagggctgggctcccacccggccgccgcaggccgggacgcggtcgtcttcgtgtggcttctgcttagcacctggtgcacagctcctgccagggccatccaggtgaccgtgtccaacccctaccacgtggtgatcctcttccagcctgtgaccctgccctgtacctaccagatgacctcgacccccacgcaacccatcgtcatctggaagtacaagtctttctgccgggaccgcatcgccgatgccttctccccggccagcgtcgacaaccagctcaatgcccagctggcagccgggaacccaggctacaacccctacgtcgagtgccaggacagcgtgcgcaccgtcagggtcgtggccaccaagcagggcaacgctgtgaccctgggagattactaccagggccggaggattaccatcaccggaatgtatgccgccggcaaagcagccacctcaggtgttcccagcatttatgcccccagcacctatgcccacctgtctcccgccaagaccccacccccaccagctatgattcccatgggccctgcctacaacgggtaccctggaggataccctggagacgttgacaggagtagctcagctggtggccaaggctcctatgtacccctgcttcgggacacggacagcagtgtggcctctgaagtccgcagtggctacaggattcaggccagccagcaggacgactccatgcgggtcctgtactacatggagaaggagctggccaacttcgacccttctcgacctggcccccccagtggccgtgtggagcgggccatgagtgaagtcacctccctccacgaggacgactggcgatctcggccttcccggggccctgccctcaccccgatccgggatgaggagtggggtggccactccccccggagtcccaggggatgggaccaggagcccgccagggagcaggcaggcgggggctggcgggccaggcggccccgggcccgctccgtggacgccctggacgacctcaccccgccgagcaccgccgagtcagggagcaggtctcccacgagtaatggtgggaggagaagccgggcctacatgcccccgcggagccgcagccgggacgacctctatgaccaagacgactcgagggacttcccacgctcccgggacccccactacgacgacttcaggtctcgggagcgccctcctgccgaccccaggtcccaccaccaccgtacccgggaccctcgggacaacggctccaggtccggggacctcccctatgatgggcggctactggaggaggctgtgaggaagaaggggtcggaggagaggaggagaccccacaaggaggaggaggaagaggcctactacccgcccgcgccgcccccgtactcggagaccgactcgcaggcgtcccgagagcgcaggctcaagaagaacttggccctgagtcgggaaagtttagtcgtctgatctgacgttttctacgtagcttttgtatttttttttttaatttgaaggaacactgatgaagccctgccatacccctcccgagtctaataaaacgtataatcacaa

SEQ ID NO: 441845 - DNA, 2234 bp, Homo sapiens
ctcacccctaagcccagccctcggctcccacccttgtgtacctgggccgaaccattcaccggagcgcgcagcgggtggagtgtggctcggaggaccgcggcgggtcaagcacctttctcccccatatctgaaagcatgccctttgtccacgtcgtttacgctcattaaaacttccagaatgcaacaggacggacttggagtagggacaaggaacggaagtgggaaggggaggagcgtgcacccctcctggccttggtgcgcgccgcgccccctaaggtactttggaagggacgcgcgggccagacgcgcccagacggccgcgatggcgctgttggccggcgggctctccagagggctgggctcccacccggccgccgcaggccgggacgcggtcgtcttcgtgtggcttctgcttagcacctggtgcacagctcctgccagggccatccaggtgaccgtgtccaacccctaccacgtggtgatcctcttccagcctgtgaccctgccctgtacctaccagatgacctcgacccccacgcaacccatcgtcatctggaagtacaagtctttctgccgggaccgcatcgccgatgccttctccccggccagcgtcgacaaccagctcaatgcccagctggcagccgggaacccaggctacaacccctacgtcgagtgccaggacagcgtgcgcaccgtcagggtcgtggccaccaagcagggcaacgctgtgaccctgggagattactaccagggccggaggattaccatcaccggaaatgctgacctgacctttgaccagacggcgtggggggacagtggtgtgtattactgctccgtggtctcagcccaggacctccaggggaacaatgaggcctacgcagagctcatcgtccttgactggctcttcgtggttgtggtatgcctggctgccttcctcatcttcctcctcctgggcatctgctggtgccagtgctgcccgcacacttgctgctgctacgtcaggtgcccctgctgcccagacaagtgctgctgccccgaggccctgtatgccgccggcaaagcagccacctcaggtgttcccagcatttatgcccccagcacctatgcccacctgtctcccgccaagaccccacccccaccagctatgattcccatgggccctgcctacaacgggtaccctggaggataccctggagacgttgacaggagtagctcagctggtggccaaggctcctatgtacccctgcttcgggacacggacagcagtgtggcctctgaagtccgcagtggctacaggattcaggccagccagcaggacgactccatgcgggtcctgtactacatggagaaggagctggccaacttcgacccttctcgacctggcccccccagtggccgtgtggagcgggccatgagtgaagtcacctccctccacgaggacgactggcgatctcggccttcccggggccctgccctcaccccgatccgggatgaggagtggggtggccactccccccggagtcccaggggatgggaccaggagcccgccagggagcaggcaggcgggggctggcgggccaggcggccccgggcccgctccgtggacgccctggacgacctcaccccgccgagcaccgccgagtcagggagcaggtctcccacgagtaatggtgggaggagaagccgggcctacatgcccccgcggagccgcagccgggacgacctctatgaccaagacgactcgagggacttcccacgctcccgggacccccactacgacgacttcaggtctcgggagcgccctcctgccgaccccaggtcccaccaccaccgtacccgggaccctcgggacaacggctccaggtccggggacctcccctatgatgggcggctactggaggaggctgtgaggaagaaggggtcggaggagaggaggagaccccacaaggaggaggaggaagaggcctactacccgcccgcgccgcccccgtactcggagaccgactcgcaggcgtcccgagagcgcaggctcaagaagaacttggccctgagtcgggaaagtttagtcgtctgatctgacgttttctacgtagcttttgtatttttttttttaatttgaaggaacactgatgaagccctgccatacccctcccgagtctaataaaacgtataatcacaaaataaaaaaaactctggggcgcacaatctgggcggcgggaagagggtttgactgc

SEQ ID NO: 441846 - DNA, 2155 bp, Homo sapiens
ctcacccctaagcccagccctcggctcccacccttgtgtacctgggccgaaccattcaccggagcgcgcagcgggtggagtgtggctcggaggaccgcggcgggtcaagcacctttctcccccatatctgaaagcatgccctttgtccacgtcgtttacgctcattaaaacttccagaatgcaacaggacggacttggagtagggacaaggaacggaagtgggaaggggaggagcgtgcacccctcctggccttggtgcgcgccgcgccccctaaggtactttggaagggacgcgcgggccagacgcgcccagacggccgcgatggcgctgttggccggcgggctctccagagggctgggctcccacccggccgccgcaggccgggacgcggtcgtcttcgtgtggcttctgcttagcacctggtgcacagctcctgccagggccatccaggtgaccgtgtccaacccctaccacgtggtgatcctcttccagcctgtgaccctgccctgtacctaccagatgacctcgacccccacgcaacccatcgtcatctggaagtacaagtctttctgccgggaccgcatcgccgatgccttctccccggccagcgtcgacaaccagctcaatgcccagctggcagccgggaacccaggctacaacccctacgtcgagtgccaggacagcgtgcgcaccgtcagggtcgtggccaccaagcagggcaacgctgtgaccctgggagattactaccagggccggaggattaccatcaccggaaatgctgacctgacctttgaccagacggcgtggggggacagtggtgtgtattactgctccgtggtctcagcccaggacctccaggggaacaatgaggcctacgcagagctcatcgtccttgactggctcttcgtggttgtggtatgcctggctgccttcctcatcttcctcctcctgggcatctgctggtgccagtgctgcccgcacacttgctgctgctacgtcaggtgcccctgctgcccagacaagtgctgctgccccgaggccctgtatgccgccggcaaagcagccacctcaggtgttcccagcatttatgcccccagcacctatgcccacctgtctcccgccaagaccccacccccaccagctatgattcccatgggccctgcctacaacgggtaccctggaggataccctggagacgttgacaggagtagctcagctggtggccaaggctcctatgtacccctgcttcgggacacggacagcagtgtggcctctgaagtccgcagtggctacaggattcaggccagccagcaggacgactccatgcgggtcctgtactacatggagaaggagctggccaacttcgacccttctcgacctggcccccccagtggccgtgtggagcgggccatgagtgaagtcacctccctccacgaggacgactggcgatctcggccttcccggggccctgccctcaccccgatccgggatgaggagtggggtggccactccccccggagtcccaggggatgggaccaggagcccgccagggagcaggcaggcgggggctggcgggccaggcggccccgggcccgctccgtggacgccctggacgacctcaccccgccgagcaccgccgataatggtgggaggagaagccgggcctacatgcccccgcggagccgcagccgggacgacctctatgaccaagacgactcgagggacttcccacgctcccgggacccccactacgacgacttcaggtctcgggagcgccctcctgccgaccccaggtcccaccaccaccgtacccgggaccctcgggacaacggctccaggtccggggacctcccctatgatgggcggctactggaggaggctgtgaggaagaaggggtcggaggagaggaggagaccccacaaggaggaggaggaagaggcctactacccgcccgcgccgcccccgtactcggagaccgactcgcaggcgtcccgagagcgcaggctcaagaagaacttggccctgagtcgggaaagtttagtcgtctgatctgacgttttctacgtagcttttgtatttttttttttaatttgaaggaacactgatgaagccctgccatacccctcccgagtctaataaaacgtataatcacaa

SEQ ID NO: 441847 - DNA, 501 bp, Homo sapiens
gacccccactacgacgacttcaggtctcgggagcgccctcctgccgaccccaggtcccaccaccaccgtacccgggaccctcgggacaacggctccaggtccggggacctcccctatgatgggcggctactggaggaggctgtgaggaagaaggggtcggaggagaggaggagaccccacaaggaggaggaggaagaggcctactacccgcccgcgccgcccccgtactcggagaccgactcgcaggcgtcccgagagcgcaggctcaagaaggtgagggccgccctccctggcgtccagaccgtccctgggcccccagccggtccccgcggctcatacccttctttctttctcccttgcagaacttggccctgagtcgggaaagtttagtcgtctgatctgacgttttctacgtagcttttgtatttttttttttaatttgaaggaacactgatgaagccctgccatacccctcccgagtctaataaaacgtataatcac

SEQ ID NO: 441848 - DNA, 3106 bp, Homo sapiens
  misc_feature (548)..(548): n is a, c, g, or t
  misc_feature (902)..(902): n is a, c, g, or t
  misc_feature (1464)..(1464): n is a, c, g, or t
  misc_feature (1651)..(1651): n is a, c, g, or t
  misc_feature (2135)..(2135): n is a, c, g, or t
gagtaactagagcaacagttgttctccctcgctggagtggtgaataggagccgggaggaggggactgttagggtcgggctgcctcagtctccacagtaattaagaggaaattgagttggatacagcggacatgaggcctggaatgggtaccccaaacccatgcatcttaagtgtctgggtccccacgcccccttctgcctgccaggagtactctgtgcagccatcctgtaactgcttcagtccagagaaggatagcatccatccctccctccagctcgcctctctgctgaggctttctcctctccactcagcatttgcaacagcttctctcctggcacttgtctgggaatatcaagttaaaaattacaacacccaattttgataactttagttgagagaaacaacctctagtgaagactgataagtaacttattgcccgtagtcccatgttcctttgtctccaccaagaggaattaccagcccagcagttctgccctcactagagtcccgtccaggagcttgagaggagaggatttttagggctggantgcctcagtctgcacagtaataagttgagttagacacagtggacatgaggacctggactcagatatctgaagaatccttattatttttttgttggcttgttttgagacagagtcaccctgttgcccaggctggagtgcattggcgcaatcttggctcactgcaacctctgcctcccaggttcaagtgattcttcttcctcagcctcccaggtagctaggattacagacatgcgccaccacgctcagctatttttcgtatttttagtggagatggggtttcaccatgttggtcaggctggtcttgaacaccagcctcagcctccccaagtgctgggattacaggcatgagccacngtgcccggccaaaatccttaatgtttttgttttttggtttttttttttgagacagtcttgctctgtcacccaggctggagtgcagtggcacaatcttggctcactgcaagctccgcctccggggttcatgccattctcccgcctcagcctcccgagtagctgggactacaggcgcctgccaccacgcccggctgattttttgtattttttagtagaggcagggtttcaccgtgttaggatggtctcgatctcctgacctcgtgatccgcccgcctcggcctcccaaagtgctgggattacaggcgtgagccaccgcgcccgggctatccttaatgttgatattagtggttagcacatgttttggaggaggacttcacactttttaaactatgctccctcgtattttctataagcagtcttaaattctttctggaataaagcaagattgatcagtatttctcaaggaggattatttggcaggcagtagctactgctcagagaacttggtattgttacatgcatcctggaagtatctgtgcctatttctagacggcctcagacnacttttttctgagtcctggacccttgaatctgcagccaagcaagctcttgggtccctcccaagtctcatgtttagtaaagccctgtgagaataattttattggtggaggagtcaagatgatacttccctcacctgcatcagaggaaaccacatcagaaacaatccacctagaaaaacactgcatacnggaaagctgacaacttgccctgagaaatcacagctttggtgcaagaggtgaagccgaactggtaaaagatcaaagtgaattcagagatcaaactgtactagggaaaggagcagaggctgagatcttgctgccagcgtgacctctcacagagtggcccagcagaggctgtgcagagatggccagagccaggacccagccctgtggagcccctgggcacatgtggtcccgagtgaagccgtgcctgttgctctgaacaggtgggatcaatctgtaggtttttccacttttcacagagtgtggctctctttaggtctgcactccctctctgcgcagggcggacctccctgggctctgcagcatgatctcctgtcccaagacagtcgtgctcttggacagttagcttctgtcattaggaagtgcccacatgagctcttgtttattggaaaccgtgttctatgcctcctttggggtttctgcaactcantttggcaggtagcttagtggtccacttggtctcaaattccagctccaccatgtgcagttgtgtgttctttggcaagttcctcccctcctccgaatctgtcagtgggggaagagtgcatgtctcacagagttgaggtgagaaataagttaatgaatatgaaattctttgcccagcccctggcacgtggaagggctcagcaatcctgtatccgttgtagtggtcatcactctgtggctcttcactgcttttgttttgttttgggagggggtggagaacaatttgttctgtgtttgtgtggggcaaggcctgtcttcagggctctctccaaccacgtacgctctggctggagcttctgaaaggacacagttcttgcatagaagttgctttctccagcttgcccaccaggcagtctggcttcagacatctatgttgcccttttaagtcaatttggctgtttaagtggaatgtttgtgtcagtctgataattgttaattcatttgatcctcataccaacccttacttgcctccttttacagatggaaaaatcaaacttggacagtaatttccacaaggaaaagccccacagctggaaagcggtgggagcaggaggccacactgggtacaggagtacccatctccccacaggagccccacactgtctcacccttaggaagcccaaatgctcactccttgagtttctaatgcattctttctgatgtacaggaagaggggaaggaaggaagagcttttccatttggtgctccaatgtctcctgctggacccatctgcctagtggaaggcagcaaaatttcaagaaacaggtgaggttgagcagcttggtgcaaccccatggggcctggagttggagctcaacagcaatggatttcagagaccaccctgaaactcccagtaaaaaagacttgggagacatgttaataaactcaagcatttgatcgacccaaaaaaaaagt

SEQ ID NO: 441849 - DNA, 4050 bp, Homo sapiens
tatagaaggaataatttacttttcagatctgcagtggtacgaaggtccaacaccagccccatgggcttcctccggccgggatcatgctccccagtaccagcagacacagcacagacagttggacgaaggctctccactgggtcttctaggccttactcaccttcccctttggttggtaccattcctgagcaattcagtcagtgctgctgtgggcatcctcagggccatgactccaggagtagaaactcctcaggttctccagtgccacaagctcagtccccacagtctctcttatcgggtgctagactgcagagcgcccccaccctcactgacatctatcagaacaagcagaagctcagaaaacagcactctgaccccgtgtgcccatcccatactggggctgggtacagctactcgcctcagcccagtcggcctggcagccttggaacttctcccaccaagcacttggggtcctctccacggagttctgactggttctttaaaactcctttgccaacaatcattggctctcctactaagaccacagctcctttcaaaatccctaaaactcaagcatcttccaacctgttagccttggttactcgtcatgggcctgctgaagaacagtcgaaagatgggaatgagccacgggaatgtgcccattgcctcttagtgcaaggaagtgagaggcagcgggccgagcagcagagcaaggcagtgtttggcagatctgtcagtaccgggaagttatcagatcaacaaggaaagactcctatatgtcgacatcagggcagcacagacagtttaaatacagaacgaccaatggatatagctccggcaggagcctgtggtggtgttctggcacctcctgcaggtacagcagcaagttccaaggctgtcctcttcactgtagggtctcctccacacagtgcggcagcccccacttgtacccacatgttccttcgaacaagaacaacctcagtggggcccagcaactccgggggctctctttgtgccatgagtggccgcgtgtgcgtggggtccccgcctggcccaggcttcggctcttcccctccaggagcagaggcagctcccagcctgagatacgtgccttacggtgcttcaccccccagcctagaggggctcatcacctttgaagcccctgaactgccggaggagacgctgatggagcgggaacacacagacaccttacgccatctgaatgtgatgctgatgttcactgagtgtgtgctggacctgacagccatgaggggaggaaaccctgagctgtgcacatctgctgtgtccttgtaccagatccaggagagtgtggtggtggaccagatcagtcagctgagcaaagactgggggcgggtggagcagctggtgttgtacatgaaagcagcacagctgcttgcggcttctctgcatcttgccaaagcccagatcaagtccgggaaactgagcccatccacagctgtgaaacaagttgtcaagaatctgaacgaacgatataaattctgcatcaccatgtgcaagaaacttacagaaaagctgaatcgattcttctctgacaaacagaggtttattgatgaaatcaacagtgtgactgcagagaaactcatctataattgtgctgtagaaatggttcagtctgcagccctggatgagatgtttcagcagaccgaagatattgtttatcgctatcataaggcagcccttcttttggaaggcctaagtaggattctacaggaccctgcagatattgaaaatgtgcataaatataaatgtagtattgagagaagactgtcggcgctctgccatagcaccgcaaccgtgtgagcagcaggctcatcccgtggaccggtggtgggaacgtgaggtgatgcctttgggattacagcttgagttctgtcaccccatccccaggaaactgtagcttcttaactggtgactaccaaagaacaagcagtgatttgaaaaaggaaaaacaatccaaaaactacatatttgtaggaaatctgccttattggagaaaatcaccctttccctttttctttgtagaagcaggagcaagagtgtttggctcccagtttggacttggtgaataaatgtaccttagaactaggataatcggtacagttattcttaaagataattaaaaatgaaacaaagtgagtgctcgtcactgggttcatcagagcagtgtgtgaaattccatgtgtttgctgaggtgtaaaggtaaatgtattcacccctcatccaggcagtttgatatttggagtaagtttgtttaaatctgagcatgcatctttaaacagctcaggaagaaatagcttaagaagaagtgaaacatggatcttggaagaaattttgaaatcttcaatttgatcctaatatggatacatgttaatcttccaaaatctttcatattgcactaatttattaaaacaactgtgtattggattttgtaatttaactaaggcacaatggacttgtttaaaatattttacttgattgtatacatagaccctttccagaattcacatgtaatctccagtgaacttttaagtggttaaaacttgtattcatgtgaacctttgcacatttttttttttttacttctttatctacacctacagattttctcagtaatgtttttgttagcttttggttccattttttattgtgcatgcagaatgtacattgatgcctgtgaccttaggtttattaaaggctaggtttatttgggcagtattagaaacaaaatcatggatcaagagatactcttgataatttgaatagggccaaaacaaagttggtgacctaaaggcttgttagtgatgtggagttcctacatgcagtgagtggaaaatgaagttcgttttctcttaggaaaatgggcagctgtcttctgcctaatgtgtatttttcatgttaattctgacagttcaccaaatagctagtcatggagaatgcaggcagttaacttaatatccctccaggaatggttcctacgttgtgtattatttggtttcttttacttacctgcttgaatacttgaataaaccattcaccaattttaatccttttattttaatccttttacataaaataatctgaactctttgacaaattgcacagagctctttggcattaatctaattttaatgtactgataaaaacaaacatggttgtcctttactttgacaaagtaatgtaatttttaccttatttatctgtatgaaattccagtagttaatttgaacatttatttatatgacgtttgtatttttaggtctttaatacagtgtttctacctctcatttgtaactgcatgcattattcttgaaactaggtaaaactcactgaattgttgtgtaatagcctttttattattgcctgtacaaatgtatattaaggtaaaataaaactgacaaagtgtttctagggtgtagctgggtacatattaagtggcttgttgagccaggtacttccttagtgagtttagagacttggccatgaatatcctttgtcctgccccaggatttagatcttggctactgtcatgcaggcttccaggaacatagactgttttacctccacaaccctatttgttattagtgatactttattttatataatattttttattcacagtgaaatttcattcatgttctttcagttatcacctgtgttatctcagttgtaggtttattctatcctctcctcttcctctcccatttcttttttaacacaggatgaaacaggttcagagaggggaagtgattggcctaaagtcaggaactaggcaagtggtcaagccatgctttgtgactttcaagttaattcttcttgttcttgtatattaaaggtcttggggtagatggtgtgtgtgaaacagtgaagtctcaacagcagaaaagaacaaaatgtaaattcatgaataatggttctggttatacttccattatcaaggctaattaagagattttgccttgagtatagcaataataaacaaatgctttatgtttccctgaaaaaaaaaaa

SEQ ID NO: 441850 - DNA, 2130 bp, Homo sapiens
tatagaaggaataatttacttttcagatctgcagtggtacgaaggtccaacaccagccccatgggcttcctccggccgggatcatgctccccagtaccagcagacacagcacagacagttggacgaaggctctccactgggtcttctaggccttactcaccttcccctttggttggtaccattcctgagcaattcagtcagtgctgctgtgggcatcctcagggccatgactccaggagtagaaactcctcaggttctccagtgccacaagctcagtccccacagtctctcttatcgggtgctagactgcagagcgcccccaccctcactgacatctatcagaacaagcagaagctcagaaaacagcactctgaccccgtgtgcccatcccatactggggctgggtacagctactcgcctcagcccagtcggcctggcagccttggaacttctcccaccaagcacttggggtcctctccacggagttctgactggttctttaaaactcctttgccaacaatcattggctctcctactaagaccacagctcctttcaaaatccctaaaactcaagcatcttccaacctgttagccttggttactcgtcatgggcctgctgaagaacagtcgaaagatgggaatgagccacgggaatgtgcccattgcctcttagtgcaaggaagtgagaggcagcgggccgagcagcagagcaaggcagtgtttggcagatctgtcagtaccgggaagttatcagatcaacaaggaaagactcctatatgtcgacatcagggcagcacagacagtttaaatacagaacgaccaatggatatagctccggcaggagcctgtggtggtgttctggcacctcctgcaggtacagcagcaagttccaaggctgtcctcttcactgtagggtctcctccacacagtgcggcagcccccacttgtacccacatgttccttcgaacaagaacaacctcagtggggcccagcaactccgggggctctctttgtgccatgagtggccgcgtgtgcgtggggtccccgcctggcccaggcttcggctcttcccctccaggagcagaggcagctcccagcctgagatacgtgccttacggtgcttcaccccccagcctagaggggctcatcacctttgaagcccctgaactgccggaggagacgctgatggagcgggaacacacagacaccttacgccatctgaatgtgatgctgatgttcactgagtgtgtgctggacctgacagccatgaggggaggaaaccctgagctgtgcacatctgctgtgtccttgtaccagatccaggagagtgtggtggtggaccagatcagtcagctgagcaaagactgggggcgggtggagcagctggtgttgtacatgaaagcagcacagctgcttgcggcttctctgcatcttgccaaagcccagatcaagtccgggaaactgagcccatccacagctgtgaaacaagttgtcaagaatctgaacgaacgatataaattctgcatcaccatgtgcaagaaacttacagaaaagctgaatcgattcttctctgacaaacagaggtttattgatgaaatcaacagtgtgactgcagagaaactcatctataattgtgctgtagaaatggttcagtctgcagccctggatgagatgtttcagcagaccgaagatattgtttatcgctatcataaggcagcccttcttttggaaggcctaagtaggattctacaggaccctgcagatattgaaaatgtgcataaatataaatgtagtattgagagaagactgtcggcgctctgccatagcaccgcaaccgtgtgagcagcaggctcatcccgtggaccggtggtgggaacgtgaggaagaggggaaggaaggaagagcttttccatttggtgctccaatgtctcctgctggacccatctgcctagtggaaggcagcaaaatttcaagaaacaggtgaggttgagcagcttggtgcaaccccatggggcctggagttggagctcaacagcaatggatttcagagaccaccctgaaactcccagtaaaaaagacttgggagacatgttaataaactcaagcatttgatcgacccaaaaaaaaagt

SEQ ID NO: 441851 - DNA, 2087 bp, Homo sapiens
tatagaaggaataatttacttttcagatctgcagtggtacgaaggtccaacaccagccccatgggcttcctccggccgggatcatgctccccagtaccagcagacacagcacagacagttggacgaaggctctccactgggtcttctaggccttactcaccttcccctttggttggtaccattcctgagcaattcagtcagtgctgctgtgggcatcctcagggccatgactccaggagtagaaactcctcaggttctccagtgccacaagctcagtccccacagtctctcttatcgggtgctagactgcagagcgcccccaccctcactgacatctatcagaacaagcagaagctcagaaaacagcactctgaccccgtgtgcccatcccatactggggctgggtacagctactcgcctcagcccagtcggcctggcagccttggaacttctcccaccaagcacttggggtcctctccacggagttctgactggttctttaaaactcctttgccaacaatcattggctctcctactaagaccacagctcctttcaaaatccctaaaactcaagcatcttccaacctgttagccttggttactcgtcatgggcctgctgaagaacagtcgaaagatgggaatgagccacgggaatgtgcccattgcctcttagtgcaaggaagtgagaggcagcgggccgagcagcagagcaaggcagtgtttggcagatctgtcagtaccgggaagttatcagatcaacaaggaaagactcctatatgtcgacatcagggcagcacagacagtttaaatacagaacgaccaatggatatagctccggcaggagcctgtggtggtgttctggcacctcctgcaggtacagcagcaagttccaaggctgtcctcttcactgtagggtctcctccacacagtgcggcagcccccacttgtacccacatgttccttcgaacaagaacaacctcagtggggcccagcaactccgggggctctctttgtgccatgagtggccgcgtgtgcgtggggtccccgcctggcccaggcttcggctcttcccctccaggagcagaggcagctcccagcctgagatacgtgccttacggtgcttcaccccccagcctagaggggctcatcacctttgaagcccctgaactgccggaggagacgctgatggagcgggaacacacagacaccttacgccatctgaatgtgatgctgatgttcactgagtgtgtgctggacctgacagccatgaggggaggaaaccctgagctgtgcacatctgctgtgtccttgtaccagatccaggagagtgtggtggtggaccagatcagtcagctgagcaaagactgggggcgggtggagcagctggtgttgtacatgaaagcagcacagctgcttgcggcttctctgcatcttgccaaagcccagatcaagtccgggaaactgagcccatccacagctgtgaaacaagttgtcaagaatctgaacgaacgatataaattctgcatcaccatgtgcaagaaacttacagaaaagctgaatcgattcttctctgacaaacagaggtttattgatgaaatcaacagtgtgactgcagagaaactcatctataattgtgctgtagaaatggttcagtctgcagccctggatgagatgtttcagcagaccgaagatattgtttatcgctatcataaggcagcccttcttttggaaggcctaagtaggattctacaggaccctgcagatattgaaaatgtgcataaatcaccgcaaccgtgtgagcagcaggctcatcccgtggaccggtggtgggaacgtgaggaagaggggaaggaaggaagagcttttccatttggtgctccaatgtctcctgctggacccatctgcctagtggaaggcagcaaaatttcaagaaacaggtgaggttgagcagcttggtgcaaccccatggggcctggagttggagctcaacagcaatggatttcagagaccaccctgaaactcccagtaaaaaagacttgggagacatgttaataaactcaagcatttgatcgacccaaaaaaaaagt

SEQ ID NO: 441852 - DNA, 124 bp, Homo sapiens
atttttaatctgaaattttctaagacaaattgactttgctgcagcgggaacacacagacaccttacgccatctgaatgtgatgctgatgttcactgagtgtgtgctggacctgacagccatgag

SEQ ID NO: 441853 - DNA, 290 bp, Homo sapiens
tcactgacatctatcagaacaagcagaagctcagaaaacagcactctgaccccgtgtgcccatcccatactggggctgggtacagctactcgcctcagcccagtcggcctggcagccttggaacttctcccaccaagcacttggggtcctctccacggagttctgactggttctttaaaactcctttgccaacaatcattggctctcctactaaggtttgtttattaaacccttttgtaggtcaggaactggtatagtactttatggaaaggattcattatgagaatagc

SEQ ID NO: 441854 - DNA, 3969 bp, Homo sapiens
tatagaaggaataatttacttttcagatctgcagtggtacgaaggtccaacaccagccccatgggcttcctccggccgggatcatgctccccagtaccagcagacacagcacagacagttggacgaaggctctccactgggtcttctaggccttactcaccttcccctttggttggtaccattcctgagcaattcagtcagtgctgctgtgggcatcctcagggccatgactccaggagtagaaactcctcaggttctccagtgccacaagctcagtccccacagtctctcttatcgggtgctagactgcagagcgcccccaccctcactgacatctatcagaacaagcagaagctcagaaaacagcactctgaccccgtgtgcccatcccatactggggctgggtacagctactcgcctcagcccagtcggcctggcagccttggaacttctcccaccaagcacttggggtcctctccacggagttctgactggttctttaaaactcctttgccaacaatcattggctctcctactaagaccacagctcctttcaaaatccctaaaactcaagcatcttccaacctgttagccttggttactcgtcatgggcctgctgaagaacagtcgaaagatgggaatgagccacgggaatgtgcccattgcctcttagtgcaaggaagtgagaggcagcgggccgagcagcagagcaaggcagtgtttggcagatctgtcagtaccgggaagttatcagatcaacaaggaaagactcctatatgtcgacatcagggcagcacagacagtttaaatacagaacgaccaatggatatagggtctcctccacacagtgcggcagcccccacttgtacccacatgttccttcgaacaagaacaacctcagtggggcccagcaactccgggggctctctttgtgccatgagtggccgcgtgtgcgtggggtccccgcctggcccaggcttcggctcttcccctccaggagcagaggcagctcccagcctgagatacgtgccttacggtgcttcaccccccagcctagaggggctcatcacctttgaagcccctgaactgccggaggagacgctgatggagcgggaacacacagacaccttacgccatctgaatgtgatgctgatgttcactgagtgtgtgctggacctgacagccatgaggggaggaaaccctgagctgtgcacatctgctgtgtccttgtaccagatccaggagagtgtggtggtggaccagatcagtcagctgagcaaagactgggggcgggtggagcagctggtgttgtacatgaaagcagcacagctgcttgcggcttctctgcatcttgccaaagcccagatcaagtccgggaaactgagcccatccacagctgtgaaacaagttgtcaagaatctgaacgaacgatataaattctgcatcaccatgtgcaagaaacttacagaaaagctgaatcgattcttctctgacaaacagaggtttattgatgaaatcaacagtgtgactgcagagaaactcatctataattgtgctgtagaaatggttcagtctgcagccctggatgagatgtttcagcagaccgaagatattgtttatcgctatcataaggcagcccttcttttggaaggcctaagtaggattctacaggaccctgcagatattgaaaatgtgcataaatataaatgtagtattgagagaagactgtcggcgctctgccatagcaccgcaaccgtgtgagcagcaggctcatcccgtggaccggtggtgggaacgtgaggtgatgcctttgggattacagcttgagttctgtcaccccatccccaggaaactgtagcttcttaactggtgactaccaaagaacaagcagtgatttgaaaaaggaaaaacaatccaaaaactacatatttgtaggaaatctgccttattggagaaaatcaccctttccctttttctttgtagaagcaggagcaagagtgtttggctcccagtttggacttggtgaataaatgtaccttagaactaggataatcggtacagttattcttaaagataattaaaaatgaaacaaagtgagtgctcgtcactgggttcatcagagcagtgtgtgaaattccatgtgtttgctgaggtgtaaaggtaaatgtattcacccctcatccaggcagtttgatatttggagtaagtttgtttaaatctgagcatgcatctttaaacagctcaggaagaaatagcttaagaagaagtgaaacatggatcttggaagaaattttgaaatcttcaatttgatcctaatatggatacatgttaatcttccaaaatctttcatattgcactaatttattaaaacaactgtgtattggattttgtaatttaactaaggcacaatggacttgtttaaaatattttacttgattgtatacatagaccctttccagaattcacatgtaatctccagtgaacttttaagtggttaaaacttgtattcatgtgaacctttgcacatttttttttttttacttctttatctacacctacagattttctcagtaatgtttttgttagcttttggttccattttttattgtgcatgcagaatgtacattgatgcctgtgaccttaggtttattaaaggctaggtttatttgggcagtattagaaacaaaatcatggatcaagagatactcttgataatttgaatagggccaaaacaaagttggtgacctaaaggcttgttagtgatgtggagttcctacatgcagtgagtggaaaatgaagttcgttttctcttaggaaaatgggcagctgtcttctgcctaatgtgtatttttcatgttaattctgacagttcaccaaatagctagtcatggagaatgcaggcagttaacttaatatccctccaggaatggttcctacgttgtgtattatttggtttcttttacttacctgcttgaatacttgaataaaccattcaccaattttaatccttttattttaatccttttacataaaataatctgaactctttgacaaattgcacagagctctttggcattaatctaattttaatgtactgataaaaacaaacatggttgtcctttactttgacaaagtaatgtaatttttaccttatttatctgtatgaaattccagtagttaatttgaacatttatttatatgacgtttgtatttttaggtctttaatacagtgtttctacctctcatttgtaactgcatgcattattcttgaaactaggtaaaactcactgaattgttgtgtaatagcctttttattattgcctgtacaaatgtatattaaggtaaaataaaactgacaaagtgtttctagggtgtagctgggtacatattaagtggcttgttgagccaggtacttccttagtgagtttagagacttggccatgaatatcctttgtcctgccccaggatttagatcttggctactgtcatgcaggcttccaggaacatagactgttttacctccacaaccctatttgttattagtgatactttattttatataatattttttattcacagtgaaatttcattcatgttctttcagttatcacctgtgttatctcagttgtaggtttattctatcctctcctcttcctctcccatttcttttttaacacaggatgaaacaggttcagagaggggaagtgattggcctaaagtcaggaactaggcaagtggtcaagccatgctttgtgactttcaagttaattcttcttgttcttgtatattaaaggtcttggggtagatggtgtgtgtgaaacagtgaagtctcaacagcagaaaagaacaaaatgtaaattcatgaataatggttctggttatacttccattatcaaggctaattaagagattttgccttgagtatagcaataataaacaaatgctttatgtttccctgaaaaaaaaaaa

SEQ ID NO: 441855 - DNA, 1779 bp, Homo sapiens
cccggggcggggcctccggggaccgcggggccgttggtttcgggacggaacgttcacgcggctggggcgggcgcgcgggggaagggtttgcggcggcgccgctgccggctaacgcggaggggcgcctggaggcggcgtggcgtccgctctggctccgactccggctctcgctctcgcttctagcccgcgtgcctgcgcagtcccctccccgagaaccatccccttgccccgcccagcgtcaggggtgcgcggccgccgagagaccccggaggcgtagccggctgcggaggcgaagaggtggcagcgcgagctgggaccagcgtctcggaggcgccgcagaattcacagatggattcagtggaaaagacaacaaatagaagtgaacaaaaatccagaaagtttttaaaaagcctcatccggaaacagccccaggaactgctcctggttatcgggactggcgtcagcgcagcagtggcccccggaatccctgccctttgctcgtggagaagctgcatcgaggccgtcatcgaggctgcagagcagctggaggtgctgcaccccggagacgtcgccgagttccggaggaaagtgacaaaggaccgggacctgttggttgtcgcccatgatctgatccggaagatgtcacctcgcacaggcgatgccaagcccagcttcttccaggactgcctgatggaggtgtttgacgacctggagcagcacatccggagtcctctggtgctgcagtcgatcctcagcctgatggacagaggcgccatggtcctgaccaccaactatgacaacctgctggaggcctttggccggcggcagaacaagcccatggagtccctggacttgaaggacaagaccaaggtccttgaatgggcaagagggcacatgaagtacggcgtcctccacattcacggcctctacacggacccctgcggggtggtgctggacccatcggggtataaagacgtcactcaagacgcagaagtcatggaagtcctccagaacttataccgcaccaagtcctttctgtttgtgggctgtggggagacccttcgtgatcagatattccaggccctctttctttactccgtgccgaataaggtggatttggagcactacatgcttgtgctgaaggagaatgaagaccatttctttaagcatcaggcagatatgcttctgcacggaatcaaagttgtatcctacggggactgttttgaccactttccaggatatgtgcaagaccttgccactcagatctgcaaacagcaaagcccagatgctgatcgcgtggacagcaccacattattgggtaatgcatgccaggactgtgcaaagaggaagttagaagagaatggaattgaagtttcaaaaaaacgcacacaatcagatactgatgatgctggagggtcttgaaatctttacagtaaaacctgcaacttgaaaactagccttctgtaaccacagtgcccaaacgaagaggaatgtatggagaactccacgtggatctctgattgcgaaaccgtcacatacaccaagagagccacatgggcatgtggccctcaaggctgggtgagagggctcccctgtgtgttgaactatgcaggagggtgacgcggacacatttcaggtggactttgcaaggactgatggatagctacctcagggaccagaatccgtgggaagggatggacctggtgttcccgttcccatctgacaggctctcttttgtcaaggtggtatttttcgtaataaaaggggaagagtaaagac

SEQ ID NO: 441856 - DNA, 673 bp, Homo sapiens
gcacggggcagtgtacacgggggcagggccgcctgaggggagcgggcagggccaaggcacccactcctgccggtagtgccatggagtagacatctgctctctgcgtctgagccacatggtccccactgctggggcttgctgttggaaacagacagccagttgcataaacagaactgccagctggctcaccgcccagtgatggcagcagggctgttggtgtttgtgtccattccacctgctgctgtgcgggctccggggtgaagatgacttgacagtgacccgatgggcatctttgtaaggtcccgtgttctgtatcttgataaggtcctgcgttctgtatcttgaactgaaaggaatgcacttagccatttgataaatacttttctccacatacatatgtatatttttttctgggtgtgtagaagtaatacagaaatagcagtaattaaaatataacatataacttagaagtgaaagtccccatagcccacctaaagtaatcactcttaacagtttgctgtaacctcaagtgttaaagacattttctatgtaactgtctgtctttaaataagtcctttttttccaccctgagacagggtctcactttgttgcccaggctggtctcgaactcctgagcttcaagtcttggccttggcctgagtagctgggatta

SEQ ID NO: 441857 - DNA, 424 bp, Homo sapiens
acctgcgacagggatgcgcgaggagtcagggggcctcgccggatcgaacctaagctggggaagagtatttcttgtatttttagggcgaagaggtggcagcgcgagctgggaccagcgtctcggaggcgccgcagaattcacagatggattcagtggaaaagacaatattttcaccccaatgtctaatgtaaagaccccgaggtctaggtgtgttgtgtaatggatttgctacaatttcacggtgctgaaagaggatgccctcatactttgcaaaatgggccttgtgaatgaaaaggatcagtcatgtcaggaaaagcgccacaatgatgaaatatgatagataagtcagtctttcatcgtgtaagtagctactatggggtacgaactgtatgaaaactaccactcttgaataagattctgctga

SEQ ID NO: 441858 - DNA, 3279 bp, Homo sapiens
gcccacccacgcacaatctcagtcctcgcaatacccacaagagaaattctcagcctcggggaagagtatttcttgatgagggaagagcgcggggaagacactcacgcacgcacaaacatgtgggcggccatggtgtgcccagcgccgtgctggcttctgggaacccccagtggacaagacggacaaggtaccggctctcaggggaagtgggagccagtcacaagcgtacctaatttcggagagtgacaagtactctgaaaaagaaagaaggtagggctggtgactggccaatttaagcgggcaggagtctgctgggggacggagaccagcctcaggtctgggttggggacagaagctgtgcctaagtgtggtgcaggatgcagttgcaaaggagcgcttccgatcgcacttgatgctcgccacgtccctgcaaagtgctcccgccccctttctgcaaatgaggaaacgggacgcgcggctcgccgggccagcccgcgtgcctgcgcagtcccctccccgagaaccatccccttgccccgcccagcgtcaggggtgcgcggccgccgagagaccccggaggcgtagccggctgcggaggcgaagaggtggcagcgcgagctgggaccagcgtctcggaggcgccgcagaattcacagatggattcagtggaaaagacaacaaatagaagtgaacaaaaatccagaaagtttttaaaaagcctcatccggaaacagccccaggaactgctcctggttatcgggactggcgtcagcgcagcagtggcccccggaatccctgccctttgctcgtggagaagctgcatcgaggccgtcatcgaggctgcagagcagctggaggtgctgcaccccggagacgtcgccgagttccggaggaaagtgacaaaggaccgggacctgttggttgtcgcccatgatctgatccggaagatgtcacctcgcacaggcgatgccaagcccagcttcttccaggactgcctgatggaggtgtttgacgacctggagcagcacatccggagtcctctggtgctgcagtcgatcctcagcctgatggacagaggcgccatggtcctgaccaccaactatgacaacctgctggaggcctttggccggcggcagaacaagcccatggagtccctggacttgaaggacaagaccaaggtccttgaatgggcaagagggcacatgaagtacggcgtcctccacattcacggcctctacacggacccctgcggggtggtgctggacccatcggggtataaagacgtcactcaagacgcagaagtcatggaagtcctccagaacttataccgcaccaagtcctttctgtttgtgggctgtggggagacccttcgtgatcagatattccaggccctctttctttactccgtgccgaataaggtggatttggagcactacatgcttgtgctgaaggagaatgaagaccatttctttaagcatcaggcagatatgcttctgcacggaatcaaagttgtatcctacggggactgttttgaccactttccaggatatgtgcaagaccttgccactcagatctgcaaacagcaaagcccagatgctgatcgcgtggacagcaccacattattgggtaatgcatgccaggactgtgcaaagaggaagttagaagagaatggaattgaagtttcaaaaaaacgcacacaatcagatactgatgatgctggagggtcttgaaatctttacagtaaaacctgcaacttgaaaactagccttctgtaaccacagtgcccaaacgaagaggaatgtatggagaactccacgtggatctctgattgcgaaaccgtcacatacaccaagagagccacatgggcatgtggccctcaaggctgggtgagagggctcccctgtgtgttgaactatgcaggagggtgacgcggacacatttcaggtggactttgcaaggactgatggatagctacctcagggaccagaatccgtgggaagggatggacctggtgttcccgttcccatctgacaggctctcttttgtcaaggtggtatttttcgtaataaaaggggaagagtaaagactgtccaagcaacagtagctgccaaagagaaaatacgaaatagacactttttttttttgagtcagagtctcactctgtcacccaggacagagtgcagtggtacgatctcaagctcactgcagccaccaccgcctgggctcaagtgattctcctgcctcagcctcccgagtagctgggattacaggcgtccaccaccatgcccagctaatttttttatttttagtagagttggagtttcaccatgttggccaggatggtctcgaactcttgacctcaggtgatccacccgccttggcctcccaaagtgctaggattacaggcatgagccactgcgcccagcaaaataaacacattttataatttgtatgtggaaacatgttactatagaaagcattttaaaggtacgttttaaaggtccactgttaaatagtaaagaatgaatccgctagcgaaaatgtttttagggagaacagctggatcaaaagggcttctttggaattaggttgttttagtaacttctgttccaaagaaacacaggtctgatattgctaagaactgaaatcggaggagccagaggcccttttcagtccaggccaacattgtgcacggccactgtgggactgacaaccgggatagctcaagttcgagagaccaggtttcaaacattataagttccaggctttgcaagtctttattctctggggtaatatccagtctttctgttattgtctcttaaaattctcttccatggcccacattaagggagtttgcagagagtgagggaggcaaaacttgaaaagggcctgcaacactttaaaccttctcaggttcacccacatgaaacggctgtgctgagtgtgctgccggtgcccggggagcttctctgactgtgacccggcagaggcttctgtggcggtgcatgagcggccctacagtggagggttctctttggaaacaaacagccctgcttggtttcagtttgaggccacttatcttcaatgtgacatttcttgccaagccctgtgacactccccattgatgactcccataggtacagataaagttaagaacaggaaacagaagggtaggatgcatagggagggagagaagccctgaaaactttttttttctttttgaagcatggaaaacaaatcttttatgccactccagccataaataaaattttaacttca

SEQ ID NO: 441859 - DNA, 2975 bp, Homo sapiens
gcccacccacgcacaatctcagtcctcgcaatacccacaagagaaattctcagcctcggggaagagtatttcttgatgagggaagagcgcggggaagacactcacgcacgcacaaacatgtgggcggccatggtgtgcccagcgccgtgctggcttctgggaacccccagtggacaagacggacaagcccgcgtgcctgcgcagtcccctccccgagaaccatccccttgccccgcccagcgtcaggggtgcgcggccgccgagagaccccggaggcgtagccggctgcggaggcgaagaggtggcagcgcgagctgggaccagcgtctcggaggcgccgcagaattcacagatggattcagtggaaaagacaacaaatagaagtgaacaaaaatccagaaagtttttaaaaagcctcatccggaaacagccccaggaactgctcctggttatcgggactggcgtcagcgcagcagtggcccccggaatccctgccctttgctcgtggagaagctgcatcgaggccgtcatcgaggctgcagagcagctggaggtgctgcaccccggagacgtcgccgagttccggaggaaagtgacaaaggaccgggacctgttggttgtcgcccatgatctgatccggaagatgtcacctcgcacaggcgatgccaagcccagcttcttccaggactgcctgatggaggtgtttgacgacctggagcagcacatccggagtcctctggtgctgcagtcgatcctcagcctgatggacagaggcgccatggtcctgaccaccaactatgacaacctgctggaggcctttggccggcggcagaacaagcccatggagtccctggacttgaaggacaagaccaaggtccttgaatgggcaagagggcacatgaagtacggcgtcctccacattcacggcctctacacggacccctgcggggtggtgctggacccatcggggtataaagacgtcactcaagacgcagaagtcatggaagtcctccagaacttataccgcaccaagtcctttctgtttgtgggctgtggggagacccttcgtgatcagatattccaggccctctttctttactccgtgccgaataaggtggatttggagcactacatgcttgtgctgaaggagaatgaagaccatttctttaagcatcaggcagatatgcttctgcacggaatcaaagttgtatcctacggggactgttttgaccactttccaggatatgtgcaagaccttgccactcagatctgcaaacagcaaagcccagatgctgatcgcgtggacagcaccacattattgggtaatgcatgccaggactgtgcaaagaggaagttagaagagaatggaattgaagtttcaaaaaaacgcacacaatcagatactgatgatgctggagggtcttgaaatctttacagtaaaacctgcaacttgaaaactagccttctgtaaccacagtgcccaaacgaagaggaatgtatggagaactccacgtggatctctgattgcgaaaccgtcacatacaccaagagagccacatgggcatgtggccctcaaggctgggtgagagggctcccctgtgtgttgaactatgcaggagggtgacgcggacacatttcaggtggactttgcaaggactgatggatagctacctcagggaccagaatccgtgggaagggatggacctggtgttcccgttcccatctgacaggctctcttttgtcaaggtggtatttttcgtaataaaaggggaagagtaaagactgtccaagcaacagtagctgccaaagagaaaatacgaaatagacactttttttttttgagtcagagtctcactctgtcacccaggacagagtgcagtggtacgatctcaagctcactgcagccaccaccgcctgggctcaagtgattctcctgcctcagcctcccgagtagctgggattacaggcgtccaccaccatgcccagctaatttttttatttttagtagagttggagtttcaccatgttggccaggatggtctcgaactcttgacctcaggtgatccacccgccttggcctcccaaagtgctaggattacaggcatgagccactgcgcccagcaaaataaacacattttataatttgtatgtggaaacatgttactatagaaagcattttaaaggtacgttttaaaggtccactgttaaatagtaaagaatgaatccgctagcgaaaatgtttttagggagaacagctggatcaaaagggcttctttggaattaggttgttttagtaacttctgttccaaagaaacacaggtctgatattgctaagaactgaaatcggaggagccagaggcccttttcagtccaggccaacattgtgcacggccactgtgggactgacaaccgggatagctcaagttcgagagaccaggtttcaaacattataagttccaggctttgcaagtctttattctctggggtaatatccagtctttctgttattgtctcttaaaattctcttccatggcccacattaagggagtttgcagagagtgagggaggcaaaacttgaaaagggcctgcaacactttaaaccttctcaggttcacccacatgaaacggctgtgctgagtgtgctgccggtgcccggggagcttctctgactgtgacccggcagaggcttctgtggcggtgcatgagcggccctacagtggagggttctctttggaaacaaacagccctgcttggtttcagtttgaggccacttatcttcaatgtgacatttcttgccaagccctgtgacactccccattgatgactcccataggtacagataaagttaagaacaggaaacagaagggtaggatgcatagggagggagagaagccctgaaaactttttttttctttttgaagcatggaaaacaaatcttttatgccactccagccataaataaaattttaacttca

SEQ ID NO: 441860 - DNA, 2425 bp, Homo sapiens
gcacggggcagtgtacacgggggcagggccgcctgaggggagcgggcagggccaaggcacccactcctgccggtagtgccatggagtagacatctgctctctgcgtctgagccacatggtccccactgctggggcttgctgttggaaacagacagccagttgcataaacagaactgccagctggctcaccgcccagtgatggcagcagggctgttggtgtttgtgtccattccacctgctgctgtgcgggctccggggtgaagatgacttgacagtgacccgatgggcatctttgtaaggtccttgaatgggcaagagggcacatgaagtacggcgtcctccacattcacggcctctacacggacccctgcggggtggtgctggacccatcggggtataaagacgtcactcaagacgcagaagtcatggtacggcccgtcctaattagcatcggaagtcctccagaacttataccgcaccaagtcctttctgtttgtgggctgtggggagacccttcgtgatcagatattccaggccctctttctttactccgtgccgaataaggtggatttggagcactacatgcttgtgctgaaggagaatgaagaccatttctttaagcatcaggcagatatgcttctgcacggaatcaaagttgtatcctacggggactgttttgaccactttccaggatatgtgcaagaccttgccactcagatctgcaaacagcaaagcccagatgctgatcgcgtggacagcaccacattattgggtaatgcatgccaggactgtgcaaagaggaagttagaagagaatggaattgaagtttcaaaaaaacgcacacaatcagatactgatgatgctggagggtcttgaaatctttacagtaaaacctgcaacttgaaaactagccttctgtaaccacagtgcccaaacgaagaggaatgtatggagaactccacgtggatctctgattgcgaaaccgtcacatacaccaagagagccacatgggcatgtggccctcaaggctgggtgagagggctcccctgtgtgttgaactatgcaggagggtgacgcggacacatttcaggtggactttgcaaggactgatggatagctacctcagggaccagaatccgtgggaagggatggacctggtgttcccgttcccatctgacaggctctcttttgtcaaggtggtatttttcgtaataaaaggggaagagtaaagactgtccaagcaacagtagctgccaaagagaaaatacgaaatagacactttttttttttgagtcagagtctcactctgtcacccaggacagagtgcagtggtacgatctcaagctcactgcagccaccaccgcctgggctcaagtgattctcctgcctcagcctcccgagtagctgggattacaggcgtccaccaccatgcccagctaatttttttatttttagtagagttggagtttcaccatgttggccaggatggtctcgaactcttgacctcaggtgatccacccgccttggcctcccaaagtgctaggattacaggcatgagccactgcgcccagcaaaataaacacattttataatttgtatgtggaaacatgttactatagaaagcattttaaaggtacgttttaaaggtccactgttaaatagtaaagaatgaatccgctagcgaaaatgtttttagggagaacagctggatcaaaagggcttctttggaattaggttgttttagtaacttctgttccaaagaaacacaggtctgatattgctaagaactgaaatcggaggagccagaggcccttttcagtccaggccaacattgtgcacggccactgtgggactgacaaccgggatagctcaagttcgagagaccaggtttcaaacattataagttccaggctttgcaagtctttattctctggggtaatatccagtctttctgttattgtctcttaaaattctcttccatggcccacattaagggagtttgcagagagtgagggaggcaaaacttgaaaagggcctgcaacactttaaaccttctcaggttcacccacatgaaacggctgtgctgagtgtgctgccggtgcccggggagcttctctgactgtgacccggcagaggcttctgtggcggtgcatgagcggccctacagtggagggttctctttggaaacaaacagccctgcttggtttcagtttgaggccacttatcttcaatgtgacatttcttgccaagccctgtgacactccccattgatgactcccataggtacagataaagttaagaacaggaaacagaagggtaggatgcatagggagggagagaagccctgaaaactttttttttctttttgaagcatggaaaacaaatcttttatgccactccagccataaataaaattttaacttca

SEQ ID NO: 441861 - DNA, 2318 bp, Homo sapiens
ttttgctatcatgggaccagcatgactggcgctaacagccgatcctctctcaggttttacaggtgtgactgtaccgtcgtaggacgggaataactagggctcacaaccaagtttctcttaggttttgaaggtataagtgtaaagtgaagcatctctcgatgattctttccaagataggtttagatgtgtttctttttcttggcttgatgtttggtaggtccttgaatgggcaagagggcacatgaagtacggcgtcctccacattcacggcctctacacggacccctgcggggtggtgctggacccatcggggtataaagacgtcactcaagacgcagaagtcatggaagtcctccagaacttataccgcaccaagtcctttctgtttgtgggctgtggggagacccttcgtgatcagatattccaggccctctttctttactccgtgccgaataaggtggatttggagcactacatgcttgtgctgaaggagaatgaagaccatttctttaagcatcaggcagatatgcttctgcacggaatcaaagttgtatcctacggggactgttttgaccactttccaggatatgtgcaagaccttgccactcagatctgcaaacagcaaagcccagatgctgatcgcgtggacagcaccacattattgggtaatgcatgccaggactgtgcaaagaggaagttagaagagaatggaattgaagtttcaaaaaaacgcacacaatcagatactgatgatgctggagggtcttgaaatctttacagtaaaacctgcaacttgaaaactagccttctgtaaccacagtgcccaaacgaagaggaatgtatggagaactccacgtggatctctgattgcgaaaccgtcacatacaccaagagagccacatgggcatgtggccctcaaggctgggtgagagggctcccctgtgtgttgaactatgcaggagggtgacgcggacacatttcaggtggactttgcaaggactgatggatagctacctcagggaccagaatccgtgggaagggatggacctggtgttcccgttcccatctgacaggctctcttttgtcaaggtggtatttttcgtaataaaaggggaagagtaaagactgtccaagcaacagtagctgccaaagagaaaatacgaaatagacactttttttttttgagtcagagtctcactctgtcacccaggacagagtgcagtggtacgatctcaagctcactgcagccaccaccgcctgggctcaagtgattctcctgcctcagcctcccgagtagctgggattacaggcgtccaccaccatgcccagctaatttttttatttttagtagagttggagtttcaccatgttggccaggatggtctcgaactcttgacctcaggtgatccacccgccttggcctcccaaagtgctaggattacaggcatgagccactgcgcccagcaaaataaacacattttataatttgtatgtggaaacatgttactatagaaagcattttaaaggtacgttttaaaggtccactgttaaatagtaaagaatgaatccgctagcgaaaatgtttttagggagaacagctggatcaaaagggcttctttggaattaggttgttttagtaacttctgttccaaagaaacacaggtctgatattgctaagaactgaaatcggaggagccagaggcccttttcagtccaggccaacattgtgcacggccactgtgggactgacaaccgggatagctcaagttcgagagaccaggtttcaaacattataagttccaggctttgcaagtctttattctctggggtaatatccagtctttctgttattgtctcttaaaattctcttccatggcccacattaagggagtttgcagagagtgagggaggcaaaacttgaaaagggcctgcaacactttaaaccttctcaggttcacccacatgaaacggctgtgctgagtgtgctgccggtgcccggggagcttctctgactgtgacccggcagaggcttctgtggcggtgcatgagcggccctacagtggagggttctctttggaaacaaacagccctgcttggtttcagtttgaggccacttatcttcaatgtgacatttcttgccaagccctgtgacactccccattgatgactcccataggtacagataaagttaagaacaggaaacagaagggtaggatgcatagggagggagagaagccctgaaaactttttttttctttttgaagcatggaaaacaaatcttttatgccactccagccataaataaaattttaacttca

SEQ ID NO: 441862 - DNA, 1820 bp, Homo sapiens
cgcagcccgcgcgggctgacctgcccagaagcctgttcccagtccctgccgttcccagtcactgcctcagggtggccgaggaggacgagctcttggtgtctcggctccactgactgcttttctttctccttcagatgctgatcgcgtggacagcaccacattattgggtaatgcatgccaggactgtgcaaagaggaagttagaagagaatggaattgaagtttcaaaaaaacgcacacaatcagatactgatgatgctggagggtcttgaaatctttacagtaaaacctgcaacttgaaaactagccttctgtaaccacagtgcccaaacgaagaggaatgtatggagaactccacgtggatctctgattgcgaaaccgtcacatacaccaagagagccacatgggcatgtggccctcaaggctgggtgagagggctcccctgtgtgttgaactatgcaggagggtgacgcggacacatttcaggtggactttgcaaggactgatggatagctacctcagggaccagaatccgtgggaagggatggacctggtgttcccgttcccatctgacaggctctcttttgtcaaggtggtatttttcgtaataaaaggggaagagtaaagactgtccaagcaacagtagctgccaaagagaaaatacgaaatagacactttttttttttgagtcagagtctcactctgtcacccaggacagagtgcagtggtacgatctcaagctcactgcagccaccaccgcctgggctcaagtgattctcctgcctcagcctcccgagtagctgggattacaggcgtccaccaccatgcccagctaatttttttatttttagtagagttggagtttcaccatgttggccaggatggtctcgaactcttgacctcaggtgatccacccgccttggcctcccaaagtgctaggattacaggcatgagccactgcgcccagcaaaataaacacattttataatttgtatgtggaaacatgttactatagaaagcattttaaaggtacgttttaaaggtccactgttaaatagtaaagaatgaatccgctagcgaaaatgtttttagggagaacagctggatcaaaagggcttctttggaattaggttgttttagtaacttctgttccaaagaaacacaggtctgatattgctaagaactgaaatcggaggagccagaggcccttttcagtccaggccaacattgtgcacggccactgtgggactgacaaccgggatagctcaagttcgagagaccaggtttcaaacattataagttccaggctttgcaagtctttattctctggggtaatatccagtctttctgttattgtctcttaaaattctcttccatggcccacattaagggagtttgcagagagtgagggaggcaaaacttgaaaagggcctgcaacactttaaaccttctcaggttcacccacatgaaacggctgtgctgagtgtgctgccggtgcccggggagcttctctgactgtgacccggcagaggcttctgtggcggtgcatgagcggccctacagtggagggttctctttggaaacaaacagccctgcttggtttcagtttgaggccacttatcttcaatgtgacatttcttgccaagccctgtgacactccccattgatgactcccataggtacagataaagttaagaacaggaaacagaagggtaggatgcatagggagggagagaagccctgaaaactttttttttctttttgaagcatggaaaacaaatcttttatgccactccagccataaataaaattttaacttca

SEQ ID NO: 441863 - DNA, 1872 bp, Homo sapiens
gtaatgcatgccaggactgtgcaaagaggaagttagaagagaatggaattgaagtttcaaaaaaacgcacacaatcagatactggtaatgcatgccaggactgtgcaaagaggaagttagaagagaatggaattgaagtttcaaaaaaacgcacacaatcagatactggtgtctgtgccatcctcatgctcgcgggagttttggcatgggattctccgttgtgattcccccggactccactgtctgaagaccaggtttcctatgaagagggtctgatgggaacctgttcccagtgatttgaagatgatgctggagggtcttgaaatctttacagtaaaacctgcaacttgaaaactagccttctgtaaccacagtgcccaaacgaagaggaatgtatggagaactccacgtggatctctgattgcgaaaccgtcacatacaccaagagagccacatgggcatgtggccctcaaggctgggtgagagggctcccctgtgtgttgaactatgcaggagggtgacgcggacacatttcaggtggactttgcaaggactgatggatagctacctcagggaccagaatccgtgggaagggatggacctggtgttcccgttcccatctgacaggctctcttttgtcaaggtggtatttttcgtaataaaaggggaagagtaaagactgtccaagcaacagtagctgccaaagagaaaatacgaaatagacactttttttttttgagtcagagtctcactctgtcacccaggacagagtgcagtggtacgatctcaagctcactgcagccaccaccgcctgggctcaagtgattctcctgcctcagcctcccgagtagctgggattacaggcgtccaccaccatgcccagctaatttttttatttttagtagagttggagtttcaccatgttggccaggatggtctcgaactcttgacctcaggtgatccacccgccttggcctcccaaagtgctaggattacaggcatgagccactgcgcccagcaaaataaacacattttataatttgtatgtggaaacatgttactatagaaagcattttaaaggtacgttttaaaggtccactgttaaatagtaaagaatgaatccgctagcgaaaatgtttttagggagaacagctggatcaaaagggcttctttggaattaggttgttttagtaacttctgttccaaagaaacacaggtctgatattgctaagaactgaaatcggaggagccagaggcccttttcagtccaggccaacattgtgcacggccactgtgggactgacaaccgggatagctcaagttcgagagaccaggtttcaaacattataagttccaggctttgcaagtctttattctctggggtaatatccagtctttctgttattgtctcttaaaattctcttccatggcccacattaagggagtttgcagagagtgagggaggcaaaacttgaaaagggcctgcaacactttaaaccttctcaggttcacccacatgaaacggctgtgctgagtgtgctgccggtgcccggggagcttctctgactgtgacccggcagaggcttctgtggcggtgcatgagcggccctacagtggagggttctctttggaaacaaacagccctgcttggtttcagtttgaggccacttatcttcaatgtgacatttcttgccaagccctgtgacactccccattgatgactcccataggtacagataaagttaagaacaggaaacagaagggtaggatgcatagggagggagagaagccctgaaaactttttttttctttttgaagcatggaaaacaaatcttttatgccactccagccataaataaaattttaacttca

SEQ ID NO: 441864 - DNA, 1708 bp, Homo sapiens
cccggggcggggcctccggggaccgcggggccgttggtttcgggacggaacgttcacgcggctggggcgggcgcgcgggggaagggtttgcggcggcgccgctgccggctaacgcggaggggcgcctggaggcggcgtggcgtccgctctggctccgactccggctctcgctctcgcttctagcccgcgtgcctgcgcagtcccctccccgagaaccatccccttgccccgcccagcgtcaggggtgcgcggccgccgagagaccccggaggcgtagccggctgcggaggcgaagaggtggcagcgcgagctgggaccagcgtctcggaggcgccgcagaattcacagatggattcagtggaaaagacaacaaatagaagtgaacaaaaatccagaaagtttttaaaaagcctcatccggaaacagccccaggaactgctcctggttatcgggactggcgtcagcgcagcagtggcccccggaatccctgccctttgctcgtggagaagctgcatcgaggccgtcatcgaggctgcagagcagctggaggtgctgcaccccggagacgtcgccgagttccggaggaaagtgacaaaggaccgggacctgttggttgtcgcccatgatctgatccggaagatgtcacctcgcacaggcgatgccaagcccagcttcttccaggactgcctgatggaggtgtttgacgacctggagcagcacatccggagtcctctggtgctgcagtcgatcctcagcctgatggacagaggcgccatggtcctgaccaccaactatgacaacctgctggaggcctttggccggcggcagaacaagcccatggagtccctggacttgaaggacaagaccaaggtccttgaatgggcaagagggcacatgaagtacggcgtcctccacattcacggcctctacacggacccctgcggggtggtgctggacccatcggggtataaagacgtcactcaagacgcagaagtcatggtacggcccgtcctaattagcatcggaagtcctccagaacttataccgcaccaagtcctttctgtttgtgggctgtggggagacccttcgtgatcagatattccaggccctctttctttactccgtgccgaataaggtggatttggagcactacatgcttgtgctgaaggagaatgaagaccatttctttaagcatcaggcagatatgcttctgcacggaatcaaagttgtatcctacggggactgttttgaccactttccaggatatgtgcaagaccttgccactcagatctgcaaacagcaaagcccagatgctgatcgcgtggacagcaccacattattgggtaatgcatgccaggactgtgcaaagaggaagttagaagagaatggaattgaagtttcaaaaaaacgcacacaatcagatactggtattgtgtctgttctttttgtggggagctgcctcgggtctctcttgttggcaggcatcttcagggaccgtctgcgctttaatgccccgcgccctatggtgggaggacggtgcatacgttctgtcagggccagagagcacaggaggcttacttagcagagaccctgacctctcaccccaacccgattccaactgcccagagctactggtacctctttagaaaaatgttacggagaaaacatacactaagaaggtgcagcgggcagaaggtgctctctccaa

SEQ ID NO: 441865 - DNA, 1939 bp, Homo sapiens
cccggggcggggcctccggggaccgcggggccgttggtttcgggacggaacgttcacgcggctggggcgggcgcgcgggggaagggtttgcggcggcgccgctgccggctaacgcggaggggcgcctggaggcggcgtggcgtccgctctggctccgactccggctctcgctctcgcttctagcccgcgtgcctgcgcagtcccctccccgagaaccatccccttgccccgcccagcgtcaggggtgcgcggccgccgagagaccccggaggcgtagccggctgcggaggcgaagaggtggcagcgcgagctgggaccagcgtctcggaggcgccgcagaattcacagatggattcagtggaaaagacaacaaatagaagtgaacaaaaatccagaaagtttttaaaaagcctcatccggaaacagccccaggaactgctcctggttatcgggactggcgtcagcgcagcagtggcccccggaatccctgccctttgctcgtggagaagctgcatcgaggccgtcatcgaggctgcagagcagctggaggtgctgcaccccggagacgtcgccgagttccggaggaaagtgacaaaggaccgggacctgttggttgtcgcccatgatctgatccggaagatgtcacctcgcacaggcgatgccaagcccagcttcttccaggactgcctgatggaggtgtttgacgacctggagcagcacatccggagtcctctggtgctgcagtcgatcctcagcctgatggacagaggcgccatggtcctgaccaccaactatgacaacctgctggaggcctttggccggcggcagaacaagcccatggagtccctggacttgaaggacaagaccaaggtccttgaatgggcaagagggcacatgaagtacggcgtcctccacattcacggcctctacacggacccctgcggggtggtgctggacccatcggggtataaagacgtcactcaagacgcagaagtcatggtacggcccgtcctaattagcatcggaagtcctccagaacttataccgcaccaagtcctttctgtttgtgggctgtggggagacccttcgtgatcagatattccaggccctctttctttactccgtgccgaataaggtggatttggagcactacatgcttgtgctgaaggagaatgaagaccatttctttaagcatcaggcagatatgcttctgcacggaatcaaagttgtatcctacggggactgttttgaccactttccaggatatgtgcaagaccttgccactcagatctgcaaacagcaaagcccagatgctgatcgcgtggacagcaccacattattgggtaatgcatgccaggactgtgcaaagaggaagttagaagagaatggaattgaagtttcaaaaaaacgcacacaatcagatactggtgtctgtgccatcctcatgctcgcgggagttttggcatgggattctccgttgtgattcccccggactccactgtctgaagaccaggtttcctatgaagagggtctgatgggaacctgttcccagtgatttgaagatgatgctggagggtcttgaaatctttacagtaaaacctgcaacttgaaaactagccttctgtaaccacagtgcccaaacgaagaggaatgtatggagaactccacgtggatctctgattgcgaaaccgtcacatacaccaagagagccacatgggcatgtggccctcaaggctgggtgagagggctcccctgtgtgttgaactatgcaggagggtgacgcggacacatttcaggtggactttgcaaggactgatggatagctacctcagggaccagaatccgtgggaagggatggacctggtgttcccgttcccatctgacaggctctcttttgtcaaggtggtatttttcgtaataaaaggggaagagtaaagac

SEQ ID NO: 441866 - DNA, 2971 bp, Homo sapiens
cccggggcggggcctccggggaccgcggggccgttggtttcgggacggaacgttcacgcggctggggcgggcgcgcgggggaagggtttgcggcggcgccgctgccggctaacgcggaggggcgcctggaggcggcgtggcgtccgctctggctccgactccggctctcgctctcgcttctagcccgcgtgcctgcgcagtcccctccccgagaaccatccccttgccccgcccagcgtcaggggtgcgcggccgccgagagaccccggaggcgtagccggctgcggaggcgaagaggtggcagcgcgagctgggaccagcgtctcggaggcgccgcagaattcacagatggattcagtggaaaagacaacaaatagaagtgaacaaaaatccagaaagtttttaaaaagcctcatccggaaacagccccaggaactgctcctggttatcgggactggcgtcagcgcagcagtggcccccggaatccctgccctttgctcgtggagaagctgcatcgaggccgtcatcgaggctgcagagcagctggaggtgctgcaccccggagacgtcgccgagttccggaggaaagtgacaaaggaccgggacctgttggttgtcgcccatgatctgatccggaagatgtcacctcgcacaggcgatgccaagcccagcttcttccaggactgcctgatggaggtgtttgacgacctggagcagcacatccggagtcctctggtgctgcagtcgatcctcagcctgatggacagaggcgccatggtcctgaccaccaactatgacaacctgctggaggcctttggccggcggcagaacaagcccatggagtccctggacttgaaggacaagaccaaggtccttgaatgggcaagagggcacatgaagtacggcgtcctccacattcacggcctctacacggacccctgcggggtggtgctggacccatcggggtataaagacgtcactcaagacgcagaagtcatggaagtcctccagaacttataccgcaccaagtcctttctgtttgtgggctgtggggagacccttcgtgatcagatattccaggccctctttctttactccgtgccgaataaggtggatttggagcactacatgcttgtgctgaaggagaatgaagaccatttctttaagcatcaggcagatatgcttctgcacggaatcaaagttgtatcctacggggactgttttgaccactttccaggatatgtgcaagaccttgccactcagatctgcaaacagcaaagcccagatgctgatcgcgtggacagcaccacattattgggtaatgcatgccaggactgtgcaaagaggaagttagaagagaatggaattgaagtttcaaaaaaacgcacacaatcagatactgatgatgctggagggtcttgaaatctttacagtaaaacctgcaacttgaaaactagccttctgtaaccacagtgcccaaacgaagaggaatgtatggagaactccacgtggatctctgattgcgaaaccgtcacatacaccaagagagccacatgggcatgtggccctcaaggctgggtgagagggctcccctgtgtgttgaactatgcaggagggtgacgcggacacatttcaggtggactttgcaaggactgatggatagctacctcagggaccagaatccgtgggaagggatggacctggtgttcccgttcccatctgacaggctctcttttgtcaaggtggtatttttcgtaataaaaggggaagagtaaagactgtccaagcaacagtagctgccaaagagaaaatacgaaatagacactttttttttttgagtcagagtctcactctgtcacccaggacagagtgcagtggtacgatctcaagctcactgcagccaccaccgcctgggctcaagtgattctcctgcctcagcctcccgagtagctgggattacaggcgtccaccaccatgcccagctaatttttttatttttagtagagttggagtttcaccatgttggccaggatggtctcgaactcttgacctcaggtgatccacccgccttggcctcccaaagtgctaggattacaggcatgagccactgcgcccagcaaaataaacacattttataatttgtatgtggaaacatgttactatagaaagcattttaaaggtacgttttaaaggtccactgttaaatagtaaagaatgaatccgctagcgaaaatgtttttagggagaacagctggatcaaaagggcttctttggaattaggttgttttagtaacttctgttccaaagaaacacaggtctgatattgctaagaactgaaatcggaggagccagaggcccttttcagtccaggccaacattgtgcacggccactgtgggactgacaaccgggatagctcaagttcgagagaccaggtttcaaacattataagttccaggctttgcaagtctttattctctggggtaatatccagtctttctgttattgtctcttaaaattctcttccatggcccacattaagggagtttgcagagagtgagggaggcaaaacttgaaaagggcctgcaacactttaaaccttctcaggttcacccacatgaaacggctgtgctgagtgtgctgccggtgcccggggagcttctctgactgtgacccggcagaggcttctgtggcggtgcatgagcggccctacagtggagggttctctttggaaacaaacagccctgcttggtttcagtttgaggccacttatcttcaatgtgacatttcttgccaagccctgtgacactccccattgatgactcccataggtacagataaagttaagaacaggaaacagaagggtaggatgcatagggagggagagaagccctgaaaactttttttttctttttgaagcatggaaaacaaatcttttatgccactccagccataaataaaattttaacttca

SEQ ID NO: 441867 - DNA, 3809 bp, Homo sapiens
cccggggcggggcctccggggaccgcggggccgttggtttcgggacggaacgttcacgcggctggggcgggcgcgcgggggaagggtttgcggcggcgccgctgccggctaacgcggaggggcgcctggaggcggcgtggcgtccgctctggctccgactccggctctcgctctcgcttctagcccgcgtgcctgcgcagtcccctccccgagaaccatccccttgccccgcccagcgtcaggggtgcgcggccgccgagagaccccggaggcgtagccggctgcggaggcgaagaggtggcagcgcgagctgggaccagcgtctcggaggcgccgcagaattcacagatggattcagtggaaaagacaacaaatagaagtgaacaaaaatccagaaagtttttaaaaagcctcatccggaaacagccccaggaactgctcctggttatcgggactggcgtcagcgcagcagtggcccccggaatccctgccctttgctcgtggagaagctgcatcgaggccgtcatcgaggctgcagagcagctggaggtgctgcaccccggagacgtcgccgagttccggaggaaagtgacaaaggaccgggacctgttggttgtcgcccatgatctgatccggaagatgtcacctcgcacaggcgatgccaagcccagcttcttccaggactgcctgatggaggtgtttgacgacctggagcagcacatccggagtcctctggtgctgcagtcgatcctcagcctgatggacagaggcgccatggtcctgaccaccaactatgacaacctgctggaggcctttggccggcggcagaacaagcccatggagtccctggacttgaaggacaagaccaaggtccttgaatgggcaagagggcacatgaagtacggcgtcctccacattcacggcctctacacggacccctgcggggtggtgctggacccatcggggtataaagacgtcactcaagacgcagaagtcatggaagtcctccagaacttataccgcaccaagtcctttctgtttgtgggctgtggggagacccttcgtgatcagatattccaggccctctttctttactccgtgccgaataaggtggatttggagcactacatgcttgtgctgaaggagaatgaagaccatttctttaagcatcaggcagatatgcttctgcacggaatcaaagttgtatcctacggggactgttttgaccactttccaggatatgtgcaagaccttgccactcagatctgcaaacagcaaagcccagatgctgatcgcgtggacagcaccacattattgggtaatgcatgccaggactgtgcaaagaggaagttagaagagaatggaattgaagtttcaaaaaaacgcacacaatcagatactgatgatgctggagggtcttgaaatctttacagtaaaacctgcaacttgaaaactagccttctgtaaccacagtgcccaaacgaagaggaatgtatggagaactccacgtggatctctgattgcgaaaccgtcacatacaccaagagagccacatgggcatgtggccctcaaggctgggtgagagggctcccctgtgtgttgaactatgcaggagggtgacgcggacacatttcaggtggactttgcaaggactgatggatagctacctcagggaccagaatccgtgggaagggatggacctggtgttcccgttcccatctgacaggctctcttttgtcaaggtggtatttttcgtaataaaaggggaagagtaaagactgtccaagcaacagtagctgccaaagagaaaatacgaaatagacactttttttttttgagtcagagtctcactctgtcacccaggacagagtgcagtggtacgatctcaagctcactgcagccaccaccgcctgggctcaagtgattctcctgcctcagcctcccgagtagctgggattacaggcgtccaccaccatgcccagctaatttttttatttttagtagagttggagtttcaccatgttggccaggatggtctcgaactcttgacctcaggtgatccacccgccttggcctcccaaagtgctaggattacaggcatgagccactgcgcccagcaaaataaacacattttataatttgtatgtggaaacatgttactatagaaagcattttaaaggtacgttttaaaggtccactgttaaatagtaaagaatgaatccgctagcgaaaatgtttttagggagaacagctggatcaaaagggcttctttggaattaggttgttttagtaacttctgttccaaagaaacacaggtctgatattgctaagaactgaaatcggaggagccagaggcccttttcagtccaggccaacattgtgcacggccactgtgggactgacaaccgggatagctcaagttcgagagaccaggtttcaaacattataagttccaggctttgcaagtctttattctctggggtaatatccagtctttctgttattgtctcttaaaattctcttccatggcccacattaagggagtttgcagagagtgagggaggcaaaacttgaaaagggcctgcaacactttaaaccttctcaggttcacccacatgaaacggctgtgctgagtgtgctgccggtgcccggggagcttctctgactgtgacccggcagaggcttctgtggcggtgcatgagcggccctacagtggagggttctctttggaaacaaacagccctgcttggtttcagtttgaggccacttatcttcaatgtgacatttcttgccaagccctgtgacactccccattgatgactcccataggtacagataaagttaagaacaggaaacagaagggtaggatgcatagggagggagagaagccctgaaaactttttttttctttttgaagcatggaaaacaaatcttttatgccactccagccataaataaaattttaacttcaaccctgtgtgctcagtgtttctttagttatgccaaggcttgctagaatgttatttagtgagaatttttagcttgagttgccacccaactgtgaaatcaactaaatgattacttgaatgtatttaaatgttttaaaaagcaaacattataaatttttctttaatgtcatttagtaagtgcagtcagggaatatctgaatctaagagctggccagacacagggtatagcagaattacaagcatagaggatgctatgcagtaggatgtaaagctcattacagcccatttttaagaaaagctttgtgtgctctgctggaggacacagccatgttgctgcaccacatggatgtatctagtcagttctgttgtatgctcgttgtagaatgtaaagtttattccaatccgattgatagattaaaggcaattccagcatagtgcacttgcttgtgtatagtttagtccgtgagaaacatcacatcaggaggtaacaaagttggccctgctgtttactgcctcaagctagagtagctattacattttaaaatggttatattttaagacagggcaggtagctcaaacctgtaatcccagcactttgggaggctgaggggggcggatcacttgaggccaggagtttgagaccagcctggccaacatggtgaaaccctgtctctactaaaaatacaaaaattagcctggcgtggtggcgtgtgcctgtaatcccagctacttgggagactgaggcaggagaatcacttgaaccaaggaggcagaggttgcagtgaaccaagattgcaccactgcactccagcctgggcgacagagggaattccatctaaa

SEQ ID NO: 441868 - DNA, 2400 bp, Homo sapiens
gcacggggcagtgtacacgggggcagggccgcctgaggggagcgggcagggccaaggcacccactcctgccggtagtgccatggagtagacatctgctctctgcgtctgagccacatggtccccactgctggggcttgctgttggaaacagacagccagttgcataaacagaactgccagctggctcaccgcccagtgatggcagcagggctgttggtgtttgtgtccattccacctgctgctgtgcgggctccggggtgaagatgacttgacagtgacccgatgggcatctttgtaaggtccttgaatgggcaagagggcacatgaagtacggcgtcctccacattcacggcctctacacggacccctgcggggtggtgctggacccatcggggtataaagacgtcactcaagacgcagaagtcatggaagtcctccagaacttataccgcaccaagtcctttctgtttgtgggctgtggggagacccttcgtgatcagatattccaggccctctttctttactccgtgccgaataaggtggatttggagcactacatgcttgtgctgaaggagaatgaagaccatttctttaagcatcaggcagatatgcttctgcacggaatcaaagttgtatcctacggggactgttttgaccactttccaggatatgtgcaagaccttgccactcagatctgcaaacagcaaagcccagatgctgatcgcgtggacagcaccacattattgggtaatgcatgccaggactgtgcaaagaggaagttagaagagaatggaattgaagtttcaaaaaaacgcacacaatcagatactgatgatgctggagggtcttgaaatctttacagtaaaacctgcaacttgaaaactagccttctgtaaccacagtgcccaaacgaagaggaatgtatggagaactccacgtggatctctgattgcgaaaccgtcacatacaccaagagagccacatgggcatgtggccctcaaggctgggtgagagggctcccctgtgtgttgaactatgcaggagggtgacgcggacacatttcaggtggactttgcaaggactgatggatagctacctcagggaccagaatccgtgggaagggatggacctggtgttcccgttcccatctgacaggctctcttttgtcaaggtggtatttttcgtaataaaaggggaagagtaaagactgtccaagcaacagtagctgccaaagagaaaatacgaaatagacactttttttttttgagtcagagtctcactctgtcacccaggacagagtgcagtggtacgatctcaagctcactgcagccaccaccgcctgggctcaagtgattctcctgcctcagcctcccgagtagctgggattacaggcgtccaccaccatgcccagctaatttttttatttttagtagagttggagtttcaccatgttggccaggatggtctcgaactcttgacctcaggtgatccacccgccttggcctcccaaagtgctaggattacaggcatgagccactgcgcccagcaaaataaacacattttataatttgtatgtggaaacatgttactatagaaagcattttaaaggtacgttttaaaggtccactgttaaatagtaaagaatgaatccgctagcgaaaatgtttttagggagaacagctggatcaaaagggcttctttggaattaggttgttttagtaacttctgttccaaagaaacacaggtctgatattgctaagaactgaaatcggaggagccagaggcccttttcagtccaggccaacattgtgcacggccactgtgggactgacaaccgggatagctcaagttcgagagaccaggtttcaaacattataagttccaggctttgcaagtctttattctctggggtaatatccagtctttctgttattgtctcttaaaattctcttccatggcccacattaagggagtttgcagagagtgagggaggcaaaacttgaaaagggcctgcaacactttaaaccttctcaggttcacccacatgaaacggctgtgctgagtgtgctgccggtgcccggggagcttctctgactgtgacccggcagaggcttctgtggcggtgcatgagcggccctacagtggagggttctctttggaaacaaacagccctgcttggtttcagtttgaggccacttatcttcaatgtgacatttcttgccaagccctgtgacactccccattgatgactcccataggtacagataaagttaagaacaggaaacagaagggtaggatgcatagggagggagagaagccctgaaaactttttttttctttttgaagcatggaaaacaaatcttttatgccactccagccataaataaaattttaacttca

SEQ ID NO: 441869 - DNA, 2180 bp, Homo sapiens
cccgtggcctacctctgactggtgtgcacatcgcgggtagggcctactgcctggtagaccttgctgtggagcattgggcaggggttttcttcaatacctgtgagatctgtgctcctagacgccatcacctgcacctgcagccccggctctccccacccagtcatgtctccttagggcgaagctcctggcctctgttgtacagaaagccctggcctgtcctgcatgtgggtgagagaagccaagcctggggatcccagaggaatcgacaggcttattcttctccatacctccaacaggctctcactgtatgtttgttgaaattgccccatcctcagtccactaagaaataaaagagcatccatgttcatggattgagattcccacagatcgttgcaaatgtaatgtcatcatttgcttgatcccctgatagtactgataattacacaaggtcatttccagacagtggctactgtttccattgtggaggggttttcaaagtcttccgtacataagaacaattgtaaagcagtttctgaaatagaaatctattgcaaataacttcttttagctggactttaacccttgggcatttcattcttttatttaaacagatgatgctggagggtcttgaaatctttacagtaaaacctgcaacttgaaaactagccttctgtaaccacagtgcccaaacgaagaggaatgtatggagaactccacgtggatctctgattgcgaaaccgtcacatacaccaagagagccacatgggcatgtggccctcaaggctgggtgagagggctcccctgtgtgttgaactatgcaggagggtgacgcggacacatttcaggtggactttgcaaggactgatggatagctacctcagggaccagaatccgtgggaagggatggacctggtgttcccgttcccatctgacaggctctcttttgtcaaggtggtatttttcgtaataaaaggggaagagtaaagactgtccaagcaacagtagctgccaaagagaaaatacgaaatagacactttttttttttgagtcagagtctcactctgtcacccaggacagagtgcagtggtacgatctcaagctcactgcagccaccaccgcctgggctcaagtgattctcctgcctcagcctcccgagtagctgggattacaggcgtccaccaccatgcccagctaatttttttatttttagtagagttggagtttcaccatgttggccaggatggtctcgaactcttgacctcaggtgatccacccgccttggcctcccaaagtgctaggattacaggcatgagccactgcgcccagcaaaataaacacattttataatttgtatgtggaaacatgttactatagaaagcattttaaaggtacgttttaaaggtccactgttaaatagtaaagaatgaatccgctagcgaaaatgtttttagggagaacagctggatcaaaagggcttctttggaattaggttgttttagtaacttctgttccaaagaaacacaggtctgatattgctaagaactgaaatcggaggagccagaggcccttttcagtccaggccaacattgtgcacggccactgtgggactgacaaccgggatagctcaagttcgagagaccaggtttcaaacattataagttccaggctttgcaagtctttattctctggggtaatatccagtctttctgttattgtctcttaaaattctcttccatggcccacattaagggagtttgcagagagtgagggaggcaaaacttgaaaagggcctgcaacactttaaaccttctcaggttcacccacatgaaacggctgtgctgagtgtgctgccggtgcccggggagcttctctgactgtgacccggcagaggcttctgtggcggtgcatgagcggccctacagtggagggttctctttggaaacaaacagccctgcttggtttcagtttgaggccacttatcttcaatgtgacatttcttgccaagccctgtgacactccccattgatgactcccataggtacagataaagttaagaacaggaaacagaagggtaggatgcatagggagggagagaagccctgaaaactttttttttctttttgaagcatggaaaacaaatcttttatgccactccagccataaataaaattttaacttca

SEQ ID NO: 441870 - DNA, 1950 bp, Homo sapiens
cccggggcggggcctccggggaccgcggggccgttggtttcgggacggaacgttcacgcggctggggcgggcgcgcgggggaagggtttgcggcggcgccgctgccggctaacgcggaggggcgcctggaggcggcgtggcgtccgctctggctccgactccggctctcgctctcgcttctagcccgcgtgcctgcgcagtcccctccccgagaaccatccccttgccccgcccagcgtcaggggtgcgcggccgccgagagaccccggaggcgtagccggctgcggaggcgaagaggtggcagcgcgagctgggaccagcgtctcggaggcgccgcagaattcacagatggattcagtggaaaagacaacaaatagaagtgaacaaaaatccagaaagtttttaaaaagcctcatccggaaacagccccaggaactgctcctggttatcgggactggcgtcagcgcagcagtggcccccggaatccctgccctttgctcgtggagaagctgcatcgaggccgtcatcgaggctgcagagcagctggaggtgctgcaccccggagacgtcgccgagttccggaggaaagtgacaaaggaccgggacctgttggttgtcgcccatgatctgatccggaagatgtcacctcgcacaggcgatgccaagcccagcttcttccaggactgcctgatggaggtgtttgacgacctggagcagcacatccggagtcctctggtgctgcagtcgatcctcagcctgatggacagaggcgccatggtcctgaccaccaactatgacaacctgctggaggcctttggccggcggcagaacaagcccatggagtccctggacttgaaggacaagaccaaggtccttgaatgggcaagagggcacatgaagtacggcgtcctccacattcacggcctctacacggacccctgcggggtggtgctggacccatcggggtataaagacgtcactcaagacgcagaagtcatggaagtcctccagaacttataccgcaccaagtcctttctgtttgtgggctgtggggagacccttcgtgatcagatattccaggccctctttctttactccgtgccgaataaggtggatttggagcactacatgcttgtgctgaaggagaatgaagaccatttctttaagcatcaggcagatatgcttctgcacggaatcaaagttgtatcctacggggactgttttgaccactttccaggatatgtgcaagaccttgccactcagatctgcaaacagcaaagcccagatgctgatcgcgtggacagcaccacattattgggtaatgcatgccaggactgtgcaaagaggaagttagaagagaatggaattgaagtttcaaaaaaacgcacacaatcagatactgatgatgctggagggtcttgaaatctttacagtaaaacctgcaacttgaaaactagccttctgtaaccacagtgcccaaacgaagaggaatgtatggagaactccacgtggatctctgattgcgaaaccgtcacatacaccaagagagccacatgggcatgtggccctcaaggctgggtgagagggctcccctgtgtgttgaactatgcaggagggtgacgcggacacatttcaggtggactttgcaaggactgatggatagctacctcagggaccagaatccgtgggaagggatggacctggtgttcccgttcccatctgacaggctctcttttgtcaaggtggtatttttcgtaataaaaggggaagagtaaagactgtccaagcaacagtagctgccaaagagaaaatacgaaatagacacttttttttttttgaggcaggagaatcgcttgaacccaggaggtggaggttgcagtgagcagagatcgcgccaccgcactgcagcctgggcaacagaacgagactacgtgtcaaaaaaagaaaaag

SEQ ID NO: 441871 - DNA, 1101 bp, Homo sapiens
cccggggcggggcctccggggaccgcggggccgttggtttcgggacggaacgttcacgcggctggggcgggcgcgcgggggaagggtttgcggcggcgccgctgccggctaacgcggaggggcgcctggaggcggcgtggcgtccgctctggctccgactccggctctcgctctcgcttctagcccgcgtgcctgcgcagtcccctccccgagaaccatccccttgccccgcccagcgtcaggggtgcgcggccgccgagagaccccggaggcgtagccggctgcggaggcgaagaggtggcagcgcgagctgggaccagcgtctcggaggcgccgcagaattcacagatggattcagtggaaaagacaacaaatagaagtgaacaaaaatccagaaagtttttaaaaagcctcatccggaaacagccccaggaactgctcctggttatcgggactggcgtcagcgcagcagtggcccccggaatccctgccctttgctcgtggagaagctgcatcgaggccgtcatcgaggctgcagagcagctggaggtgctgcaccccggagacgtcgccgagttccggaggaaagtgacaaaggaccgggacctgttggttgtcgcccatgatctgatccggaagatgtcacctcgcacaggcgatgccaagcccagcttcttccaggactgcctgatggaggtgtttgacgacctggagcagcacatccggagtcctctggtgctgcagtcgatcctcagcctgatggacagaggcgccatggtcctgaccaccaactatgacaacctgctggaggcctttggccggcggcagaacaagcccatggagtccctggacttgaaggacaagaccaaggtatgggctgggggtgcgggaggcctttggccggcggcagaacaagcccatggagtccctggacttgaaggacaagaccaaggtatgggctgggggtgcgggaggtctttggccggcggcagaacaagcccatggagtccctggacttgaaggacaagaccaaggtatgggctgggggtgcgggaggtctttggccggcggcagaacaagcccatggagtccctggacttg

SEQ ID NO: 441872 - DNA, 457 bp, Homo sapiens
tgagacctaggattcatgggagtgcagcccgggaagaagacgaacacccttatgaactgttgttaacatcagagacattagaaaaccagtctgaattgggtctgtctttgagatgcccaggccagcagaaagcagctcagaagtattgttgctcatggtgtggcaatggactgaactgtaatgaaaatgttatttaatctttgtctctgtattttgatacttgaatgactttcccttttgttttactgtatataaaattgttaatctgtctgattttgtctgaattataaacactttgaggtaccaaacataaccaatctgtgcaacaacatagactgacctcagtacccaagagagtgtaaatatttctgggcttccagctttggttttgttattttcataactgtacacaacttagaacagactgaattaataaatgagaagcgacatgaacgca

SEQ ID NO: 441873 - DNA, 3515 bp, Homo sapiens
acaccagccagagaaactcatcttcgagtcctgtggttatgaagccaattatctgggctccatgctgatcaaagatctgcgagggacagaatccacgcaagacgcctgtgccaagatgcggaaatctacggagcacatgaagaagatccccaccatcatcctgtccatcacatacaaaggtgtcaagttcatcgatgcctccaacaaggctgggacagagaacagtgacaatggtaacaggctggggcagggggtgccagaggcatgcctgagcctgagaattccagaacacggctttccccagcagaacgtcattgcagagcacgagatccggaacatttcctgtgcggcccaggacccggaggacctctgtacctttgcctacatcaccaaggacctgcagaccagccaccactattgccatgtgttcagcaccgtggatgtgaacctgacctacgagatcatcctgacgctggggcaggccttcgaagtggcctatcagttggccctgcaggcccagaagtccagggcgacgggcgcctctgcagctgagatgattgaaacaaaatcttccaaaccggtgcctaagcctcgggtcggcgtgaggaaatccgcactggaaccacctgatatggaccaagatgcccaatcccatgccagtgtctcctgggttgtggaccccaaaccagactctaagcggagcctcagcaccaactgagccactgaggaaccacactgtgctgcggaaacatagacgtgggggcataggctcccactgccaccaccgccatcgcctcacctgcagctctgaagacccaggcctcacctccgcctgcaggacctcctcttggccacttggcctgggcctgccaccaccacgtcctgcagaacgagccctgccttggctgtggagaagcactccaggccgctagcagatgggactggcattccagagggtcaagaagtgacttgttcagaacacattgtttttaacagaaaaaaaatctttttataaaatgaacttttaacacttggctcaaacctctaggtcatactgccaatctttaaacaaatggccatggggcagaggacaggggagctgaggttggttcagaggccagcctgcatagcctctgtcctcaggacggaacttgggtgcagctcagtgggtcggaagagaaggcggtggcctgtgggtgaggggaacggagcaggctcaggcagaattgagtacggtgcgtctgcttttcaaacccaaccatatcagctgctgctctttatgaactgcccaacttcctgtccctttcaggggctagacacaggcttctcgtaagaacacagccttagaggcacctgagcaactcaaaggtttccggtccatttctggggttcccgatgggaaggttcagtggccaaatgaagataagtgtgcagtttctagtgctgggaagtcttagccagcaccagagcgccaggcctctccctggcctcttacctgtcagtgatcggagcactgccctgggctggccggcgccgtactgcctgcgttgtgtcagagaataggaaaagcagctttgtttggggcattaatgcttggagtggggtcagctaaggttgctacttgccaatttgtgatttgtctaatcagcctgtgtgattggggctcattttgattctctgaattatcggtttgacggttacacttggctgctgggcccatccctggcccccggtgtggaaaaggctaaataaggtgacagtgcatcgatgctcccccgcgtggcctttggggcaggctggcatcccggtgcgcctctgcttcttaagctttcctgctgctcgctttgtttttaaaagtaacttgggttgcattcttccctctggactagagtagaaatgcaggggaaactgctgtggatttgagaggcaaagttggctcagctgtgtgcccagttcctcctgtgggcactttagcaggctccgagctttcctggcataggtcaatcaggtcccaggatgaataatccaggcttcagcaacactcctctttcccagccagcaaaggctgtgaatttgaattctttgttggtatgtatgtgcagggagtactgttaggcacattcttaacccatgtggttggccagaaatcagaagtggggctgtgtctctgactggctagaggccaggccttgtgggtttctatctgctaagcacccagcaggttggggcctgggactcagctctctctgcggtagaggcaggccctcctccacttcttggtactaaacgaagatctcgacaccttgcagttttacttcatttcctgcccctttcagggcctgtgaggatgcccatgagctaccgctgtacagttctcggccccggctttcttccaagagttgaccaggaaccctaaagcatccagagtagactgcgctgccactgcgcacatgctggtgcccgtcttcctcctaaggggccaggccacatccaagtgggcctctgtcgggggcggggcggtaggtccgaaagaaaccgcagacactacgatgcactcctcaagctgtcttttgtgcttagatcatccataggtgtttcttctgcttgaagctgctatatcatctttatttattcagggtattttcatattggaagccttggctagtctgctctagctctgggttctgtttagagattggtttatttctgaatattcaagaaaggaaaatgactgggcctttctttcttttcttctcctctgggatgggtagtctccctttcctagaaaggttattataactttaaggacaggcttcaagtgggaaggcccctacttttgcacttctccaagtgcaggtcacaccaggggcagaccctgtcgctgcgtttctgaactgtgaaggagcccattcgggtgggagacttcagatgggctcagtacctgtcccagccacaggcttcttgtccacctcttctcccctgcccaccagctgctcagcgcataagaccttcccgacaggctctgcgtgtgcagctctctgcgtccctcctgggccctccagcgtcagacactaatgggagttcccgagatgctcgggtttgagcagggagcaggcagagctgcagtcagagacattagaaaaccagtctgaattgggtctgtctttgagatgcccaggccagcagaaagcagctcagaagtattgttgctcatggtgtggcaatggactgaactgtaatgaaaatgttatttaatctttgtctctgtattttgatacttgaatgactttcccttttgttttactgtatataaaattgttaatctgtctgattttgtctgaattataaacactttgaggtaccaaacataaccaatctgtgcaacaacatagactgacctcagtacccaagagagtgtaaatatttctgggcttccagctttggttttgttattttcataactgtacacaacttagaacagactgaattaataaatgagaagcgacatgaacgca

SEQ ID NO: 441874 - DNA, 2714 bp, Homo sapiens
acaccagccagagaaactcatcttcgagtcctgtggttatgaagccaattatctgggctccatgctgatcaaagatctgcgagggacagaatccacgcaagacgcctgtgccaagatgcggaaatctacggagcacatgaagaagatccccaccatcatcctgtccatcacatacaaaggtgtcaagttcatcgatgcctccaacaagaacgtcattgcagagcacgagatccggaacatttcctgtgcggcccaggacccggaggacctctgtacctttgcctacatcaccaaggacctgcagaccagccaccactattgccatgtgttcagcaccgtggatgtgaacctgacctacgagatcatcctgacgctggggcaggccttcgaagtggcctatcagttggccctgcaggcccagaagtccagggcgacgggcgcctctgcagctgagatgattgaaacaaaatcttccaaaccggtgcctaagcctcgggtcggcgtgaggaaatccgcactggaaccacctgatatggaccaagatgcccaatcccatgccagtgtctcctgggttgtggaccccaaaccagactctaagcggagcctcagcaccaactgagccactgaggaaccacactgtgctgcggaaacatagacgtgggggcataggctcccactgccaccaccgccatcgcctcacctgcagctctgaagacccaggcctcacctccgcctgcaggacctcctcttggccacttggcctgggcctgccaccaccacgtcctgcagaacgagccctgccttggctgtggagaagcactccaggccgctagcagatgggactggcattccagagggtcaagaagtgacttgttcagaacacattgtttttaacagaaaaaaaatctttttataaaatgaacttttaacacttggctcaaacctctaggtcatactgccaatctttaaacaaatggccatggggcagaggacaggggagctgaggttggttcagaggccagcctgcatagcctctgtcctcaggacggaacttgggtgcagctcagtgggtcggaagagaaggcggtggcctgtgggtgaggggaacggagcaggctcaggcagaattgagtacggtgcgtctgcttttcaaacccaaccatatcagctgctgctctttatgaactgcccaacttcctgtccctttcaggggctagacacaggcttctcgtaagaacacagccttagaggcacctgagcaactcaaaggtttccggtccatttctggggttcccgatgggaaggttcagtggccaaatgaagataagtgtgcagtttctagtgctgggaagtcttagccagcaccagagcgccaggcctctccctggcctcttacctgtcagtgatcggagcactgccctgggctggccggcgccgtactgcctgcgttgtgtcagagaataggaaaagcagctttgtttggggcattaatgcttggagtggggtcagctaaggttgctacttgccaatttgtgatttgtctaatcagcctgtgtgattggggctcattttgattctctgaattatcggtttgacggttacacttggctgctgggcccatccctggcccccggtgtggaaaaggctaaataaggtgacagtgcatcgatgctcccccgcgtggcctttggggcaggctggcatcccggtgcgcctctgcttcttaagctttcctgctgctcgctttgtttttaaaagtaacttgggttgcattcttccctctggactagagtagaaatgcaggggaaactgctgtggatttgagaggcaaagttggctcagctgtgtgcccagttcctcctgtgggcactttagcaggctccgagctttcctggcataggtcaatcaggtcccaggatgaataatccaggcttcagcaacactcctctttcccagccagcaaaggctgtgaatttgaattctttgttggtatgtatgtgcagggagtactgttaggcacattcttaacccatgtggttggccagaaatcagaagtggggctgtgtctctgactggctagaggccaggccttgtgggtttctatctgctaagcacccagcaggttggggcctgggactcagctctctctgcggtagaggcaggccctcctccacttcttggtactaaacgaagatctcgacaccttgcagttttacttcatttcctgcccctttcagggcctgtgaggatgcccatgagctaccgctgtacagttctcggccccggctttcttccaagagttgaccaggaaccctaaagcatccagagtagactgcgctgccactgcgcacatgctggtgcccgtcttcctcctaaggggccaggccacatccaagtgggcctctgtcgggggcggggcggtaggtccgaaagaaaccgcagacactacgatgcactcctcaagctgtcttttgtgcttagatcatccataggtgtttcttctgcttgaagctgctatatcatctttatttattcagggtattttcatattggaagccttggctagtctgctctagctctgggttctgtttagagattggtttatttctgaatattcaaatatttctgggcttccagctttggttttgttattttcataactgtacacaacttagaacagactgaattaataaatgagaagcgacatgaacgca

SEQ ID NO: 441875 - DNA, 1951 bp, Homo sapiens
acaccagccagagaaactcatcttcgagtcctgtggttatgaagccaattatctgggctccatgctgatcaaagatctgcgagggacagaatccacgcaagacgcctgtgccaagatgcggaaatctacggagcacatgaagaagatccccaccatcatcctgtccatcacatacaaaggtgtcaagttcatcgatgcctccaacaagaacgtcattgcagagcacgagatccggaacatttcctgtgcggcccaggacccggaggacctctgtacctttgcctacatcaccaaggacctgcagaccagccaccactattgccatgtgttcagcaccgtggatgtgaacctgacctacgagatcatcctgacgctggggcaggccttcgaagtggcctatcagttggccctgcaggcccagaagtccagggcgacgggcgcctctgcagctgagatgattgaaacaaaatcttccaaaccggtgcctaagcctcgggtcggcgtgaggaaatccgcactggaaccacctgatatggaccaagatgcccaatcccatgccagtgtctcctgggttgtggaccccaaaccagactctaagcggagcctcagcaccaactgagccactgaggaaccacactgtgctgcggaaacatagacgtgggggcataggctcccactgccaccaccgccatcgcctcacctgcagctctgaagacccaggcctcacctccgcctgcaggacctcctcttggccacttggcctgggcctgccaccaccacgtcctgcagaacgagccctgccttggctgtggagaagcactccaggccgctagcagatgggactggcattccagagggtcaagaagtgacttgttcagaacacattgtttttaacagaaaaaaaatctttttataaaatgaacttttaacacttggctcaaacctctaggtcatactgccaatctttaaacaaatggccatggggcagaggacaggggagctgaggttggttcagaggccagcctgcatagcctctgtcctcaggacggaacttgggtgcagctcagtgggtcggaagagaaggcggtggcctgtgggtgaggggaacggagcaggctcaggcagaattgagtacggtgcgtctgcttttcaaacccaaccatatcagctgctgctctttatgaactgcccaacttcctgtccctttcaggggctagacacaggcttctcgtaagaacacagccttagaggcacctgagcaactcaaaggtttccggtccatttctggggttcccgatgggaaggttcagtggccaaatgaagataagtgtgcagtttctagtgctgggaagtcttagccagcaccagagcgccaggcctctccctggcctcttacctgtcagtgatcggagcactgccctgggctggccggcgccgtactgcctgcgttgtgtcagagaataggaaaagcagctttgtttggggcattaatgcttggagtggggtcagctaaggttgctacttgccaatttgtgatttgtctaatcagcctgtgtgattggggctcattttgattctctgaattatcggtttgacggttacacttggctgctgggcccatccctggcccccggtgtggaaaaggctaaataaggtgacagtgcatcgatgctcccccgcgtggcctttggggcaggctggcatcccggtgcgcctctgcttcttaagctttcctgctgctcgctttgtttttaaaagtaacttgggttgcattcttccctctggactagagtagaaatgcaggggaaactgctgtggatttgagaccactgaggaaccacactgtgctgcggaaacatagacgtgggggcataggctcccactgccaccaccgccatcgcctcacctgcagctcgaagacccagagacacttgcatcaagagggccgacc

SEQ ID NO: 441876 - DNA, 3416 bp, Homo sapiens
acaccagccagagaaactcatcttcgagtcctgtggttatgaagccaattatctgggctccatgctgatcaaagatctgcgagggacagaatccacgcaagacgcctgtgccaagatgcggaaatctacggagcacatgaagaagatccccaccatcatcctgtccatcacatacaaaggtgtcaagttcatcgatgcctccaacaagaacgtcattgcagagcacgagatccggaacatttcctgtgcggcccaggacccggaggacctctgtacctttgcctacatcaccaaggacctgcagaccagccaccactattgccatgtgttcagcaccgtggatgtgaacctgacctacgagatcatcctgacgctggggcaggccttcgaagtggcctatcagttggccctgcaggcccagaagtccagggcgacgggcgcctctgcagctgagatgattgaaacaaaatcttccaaaccggtgcctaagcctcgggtcggcgtgaggaaatccgcactggaaccacctgatatggaccaagatgcccaatcccatgccagtgtctcctgggttgtggaccccaaaccagactctaagcggagcctcagcaccaactgagccactgaggaaccacactgtgctgcggaaacatagacgtgggggcataggctcccactgccaccaccgccatcgcctcacctgcagctctgaagacccaggcctcacctccgcctgcaggacctcctcttggccacttggcctgggcctgccaccaccacgtcctgcagaacgagccctgccttggctgtggagaagcactccaggccgctagcagatgggactggcattccagagggtcaagaagtgacttgttcagaacacattgtttttaacagaaaaaaaatctttttataaaatgaacttttaacacttggctcaaacctctaggtcatactgccaatctttaaacaaatggccatggggcagaggacaggggagctgaggttggttcagaggccagcctgcatagcctctgtcctcaggacggaacttgggtgcagctcagtgggtcggaagagaaggcggtggcctgtgggtgaggggaacggagcaggctcaggcagaattgagtacggtgcgtctgcttttcaaacccaaccatatcagctgctgctctttatgaactgcccaacttcctgtccctttcaggggctagacacaggcttctcgtaagaacacagccttagaggcacctgagcaactcaaaggtttccggtccatttctggggttcccgatgggaaggttcagtggccaaatgaagataagtgtgcagtttctagtgctgggaagtcttagccagcaccagagcgccaggcctctccctggcctcttacctgtcagtgatcggagcactgccctgggctggccggcgccgtactgcctgcgttgtgtcagagaataggaaaagcagctttgtttggggcattaatgcttggagtggggtcagctaaggttgctacttgccaatttgtgatttgtctaatcagcctgtgtgattggggctcattttgattctctgaattatcggtttgacggttacacttggctgctgggcccatccctggcccccggtgtggaaaaggctaaataaggtgacagtgcatcgatgctcccccgcgtggcctttggggcaggctggcatcccggtgcgcctctgcttcttaagctttcctgctgctcgctttgtttttaaaagtaacttgggttgcattcttccctctggactagagtagaaatgcaggggaaactgctgtggatttgagaggcaaagttggctcagctgtgtgcccagttcctcctgtgggcactttagcaggctccgagctttcctggcataggtcaatcaggtcccaggatgaataatccaggcttcagcaacactcctctttcccagccagcaaaggctgtgaatttgaattctttgttggtatgtatgtgcagggagtactgttaggcacattcttaacccatgtggttggccagaaatcagaagtggggctgtgtctctgactggctagaggccaggccttgtgggtttctatctgctaagcacccagcaggttggggcctgggactcagctctctctgcggtagaggcaggccctcctccacttcttggtactaaacgaagatctcgacaccttgcagttttacttcatttcctgcccctttcagggcctgtgaggatgcccatgagctaccgctgtacagttctcggccccggctttcttccaagagttgaccaggaaccctaaagcatccagagtagactgcgctgccactgcgcacatgctggtgcccgtcttcctcctaaggggccaggccacatccaagtgggcctctgtcgggggcggggcggtaggtccgaaagaaaccgcagacactacgatgcactcctcaagctgtcttttgtgcttagatcatccataggtgtttcttctgcttgaagctgctatatcatctttatttattcagggtattttcatattggaagccttggctagtctgctctagctctgggttctgtttagagattggtttatttctgaatattcaagaaaggaaaatgactgggcctttctttcttttcttctcctctgggatgggtagtctccctttcctagaaaggttattataactttaaggacaggcttcaagtgggaaggcccctacttttgcacttctccaagtgcaggtcacaccaggggcagaccctgtcgctgcgtttctgaactgtgaaggagcccattcgggtgggagacttcagatgggctcagtacctgtcccagccacaggcttcttgtccacctcttctcccctgcccaccagctgctcagcgcataagaccttcccgacaggctctgcgtgtgcagctctctgcgtccctcctgggccctccagcgtcagacactaatgggagttcccgagatgctcgggtttgagcagggagcaggcagagctgcagtcagagacattagaaaaccagtctgaattgggtctgtctttgagatgcccaggccagcagaaagcagctcagaagtattgttgctcatggtgtggcaatggactgaactgtaatgaaaatgttatttaatctttgtctctgtattttgatacttgaatgactttcccttttgttttactgtatataaaattgttaatctgtctgattttgtctgaattataaacactttgaggtaccaaacataaccaatctgtgcaacaacatagactgacctcagtacccaagagagtgtaaatatttctgggcttccagctttggttttgttattttcataactgtacacaacttagaacagactgaattaataaatgagaagcgacatgaacgca

SEQ ID NO: 441877 - DNA, 3517 bp, Homo sapiens
acaccagccagagaaactcatcttcgagtcctgtggttatgaagccaattatctgggctccatgctgatcaaagatctgcgagggacagaatccacgcaagacgcctgtgccaagatgcggaaatctacggagcacatgaagaagatccccaccatcatcctgtccatcacatacaaaggtgtcaagttcatcgatgcctccaacaagaacgtcattgcagagcacgagatccggaacatttcctgtgcggcccaggacccggaggacctctgtacctttgcctacatcaccaaggacctgcagaccagccaccactattgccatgtgttcagcaccgtggatgtgaacctgacctacgagatcatcctgacgctggggcaggccttcgaagtggcctatcagttggccctgcaggcccagaagtccagggcgacgggcgcctctgcagctgagatgattgaaacaaaatcttccaaaccggtgcctaagcctcgggtcggcgtgaggaaatccgcactggaaccacctgatatggaccaagatgcccaatcccatgccagtgtctcctgggttgtggaccccaaaccagactctaagcggagcctcagcaccaactgagccactgaggaaccacactgtgctgcggaaacatagacgtgggggcataggctcccactgccaccaccgccatcgcctcacctgcagctctgaagacccaggcctcacctccgcctgcaggacctcctcttggccacttggcctgggcctgccaccaccacgtcctgcagaacgagccctgccttggctgtggagaagcactccaggccgctagcagatgggactggcattccagagggtcaagaagtgacttgttcagaacacattgtttttaacagaaaaaaaatctttttataaaatgaacttttaacacttggctcaaacctctaggtcatactgccaatctttaaacaaatggccatggggcagaggacaggggagctgaggttggttcagaggccagcctgcatagcctctgtcctcaggacggaacttgggtgcagctcagtgggtcggaagagaaggcggtggcctgtgggtgaggggaacggagcaggctcaggcagaattgagtacggtgcgtctgcttttcaaacccaaccatatcagctgctgctctttatgaactgcccaacttcctgtccctttcaggggctagacacaggcttctcgtaagaacacagccttagaggcacctgagcaactcaaaggtttccggtccatttctggggttcccgatgggaaggttcagtggccaaatgaagataagtgtgcagtttctagtgctgggaagtcttagccagcaccagagcgccaggcctctccctggcctcttacctgtcagtgatcggagcactgccctgggctggccggcgccgtactgcctgcgttgtgtcagagaataggaaaagcagctttgtttggggcattaatgcttggagtggggtcagctaaggttgctacttgccaatttgtgatttgtctaatcagcctgtgtgattggggctcattttgattctctgaattatcggtttgacggttacacttggctgctgggcccatccctggcccccggtgtggaaaaggctaaataaggtgacagtgcatcgatgctcccccgcgtggcctttggggcaggctggcatcccggtgcgcctctgcttcttaagctttcctgctgctcgctttgtttttaaaagtaacttgggttgcattcttccctctggactagagtagaaatgcaggggaaactgctgtggatttgagaggcaaagttggctcagctgtgtgcccagttcctcctgtgggcactttagcaggctccgagctttcctggcataggtcaatcaggtcccaggatgaataatccaggcttcagcaacactcctctttcccagccagcaaaggctgtgaatttgaattctttgttggtatgtatgtgcagggagtactgttaggcacattcttaacccatgtggttggccagaaatcagaagtggggctgtgtctctgactggctagaggccaggccttgtgggtttctatctgctaagcacccagcaggttggggcctgggactcagctctctctgcggtagaggcaggccctcctccacttcttggtactaaacgaagatctcgacaccttgcagttttacttcatttcctgcccctttcagggcctgtgaggatgcccatgagctaccgctgtacagttctcggccccggctttcttccaagagttgaccaggaaccctaaagcatccagagtagactgcgctgccactgcgcacatgctggtgcccgtcttcctcctaaggggccaggccacatccaagtgggcctctgtcgggggcggggcggtaggtccgaaagaaaccgcagacactacgatgcactcctcaagctgtcttttgtgcttagatcatccataggtgtttcttctgcttgaagctgctatatcatctttatttattcagggtattttcatattggaagccttggctagtctgctctagctctgggttctgtttagagattggtttatttctgaatattcaagaaaggaaaatgactgggcctttctttcttttcttctcctctgggatgggtagtctccctttcctagaaaggttattataactttaaggacaggcttcaagtgggaaggcccctacttttgcacttctccaagtgcaggtcacaccaggggcagaccctgtcgctgcgtttctgaactgtgaaggagcccattcgggtgggagacttcagatgggctcagtacctgtcccagccacaggcttcttgtccacctcttctcccctgcccaccagctgctcagcgcataagaccttcccgacaggctctgcgtgtgcagctctctgcgtccctcctgggccctccagcgtcagacactaatgggagttcccgagatgctcgggtttgagcagggagcaggcagagctgcagtcagagacattagaaaaccagtctgaattgggtctgtctttgagatgcccaggccagcagaaagcagctcagaagtattgttgctcatggtgtggcaatggactgaactgtaatgaaaatgttatttaatctttgtctctgtattttgatacttgaatgactttcccttttgttttactgtatataaaattgttaatctgtctgattttgtctgaattataaacactttgaggtaccaaacataaccaatctgtgcaacaacatagactgacctcagtacccaagagagtgtaaatatttctgggcttccagctttggttttgttattttcataactgtacacaacttagaacagactgaattaataaatgagaagcgacatgaacgcaaaaaaaacgggggggcccccgcgggctaaaaccactcgatcttaaacgggagggcgcctaaaaatacccggggggcacagtacgtacccgtttttacaagg

SEQ ID NO: 441878 - DNA, 2067 bp, Homo sapiens
acaccagccagagaaactcatcttcgagtcctgtggttatgaagccaattatctgggctccatgctgatcaaagatctgcgagggacagaatccacgcaagacgcctgtgccaagatgcggaaatctacggagcacatgaagaagatccccaccatcatcctgtccatcacatacaaaggtgtcaagttcatcgatgcctccaacaagaacgtcattgcagagcacgagatccggaacatttcctgtgcggcccaggacccggaggacctctgtacctttgcctacatcaccaaggacctgcagaccagccaccactattgccatgtgttcagcaccgtggatgtgaacctgacctacgagatcatcctgacgctggggcaggccttcgaagtggcctatcagttggccctgcaggcccagaagtccagggcgacgggcgcctctgcagctgagatgattgaaacaaaatcttccaaaccggtgcctaagcctcgggtcggcgtgaggaaatccgcactggaaccacctgatatggaccaagatgcccaatcccatgccagtgtctcctgggttgtggaccccaaaccagactctaagcggagcctcagcaccaactgagccactgaggaaccacactgtgctgcggaaacatagacgtgggggcataggctcccactgccaccaccgccatcgcctcacctgcagctctgaagacccaggcctcacctccgcctgcaggacctcctcttggccacttggcctgggcctgccaccaccacgtcctgcagaacgagccctgccttggctgtggagaagcactccaggccgctagcagatgggactggcattccagagggtcaagaagtgacttgttcagaacacattgtttttaacagaaaaaaaatctttttataaaatgaacttttaacacttggctcaaacctctaggtcatactgccaatctttaaacaaatggccatggggcagaggacaggggagctgaggttggttcagaggccagcctgcatagcctctgtcctcaggacggaacttgggtgcagctcagtgggtcggaagagaaggcggtggcctgtgggtgaggggaacggagcaggctcaggcagaattgagtacggtgcgtctgcttttcaaacccaaccatatcagctgctgctctttatgaactgcccaacttcctgtccctttcaggggctagacacaggcttctcgtaagaacacagccttagaggcacctgagcaactcaaaggtttccggtccatttctggggttcccgatgggaaggttcagtggccaaatgaagataagtgtgcagtttctagtgctgggaagtcttagccagcaccagagcgccaggcctctccctggcctcttacctgtcagtgatcggagcactgccctgggctggccggcgccgtactgcctgcgttgtgtcagagaataggaaaagcagctttgtttggggcattaatgcttggagtggggtcagctaaggttgctacttgccaatttgtgatttgtctaatcagcctgtgtgattggggctcattttgattctctgaattatcggtttgacggttacacttggctgctgggcccatccctggcccccggtgtggaaaaggctaaataaggtgacagtgcatcgatgctcccccgcgtggcctttggggcaggctggcatcccggtgcgcctctgcttcttaagctttcctgctgctcgctttgtttttaaaagtaacttgggttgcattcttccctctggactagagtagaaatgcaggggaaactgctgtggatttgagacggcggtggcctgcgggtgaggggaacggagcaggctcaggcagaattgagtacggtgcgtctgcttttcaaacccaacatatcagctgctgctctttatgaactgccaacttcctgtccctttcagggggctagacacaggcttctcgtaagaacacagctttagaggcacctgagcaactcaaaggtttccggtccatttctggggttccgatgggaaggttcagtggcaatgaagata

SEQ ID NO: 441879 - DNA, 935 bp, Homo sapiens
cagaggctagattgaattcacctctgcattcccatcctgttcattttcacttgccactttcttatttgcaaataagaaagtacctgctattttcctcagcgaatctgccattgaaaattgcctcttggtctgtgtaaatttaaattgcagtagcttattgttttcatagggtagttgacatctaatacctctattctgagaggggaaatcatttttttttgtaaaactaactgcttctctttattttctccctataccagctacaggccatatagctaccggcactttgcaccccccaccacaccctgcagcacagatgtttgtgacagtgactatgctcctagtcggagaatgacctcagtggcaacagccaagggctataccagtgacttgaactatgattcagaacctgtgcccccacctcccacaccccgaagccaatacttgtcagcagaggagaactatgaaagctgcccaccttctccatacacagagaggagctattctcatcacctctacccaccgccaccctctccctgtacagactcctcctgaggaggggccctcctcctctgactgcctccaacgtaaaaatgtaaatataaatttggttgagatctggagggggggagggagctattagagaaggatgaggcagaccatgtacagttaaaattataaaatggggtagggaatactggagatatttgtacagaagaaaaggatatttatatattttcttaaaacagcagatttgctgcttgtgccataaaagtttgtataaaaaaaatttgtactaaaagttttatttttgcaaactaaatacacaaagcatgccttaaacccagtgaagcaactgagtacaaaggaaacaggaataataaaggcatcactgaccaggaatatctgggctttattgataccaaaaataaaaa

SEQ ID NO: 441880 - DNA, 5299 bp, Homo sapiens
gcggccgccccggctcctcgcctcccccacttctggccacccctcgccggtgagagaagagaacgcgagaagggaagatgggggccgtcctgaggagcctcctggcctgcagcttctgtgtgctcctgagagcggcccctttgttgctttatgcaaacagacgggacttgcgattggttgatgctacaaatggcaaagagaatgctacgattgtagttggaggcttggaggatgcagctgcggtggactttgtgtttagtcatggcttgatatactggagtgatgtcagcgaagaagccattaaacgaacagaatttaacaaaactgagagtgtgcagaatgttgttgtttctggattattgtcccccgatgggctggcatgtgattggcttggagaaaaattgtactggacagattctgaaactaatcggattgaagtttctaatttagatggatctttacgaaaagttttattttggcaagagttggatcaacccagagctattgccttagatccttcaagtgggttcatgtactggacagactggggagaagtgccaaagatagaacgtgctggaatggatggttcaagtcgcttcattataataaacagtgaaatttactggccaaatggactgactttggattatgaagaacaaaagctttattgggcagatgcaaaacttaatttcatccacaaatcaaatctggatggaacaaatcggcaggcagtggttaaaggttcccttccacatccttttgccttgacgttatttgaggacatattgtactggactgactggagcacacactccattttggcttgcaacaagtatactggtgagggtctgcgtgaaatccattctgacatcttctctcccatggatatacatgccttcagccaacagaggcagccaaatgccacaaatccatgtggaattgacaatgggggttgttcccatttgtgtttgatgtctccagtcaagcctttttatcagtgtgcttgccccactggggtcaaactcctggagaatggaaaaacctgcaaagatggtgccacagaattattgcttttagctcgaaggacagacttgagacgcatttctttggatacaccagattttacagacattgttctgcagttagaagacatccgtcatgccattgccatagattacgatcctgtggaaggctacatctactggactgatgatgaagtgagggccatacgccgttcatttatagatggatctggcagtcagtttgtggtcactgctcaaattgcccatcctgatggtattgctgtggactgggttgcacgaaatctttattggacagacactggcactgatcgaatagaagtgacaaggctcaatgggaccatgaggaagatcttgatttcagaggacttagaggaaccccgggctattgtgttagatcccatggttgggtacatgtattggactgactggggagaaattccgaaaattgagcgagcagctctggatggttctgaccgtgtagtattggttaacacttctcttggttggccaaatggtttagccttggattatgatgaaggcaaaatatactggggagatgccaaaacagacaagattgaggttatgaatactgatggcactgggagacgagtactagtggaagacaaaattcctcacatatttggatttactttgttgggtgactatgtttactggactgactggcagaggcgtagcattgaaagagttcataaacgaagtgcagagagggaagtgatcatagatcagctgcctgacctcatgggcctaaaggctacaaatgttcatcgagtgattggttccaacccctgtgctgaggaaaacgggggatgtagccatctctgcctctatagacctcagggccttcgctgtgcttgccctattggctttgaactcatcagtgacatgaagacctgcattgtcccagaggctttccttttgttttcacggagagcagatatcagacgaatttctctggaaacaaacaataataatgtggctattccactcactggtgtcaaagaagcttctgctttggattttgatgtgacagacaaccgaatttattggactgatatatcactcaagaccatcagcagagcctttatgaatggcagtgcactggaacatgtggtagaattcggcttagattatccagaaggcatggcagtagactggcttgggaagaacttgtactgggcagacacaggaacgaatcgaattgaggtgtcaaagttggatgggcagcaccgacaagttttggtgtggaaagacctagatagtcccagagctctcgcgttggaccctgccgaaggatttatgtattggactgaatggggtggaaaacctaagatagacagagctgcaatggatggaagtgaacgtactaccttagttccaaatgtggggcgggcaaacggcctaactattgattatgctaaaaggaggctttattggacagacctggacaccaacttaatagaatcttcaaatatgcttgggctcaaccgtgaagttatagcagatgacttgcctcatccttttggcttaactcagtaccaagattatatctactggacggactggagccgacgcagcattgagcgtgccaacaaaaccagtggccaaaaccgcaccatcattcagggccatttggattatgtgatggacatcctcgtctttcactcatctcgacagtcagggtggaatgaatgtgcttccagcaatgggcactgctcccacctctgcttggctgtgccagttgggggttttgtttgtggatgccctgcccactactctcttaatgctgacaacaggacttgtagtgctcctacgactttcctgctcttcagtcaaaagagtgccatcaaccgcatggtgattgatgaacaacagagccccgacatcatccttcccatccacagccttcggaatgtccgggccattgactatgacccactggacaagcaactctattggattgactcacgacaaaacatgatccgaaaggcacaagaagatggcagccagggctttactgtggttgtgagctcagttccgagtcagaacctggaaatacaaccctatgacctcagcattgatatttacagccgctacatctactggacttgtgaggctaccaatgtcattaatgtgacaagattagatgggagatcagttggagtggtgctgaaaggcgagcaggacagacctcgagccattgtggtaaacccagagaaagggtatatgtattttaccaatcttcaggaaaggtctcctaaaattgaacgggctgctttggatgggacagaacgggaggtcctctttttcagtggcttaagtaaaccaattgctttagcccttgatagcaggctgggcaagctcttttgggctgattcagatctccggcgaattgaaagcagtgatctctcaggtgctaaccggatagtattagaagactccaatatcttgcagcctgtgggacttactgtgtttgaaaactggctctattggattgataaacagcagcaaatgattgaaaaaattgacatgacaggtcgagagggtagaaccaaagtccaagctcgaattgcccagcttagtgacattcatgcagtaaaggagctgaaccttcaagaatacagacagcacccttgtgctcaggataatggtggctgttcacatatttgtcttgtaaagggggatggtactacaaggtgttcttgccccatgcacctggttctacttcaagatgagctatcatgtggagaacctccaacatgttctcctcagcagtttacttgtttcacgggggaaattgactgtatccctgtggcttggcggtgcgatgggtttactgaatgtgaagaccacagtgatgaactcaattgtcctgtatgctcagagtcccagttccagtgtgccagtgggcagtgtattgatggtgccctccgatgcaatggagatgcaaactgccaggacaaatcagatgagaagaactgtgaagtgctttgtttaattgatcagttccgctgtgccaatggtcagtgcattggaaagcacaagaagtgtgatcataatgtggattgcagtgacaagtcagatgaactggattgttatccgactgaagaaccagcaccacaggccaccaatacagttggttctgttattggcgtaattgtcaccatttttgtgtctggaactgtatactttatctgccagaggatgttgtgtccacgtatgaagggagatggggaaactatgactaatgactatgtagttcatggaccagcttctgtgcctcttggttatgtgccacacccaagttctttgtcaggatctcttccaggaatgtctcgaggtaaatcaatgatcagctccctcagtatcatggggggaagcagtggacccccctatgaccgagcccatgttacaggagcatcatcaagtagttcttcaagcaccaaaggcacttacttccctgcaattttgaaccctccaccatccccagccacagagcgatcacattacactatggaatttggatattcttcaaacagtccttccactcataggtcatacagctacaggccatatagctaccggcactttgcaccccccaccacaccctgcagcacagatgtttgtgacagtgactatgctcctagtcggagaatgacctcagtggcaacagccaagggctataccagtgacttgaactatgattcagaacctgtgcccccacctcccacaccccgaagccaatacttgtcagcagaggagaactatgaaagctgcccaccttctccatacacagagaggagctattctcatcacctctacccaccgccaccctctccctgtacagactcctcctgaggaggggccctcctcctctgactgcctccaacgtaaaaatgtaaatataaatttggttgagatctggagggggggagggagctattagagaaggatgaggcagaccatgtacagttaaaattataaaatggggtagggaatactggagatatttgtacagaagaaaaggatatttatatattttcttaaaacagcagatttgctgcttgtgccataaaagtttgtataaaaaaaatttgtactaaaagttttatttttgcaaactaaatacacaaagcatgccttaaacccagtgaagcaactgagtacaaaggaaacaggaataataaaggcatcactgaccaggaatatctgggctttattgataccaaaaataaaaa

SEQ ID NO: 441881 - DNA, 564 bp, Homo sapiens
gcacgagtatctctatcgcccatcctgcatatatttatatatagatacatattctatatatctaatgcctaaatatgggtattaaagggaaaatttttaaagtctgattaaatccaatatgacatgaaattaaatatatggattagtaaggaaaaatgttaaaaagtagagaggataccaagaagattaaactggactagccttatttgcaagtgaaggatctggtgctgctttcagatgtttatcttttatttttttcccttaagctttaatcttcgtcattgtcttaaagtcaactggtgtttcttgttcattgactttggtacgatggtgctttgcaaggatgtatttatgttataatggccaacatttggtcagcccttgtccacttattcacttccctccttttgtaaaataagtgctttaattataaactgtataaaaataccttgtataaaccccttttttgattattacaataaataagctgaattgtaacaaatgaaatttgatttttgtaataaaacagtggaaaagtaaaaaaaactgtcctttcttttcagc

SEQ ID NO: 441882 - DNA, 5916 bp, Homo sapiens
gcggccgccccggctcctcgcctcccccacttctggccacccctcgccggtgagagaagagaacgcgagaagggaagatgggggccgtcctgaggagcctcctggcctgcagcttctgtgtgctcctgagagcggcccctttgttgctttatgcaaacagacgggacttgcgattggttgatgctacaaatggcaaagagaatgctacgattgtagttggaggcttggaggatgcagctgcggtggactttgtgtttagtcatggcttgatatactggagtgatgtcagcgaagaagccattaaacgaacagaatttaacaaaactgagagtgtgcagaatgttgttgtttctggattattgtcccccgatgggctggcatgtgattggcttggagaaaaattgtactggacagattctgaaactaatcggattgaagtttctaatttagatggatctttacgaaaagttttattttggcaagagttggatcaacccagagctattgccttagatccttcaagtgggttcatgtactggacagactggggagaagtgccaaagatagaacgtgctggaatggatggttcaagtcgcttcattataataaacagtgaaatttactggccaaatggactgactttggattatgaagaacaaaagctttattgggcagatgcaaaacttaatttcatccacaaatcaaatctggatggaacaaatcggcaggcagtggttaaaggttcccttccacatccttttgccttgacgttatttgaggacatattgtactggactgactggagcacacactccattttggcttgcaacaagtatactggtgagggtctgcgtgaaatccattctgacatcttctctcccatggatatacatgccttcagccaacagaggcagccaaatgccacaaatccatgtggaattgacaatgggggttgttcccatttgtgtttgatgtctccagtcaagcctttttatcagtgtgcttgccccactggggtcaaactcctggagaatggaaaaacctgcaaagatggtgccacagaattattgcttttagctcgaaggacagacttgagacgcatttctttggatacaccagattttacagacattgttctgcagttagaagacatccgtcatgccattgccatagattacgatcctgtggaaggctacatctactggactgatgatgaagtgagggccatacgccgttcatttatagatggatctggcagtcagtttgtggtcactgctcaaattgcccatcctgatggtattgctgtggactgggttgcacgaaatctttattggacagacactggcactgatcgaatagaagtgacaaggctcaatgggaccatgaggaagatcttgatttcagaggacttagaggaaccccgggctattgtgttagatcccatggttgggtacatgtattggactgactggggagaaattccgaaaattgagcgagcagctctggatggttctgaccgtgtagtattggttaacacttctcttggttggccaaatggtttagccttggattatgatgaaggcaaaatatactggggagatgccaaaacagacaagattgaggttatgaatactgatggcactgggagacgagtactagtggaagacaaaattcctcacatatttggatttactttgttgggtgactatgtttactggactgactggcagaggcgtagcattgaaagagttcataaacgaagtgcagagagggaagtgatcatagatcagctgcctgacctcatgggcctaaaggctacaaatgttcatcgagtgattggttccaacccctgtgctgaggaaaacgggggatgtagccatctctgcctctatagacctcagggccttcgctgtgcttgccctattggctttgaactcatcagtgacatgaagacctgcattgtcccagaggctttccttttgttttcacggagagcagatatcagacgaatttctctggaaacaaacaataataatgtggctattccactcactggtgtcaaagaagcttctgctttggattttgatgtgacagacaaccgaatttattggactgatatatcactcaagaccatcagcagagcctttatgaatggcagtgcactggaacatgtggtagaattcggcttagattatccagaaggcatggcagtagactggcttgggaagaacttgtactgggcagacacaggaacgaatcgaattgaggtgtcaaagttggatgggcagcaccgacaagttttggtgtggaaagacctagatagtcccagagctctcgcgttggaccctgccgaaggatttatgtattggactgaatggggtggaaaacctaagatagacagagctgcaatggatggaagtgaacgtactaccttagttccaaatgtggggcgggcaaacggcctaactattgattatgctaaaaggaggctttattggacagacctggacaccaacttaatagaatcttcaaatatgcttgggctcaaccgtgaagttatagcagatgacttgcctcatccttttggcttaactcagtaccaagattatatctactggacggactggagccgacgcagcattgagcgtgccaacaaaaccagtggccaaaaccgcaccatcattcagggccatttggattatgtgatggacatcctcgtctttcactcatctcgacagtcagggtggaatgaatgtgcttccagcaatgggcactgctcccacctctgcttggctgtgccagttgggggttttgtttgtggatgccctgcccactactctcttaatgctgacaacaggacttgtagtgctcctacgactttcctgctcttcagtcaaaagagtgccatcaaccgcatggtgattgatgaacaacagagccccgacatcatccttcccatccacagccttcggaatgtccgggccattgactatgacccactggacaagcaactctattggattgactcacgacaaaacatgatccgaaaggcacaagaagatggcagccaggtaattgagagcttggttcaaaattcatttctcctgactaataactggactcaccaaccactctgtttcacttaagtcttgactctgcttaagtgtgtgtgtatgtgtgtatgaaactgaaattatggattcttaatatttctgggagtactttttaatgagagaattgtcaaatttggaaagatttattgagccttaggttacatggacagttaagcttaagtaaactgtatattgattatcaaacacaagctgtaattggaaaagttgagaggaaaagcatgagatcacaaattagggggaaaaaagaaaagggatttttaaatttggtgtattaaattcattgtccaagggggaaaatgaataatgtttcattagattccttatatgcaaaagtatttattttgaacatgtgtcctaaaatatatgcactaactgatgtgattaaaattgtccaagaaataaacttgagcataacatactttgtgtgcaccacagtaagctattctgcattgaagtggtcttttataactaaggcctggactttgctccaacagagtcgtggtcttctgaatagtgacttaaggagttttgtttgcttaagtcagataatagcacattcacagggaaacaaagagagttggtggatagaattttctgactattaatttttcttccatgaaattttattatgcctttggcactttctgccactcttacagcatatcacaagatatctgtttagcagaagattatgtagttactttaattttaatataaaagtagcttgtgatacattaccaagagatctctgattctttagtaagtttgagaacacctattctacagagatgataggtacttagaaatgaagactttaaagtacattttaatctaatataggccagtaattgggggaaggggctttgagcagtacaattttaagatgattttgagggttgtatttctttatcatttaaaaatatcctaaagtcagtaatttatatgaaggaaactcattcattattgaaggtattaaaaatagccatcatctgtattaggtagcagttttggaggatcatctttttcttttgctataaagccctattaatgaagaatacttccagtagagttaatagctgtagcttacctagtgtgttaatgaagtgtgtttatttatgtgacttgataccagtagtcataatagagactgaagaggtatgcgttaagcacgcctacttctatgcagtaaacaggctgcagctgcctagattagattcttagaaatgtcatattttgaattgttttatttcttgtaggggaagctttgtcccacttcattcatttgcatgccataggaattacatattggttatcattacgtatctaacaagattcagaaacaaaaatcttggacttttcacatccgaaatatgtcagctcttaataaatgtgtggtgcttaagtctacatatggcatccatagttgatttagagtatggatatgagtgtgttgaccagttatcagtaggtggacaaatatttgggcatctacagatgagactatgcactaagtgtggactgagtcctaaagaagcttatagtcaggtgttgtttaaaacattatcagaattcttaaacccaaggaatttaattttatttggtatttcttaagcctaaaatgaaccaagagaaagatgattttagaaagtacttgtagtgaaagatgattttagaaagtacttgtagtgcatgtgtggcttctgacttttgggatggcaccattttataatagtttcaaaatttagcttttgaaattctcaacattttatggtagaagactttggacctcaagtataaaattatacgtttataatttttttaaaatttaaattataagtattgtgaattcacactctcaggctattgtctgacttgatctacgtctcataaagcctgtacctgagtggagtggaaggtggagtcttaggttaatcagttactgactctaccctcaccctctttcaattgaggtaaactttgctgtttttctttttcataaagcattctcaaattgttgagtttattgctgaaaaaaatctccatgactttacagatagaattacaaactaaatgatgtcttgtatttagaagcagagtacagacctaacgaactgttagattctccaccatcacttagggtttgcccagaagcaacaccagagaattacagacaacgcgcttttgctgaactgtccattttggtggttgtgtttttcagtcaaatataagcaggatgggcgatagagatatatttatatatagatacatattctatatatctaatgcctaaatatgggtattaaagggaaaatttttaaagtctgattaaatccaatatgacatgaaattaaatatatggattagtaaggaaaaatgttaaaaagtagagaggataccaagaagattaaactggactagccttatttgcaagtgaaggatctggtgctgctttcagatgtttatcttttatttttttcccttaagctttaatcttcgtcattgtcttaaagtcaactggtgtttcttgttcattgactttggtacgatggtgctttgcaaggatgtatttatgttataatggccaacatttggtcagcccttgtccacttattcacttccctccttttgtaaaataagtgctttaattataaactgtataaaaataccttgtataaaccccttttttgattattacaataaataagctgaattgtaacaaatgaaatttgatttttgtaataaaacagtggaaaagtaaaaaaaactgtcctttcttttcagc

SEQ ID NO: 441883 - DNA, 5862 bp, Homo sapiens
gcggccgccccggctcctcgcctcccccacttctggccacccctcgccggtgagagaagagaacgcgagaagggaagatgggggccgtcctgaggagcctcctggcctgcagcttctgtgtgctcctgagagcggcccctttgttgctttatgcaaacagacgggacttgcgattggttgatgctacaaatggcaaagagaatgctacgattgtagttggaggcttggaggatgcagctgcggtggactttgtgtttagtcatggcttgatatactggagtgatgtcagcgaagaagccattaaacgaacagaatttaacaaaactgagagtgtgcagaatgttgttgtttctggattattgtcccccgatgggctggcatgtgattggcttggagaaaaattgtactggacagattctgaaactaatcggattgaagtttctaatttagatggatctttacgaaaagttttattttggcaagagttggatcaacccagagctattgccttagatccttcaagtgggttcatgtactggacagactggggagaagtgccaaagatagaacgtgctggaatggatggttcaagtcgcttcattataataaacagtgaaatttactggccaaatggactgactttggattatgaagaacaaaagctttattgggcagatgcaaaacttaatttcatccacaaatcaaatctggatggaacaaatcggcaggcagtggttaaaggttcccttccacatccttttgccttgacgttatttgaggacatattgtactggactgactggagcacacactccattttggcttgcaacaagtatactggtgagggtctgcgtgaaatccattctgacatcttctctcccatggatatacatgccttcagccaacagaggcagccaaatgccacaaatccatgtggaattgacaatgggggttgttcccatttgtgtttgatgtctccagtcaagcctttttatcagtgtgcttgccccactggggtcaaactcctggagaatggaaaaacctgcaaagatggtgccacagaattattgcttttagctcgaaggacagacttgagacgcatttctttggatacaccagattttacagacattgttctgcagttagaagacatccgtcatgccattgccatagattacgatcctgtggaaggctacatctactggactgatgatgaagtgagggccatacgccgttcatttatagatggatctggcagtcagtttgtggtcactgctcaaattgcccatcctgatggtattgctgtggactgggttgcacgaaatctttattggacagacactggcactgatcgaatagaagtgacaaggctcaatgggaccatgaggaagatcttgatttcagaggacttagaggaaccccgggctattgtgttagatcccatggttgggtacatgtattggactgactggggagaaattccgaaaattgagcgagcagctctggatggttctgaccgtgtagtattggttaacacttctcttggttggccaaatggtttagccttggattatgatgaaggcaaaatatactggggagatgccaaaacagacaagattgaggttatgaatactgatggcactgggagacgagtactagtggaagacaaaattcctcacatatttggatttactttgttgggtgactatgtttactggactgactggcagaggcgtagcattgaaagagttcataaacgaagtgcagagagggaagtgatcatagatcagctgcctgacctcatgggcctaaaggctacaaatgttcatcgagtgattggttccaacccctgtgctgaggaaaacgggggatgtagccatctctgcctctatagacctcagggccttcgctgtgcttgccctattggctttgaactcatcagtgacatgaagacctgcattgtcccagaggctttccttttgttttcacggagagcagatatcagacgaatttctctggaaacaaacaataataatgtggctattccactcactggtgtcaaagaagcttctgctttggattttgatgtgacagacaaccgaatttattggactgatatatcactcaagaccatcagcagagcctttatgaatggcagtgcactggaacatgtggtagaattcggcttagattatccagaaggcatggcagtagactggcttgggaagaacttgtactgggcagacacaggaacgaatcgaattgaggtgtcaaagttggatgggcagcaccgacaagttttggtgtggaaagacctagatagtcccagagctctcgcgttggaccctgccgaaggatttatgtattggactgaatggggtggaaaacctaagatagacagagctgcaatggatggaagtgaacgtactaccttagttccaaatgtggggcgggcaaacggcctaactattgattatgctaaaaggaggctttattggacagacctggacaccaacttaatagaatcttcaaatatgcttgggctcaaccgtgaagttatagcagatgacttgcctcatccttttggcttaactcagtaccaagattatatctactggacggactggagccgacgcagcattgagcgtgccaacaaaaccagtggccaaaaccgcaccatcattcagggccatttggattatgtgatggacatcctcgtctttcactcatctcgacagtcagggtggaatgaatgtgcttccagcaatgggcactgctcccacctctgcttggctgtgccagttgggggttttgtttgtggatgccctgcccactactctcttaatgctgacaacaggacttgtagtgctcctacgactttcctgctcttcagtcaaaagagtgccatcaaccgcatggtgattgatgaacaacagagccccgacatcatccttcccatccacagccttcggaatgtccgggccattgactatgacccactggacaagcaactctattggattgactcacgacaaaacatgatccgaaaggcacaagaagatggcagccaggtaattgagagcttggttcaaaattcatttctcctgactaataactggactcaccaaccactctgtttcacttaagtcttgactctgcttaagtgtgtgtgtatgtgtgtatgaaactgaaattatggattcttaatatttctgggagtactttttaatgagagaattgtcaaatttggaaagatttattgagccttaggttacatggacagttaagcttaagtaaactgtatattgattatcaaacacaagctgtaattggaaaagttgagaggaaaagcatgagatcacaaattagggggaaaaaagaaaagggatttttaaatttggtgtattaaattcattgtccaagggggaaaatgaataatgtttcattagattccttatatgcaaaagtatttattttgaacatgtgtcctaaaatatatgcactaactgatgtgattaaaattgtccaagaaataaacttgagcataacatactttgtgtgcaccacagtaagctattctgcattgaagtggtcttttataactaaggcctggactttgctccaacagagtcgtggtcttctgaatagtgacttaaggagttttgtttgcttaagtcagataatagcacattcacagggaaacaaagagagttggtggatagaattttctgactattaatttttcttccatgaaattttattatgcctttggcactttctgccactcttacagcatatcacaagatatctgtttagcagaagattatgtagttactttaattttaatataaaagtagcttgtgatacattaccaagagatctctgattctttagtaagtttgagaacacctattctacagagatgataggtacttagaaatgaagactttaaagtacattttaatctaatataggccagtaattgggggaaggggctttgagcagtacaattttaagatgattttgagggttgtatttctttatcatttaaaaatatcctaaagtcagtaatttatatgaaggaaactcattcattattgaaggtattaaaaatagccatcatctgtattaggtagcagttttggaggatcatctttttcttttgctataaagccctattaatgaagaatacttccagtagagttaatagctgtagcttacctagtgtgttaatgaagtgtgtttatttatgtgacttgataccagtagtcataatagagactgaagaggtatgcgttaagcacgcctacttctatgcagtaaacaggctgcagctgcctagattagattcttagaaatgtcatattttgaattgttttatttcttgtaggggaagctttgtcccacttcattcatttgcatgccataggaattacatattggttatcattacgtatctaacaagattcagaaacagcttaagtctacatatggcatccatagttgatttagagtatggatatgagtgtgttgaccagttatcagtaggtggacaaatatttgggcatctacagatgagactatgcactaagtgtggactgagtcctaaagaagcttatagtcaggtgttgtttaaaacattatcagaattcttaaacccaaggaatttaattttatttggtatttcttaagcctaaaatgaaccaagagaaagatgattttagaaagtacttgtagtgaaagatgattttagaaagtacttgtagtgcatgtgtggcttctgacttttgggatggcaccattttataatagtttcaaaatttagcttttgaaattctcaacattttatggtagaagactttggacctcaagtataaaattatacgtttataatttttttaaaatttaaattataagtattgtgaattcacactctcaggctattgtctgacttgatctacgtctcataaagcctgtacctgagtggagtggaaggtggagtcttaggttaatcagttactgactctaccctcaccctctttcaattgaggtaaactttgctgtttttctttttcataaagcattctcaaattgttgagtttattgctgaaaaaaatctccatgactttacagatagaattacaaactaaatgatgtcttgtatttagaagcagagtacagacctaacgaactgttagattctccaccatcacttagggtttgcccagaagcaacaccagagaattacagacaacgcgcttttgctgaactgtccattttggtggttgtgtttttcagtcaaatataagcaggatgggcgatagagatatatttatatatagatacatattctatatatctaatgcctaaatatgggtattaaagggaaaatttttaaagtctgattaaatccaatatgacatgaaattaaatatatggattagtaaggaaaaatgttaaaaagtagagaggataccaagaagattaaactggactagccttatttgcaagtgaaggatctggtgctgctttcagatgtttatcttttatttttttcccttaagctttaatcttcgtcattgtcttaaagtcaactggtgtttcttgttcattgactttggtacgatggtgctttgcaaggatgtatttatgttataatggccaacatttggtcagcccttgtccacttattcacttccctccttttgtaaaataagtgctttaattataaactgtataaaaataccttgtataaaccccttttttgattattacaataaataagctgaattgtaacaaatgaaatttgatttttgtaataaaacagtggaaaagtaaaaaaaactgtcctttcttttcagc

SEQ ID NO: 441884 - DNA, 3562 bp, Homo sapiens
aatttaacaatgaggattaaatgagaaggcaaactgttaacttctcagctgtcagaatttgggtggaagggaataatggaagcctcttttgtgatctgcctgacctgctgtcatgtatggtactggggctgctacatcttgagctatcagggctgacctgtggaatgattctagcacttgctctgccaccttgccagaagttcgtttcctgctttttacacatgtgtagcacttctctgctaaaattgaatggttttaaactaatgtatttttagcttaagaggtgttggtcagttaattattgaattttttttttttcttttttaattctgtcttgccaaggcctctctgggtttcagggcccaagagaaaacagtggaagaaaggattcagaatttgggcaagggtgaagtaactgttcatgcaagttaaaaatacctaagtaaagtttttgaagataaaattgtggtttcagaataatgctgattgttggagactgtaagaatcaggtgcacttgattttgcatataagcaaatggtaaatctatcagagtcctaaaacagacaagcatgaactcttcccattgctggaactaagtgcccacagtgtcagacgaagatggaaaggttagcaatacctgggtgtcagttagaatttgagaattctatatgtttacatatttaaatgtgcatcttgatctggtgggcttcccatgtggagacttgcactctaattaactaagaagaatattgccttgttggatctcagtccacgtgcttgcactgcgatggcaatggcctcttcttcaaaatactaatttgtgtgccaatttgtttaaaattatttgaaggcagttcagcctaatctcagtgttctctttctggggtagatgagatggattcttaatatttctgggagtactttttaatgagagaattgtcaaatttggaaagatttattgagccttaggttacatggacagttaagcttaagtaaactgtatattgattatcaaacacaagctgtaattggaaaagttgagaggaaaagcatgagatcacaaattagggggaaaaaagaaaagggatttttaaatttggtgtattaaattcattgtccaagggggaaaatgaataatgtttcattagattccttatatgcaaaagtatttattttgaacatgtgtcctaaaatatatgcactaactgatgtgattaaaattgtccaagaaataaacttgagcataacatactttgtgtgcaccacagtaagctattctgcattgaagtggtcttttataactaaggcctggactttgctccaacagagtcgtggtcttctgaatagtgacttaaggagttttgtttgcttaagtcagataatagcacattcacagggaaacaaagagagttggtggatagaattttctgactattaatttttcttccatgaaattttattatgcctttggcactttctgccactcttacagcatatcacaagatatctgtttagcagaagattatgtagttactttaattttaatataaaagtagcttgtgatacattaccaagagatctctgattctttagtaagtttgagaacacctattctacagagatgataggtacttagaaatgaagactttaaagtacattttaatctaatataggccagtaattgggggaaggggctttgagcagtacaattttaagatgattttgagggttgtatttctttatcatttaaaaatatcctaaagtcagtaatttatatgaaggaaactcattcattattgaaggtattatgctataaagccctattaatgaagaatacttccagtagagttaatagctgtagcttacctagtgtgttaatgaagtgtgtttatttatgtgacttgataccagtagtcataatagagactgaagaggtatgcgttaagcacgcctacttctatgcagtaaacaggctgcagctgcctagattagattcttagaaatgtcatattttgaattgttttatttcttgtaggggaagctttgtcccacttcattcatttgcatgccataggaattacatattggttatcattacgtatctaacaagattcagaaacaaaaatcttggacttttcacatccgaaatatgtcagctcttaataaatgtgtggtgcttaagtctacatatggcatccatagttgatttagagtatggatatgagtgtgttgaccagttatcagtaggtggacaaatatttgggcatctacagatgagactatgcactaagtgtggactgagtcctaaagaagcttatagtcaggtgttgtttaaaacattatcagaattcttaaacccaaggaatttaattttatttggtatttcttaagcctaaaatgaaccaagagaaagatgattttagaaagtacttgtagtgaaagatgattttagaaagtacttgtagtgcatgtgtggcttctgacttttgggatggcaccattttataatagtttcaaaatttagcttttgaaattctcaacattttatggtagaagactttggacctcaagtataaaattatacgtttataatttttttaaaatttaaattataagtattgtgaattcacactctcaggctattgtctgacttgatctacgtctcataaagcctgtacctgagtggagtggaaggtggagtcttaggttaatcagttactgactctaccctcaccctctttcaattgaggtaaactttgctgtttttctttttcataaagcattctcaaattgttgagtttattgctgaaaaaaatctccatgactttacagatagaattacaaactaaatgatgtcttgtatttagaagcagagtacagacctaacgaactgttagattctccaccatcacttagggtttgcccagaagcaacaccagagaattacagacaacgcgcttttgctgaactgtccattttggtggttgtgtttttcagtcaaatataagcaggatgggcgatagagatatatttatatatagatacatattctatatatctaatgcctaaatatgggtattaaagggaaaatttttaaagtctgattaaatccaatatgacatgaaattaaatatatggattagtaaggaaaaatgttaaaaagtagagaggataccaagaagattaaactggactagccttatttgcaagtgaaggatctggtgctgctttcagatgtttatcttttatttttttcccttaagctttaatcttcgtcattgtcttaaagtcaactggtgtttcttgttcattgactttggtacgatggtgctttgcaaggatgtatttatgttataatggccaacatttggtcagcccttgtccacttattcacttccctccttttgtaaaataagtgctttaattataaactgtataaaaataccttgtataaaccccttttttgattattacaataaataagctgaattgtaacaaatgaaatttgatttttgtaataaaacagtggaaaagtaaaaaaaactgtcctttcttttcagc

SEQ ID NO: 441885 - DNA, 5809 bp, Homo sapiens
gcggccgccccggctcctcgcctcccccacttctggccacccctcgccggtgagagaagagaacgcgagaagggaagatgggggccgtcctgaggagcctcctggcctgcagcttctgtgtgctcctgagagcggcccctttgttgctttatgcaaacagacgggacttgcgattggttgatgctacaaatggcaaagagaatgctacgattgtagttggaggcttggaggatgcagctgcggtggactttgtgtttagtcatggcttgatatactggagtgatgtcagcgaagaagccattaaacgaacagaatttaacaaaactgagagtgtgcagaatgttgttgtttctggattattgtcccccgatgggctggcatgtgattggcttggagaaaaattgtactggacagattctgaaactaatcggattgaagtttctaatttagatggatctttacgaaaagttttattttggcaagagttggatcaacccagagctattgccttagatccttcaagtgggttcatgtactggacagactggggagaagtgccaaagatagaacgtgctggaatggatggttcaagtcgcttcattataataaacagtgaaatttactggccaaatggactgactttggattatgaagaacaaaagctttattgggcagatgcaaaacttaatttcatccacaaatcaaatctggatggaacaaatcggcaggcagtggttaaaggttcccttccacatccttttgccttgacgttatttgaggacatattgtactggactgactggagcacacactccattttggcttgcaacaagtatactggtgagggtctgcgtgaaatccattctgacatcttctctcccatggatatacatgccttcagccaacagaggcagccaaatgccacaaatccatgtggaattgacaatgggggttgttcccatttgtgtttgatgtctccagtcaagcctttttatcagtgtgcttgccccactggggtcaaactcctggagaatggaaaaacctgcaaagatggtgccacagaattattgcttttagctcgaaggacagacttgagacgcatttctttggatacaccagattttacagacattgttctgcagttagaagacatccgtcatgccattgccatagattacgatcctgtggaaggctacatctactggactgatgatgaagtgagggccatacgccgttcatttatagatggatctggcagtcagtttgtggtcactgctcaaattgcccatcctgatggtattgctgtggactgggttgcacgaaatctttattggacagacactggcactgatcgaatagaagtgacaaggctcaatgggaccatgaggaagatcttgatttcagaggacttagaggaaccccgggctattgtgttagatcccatggttgggtacatgtattggactgactggggagaaattccgaaaattgagcgagcagctctggatggttctgaccgtgtagtattggttaacacttctcttggttggccaaatggtttagccttggattatgatgaaggcaaaatatactggggagatgccaaaacagacaagattgaggttatgaatactgatggcactgggagacgagtactagtggaagacaaaattcctcacatatttggatttactttgttgggtgactatgtttactggactgactggcagaggcgtagcattgaaagagttcataaacgaagtgcagagagggaagtgatcatagatcagctgcctgacctcatgggcctaaaggctacaaatgttcatcgagtgattggttccaacccctgtgctgaggaaaacgggggatgtagccatctctgcctctatagacctcagggccttcgctgtgcttgccctattggctttgaactcatcagtgacatgaagacctgcattgtcccagaggctttccttttgttttcacggagagcagatatcagacgaatttctctggaaacaaacaataataatgtggctattccactcactggtgtcaaagaagcttctgctttggattttgatgtgacagacaaccgaatttattggactgatatatcactcaagaccatcagcagagcctttatgaatggcagtgcactggaacatgtggtagaattcggcttagattatccagaaggcatggcagtagactggcttgggaagaacttgtactgggcagacacaggaacgaatcgaattgaggtgtcaaagttggatgggcagcaccgacaagttttggtgtggaaagacctagatagtcccagagctctcgcgttggaccctgccgaaggatttatgtattggactgaatggggtggaaaacctaagatagacagagctgcaatggatggaagtgaacgtactaccttagttccaaatgtggggcgggcaaacggcctaactattgattatgctaaaaggaggctttattggacagacctggacaccaacttaatagaatcttcaaatatgcttgggctcaaccgtgaagttatagcagatgacttgcctcatccttttggcttaactcagtaccaagattatatctactggacggactggagccgacgcagcattgagcgtgccaacaaaaccagtggccaaaaccgcaccatcattcagggccatttggattatgtgatggacatcctcgtctttcactcatctcgacagtcagggtggaatgaatgtgcttccagcaatgggcactgctcccacctctgcttggctgtgccagttgggggttttgtttgtggatgccctgcccactactctcttaatgctgacaacaggacttgtagtgctcctacgactttcctgctcttcagtcaaaagagtgccatcaaccgcatggtgattgatgaacaacagagccccgacatcatccttcccatccacagccttcggaatgtccgggccattgactatgacccactggacaagcaactctattggattgactcacgacaaaacatgatccgaaaggcacaagaagatggcagccaggtaattgagagcttggttcaaaattcatttctcctgactaataactggactcaccaaccactctgtttcacttaagtcttgactctgcttaagtgtgtgtgtatgtgtgtatgaaactgaaattatggattcttaatatttctgggagtactttttaatgagagaattgtcaaatttggaaagatttattgagccttaggttacatggacagttaagcttaagtaaactgtatattgattatcaaacacaagctgtaattggaaaagttgagaggaaaagcatgagatcacaaattagggggaaaaaagaaaagggatttttaaatttggtgtattaaattcattgtccaagggggaaaatgaataatgtttcattagattccttatatgcaaaagtatttattttgaacatgtgtcctaaaatatatgcactaactgatgtgattaaaattgtccaagaaataaacttgagcataacatactttgtgtgcaccacagtaagctattctgcattgaagtggtcttttataactaaggcctggactttgctccaacagagtcgtggtcttctgaatagtgacttaaggagttttgtttgcttaagtcagataatagcacattcacagggaaacaaagagagttggtggatagaattttctgactattaatttttcttccatgaaattttattatgcctttggcactttctgccactcttacagcatatcacaagatatctgtttagcagaagattatgtagttactttaattttaatataaaagtagcttgtgatacattaccaagagatctctgattctttagtaagtttgagaacacctattctacagagatgataggtacttagaaatgaagactttaaagtacattttaatctaatataggccagtaattgggggaaggggctttgagcagtacaattttaagatgattttgagggttgtatttctttatcatttaaaaatatcctaaagtcagtaatttatatgaaggaaactcattcattattgaaggtattatgctataaagccctattaatgaagaatacttccagtagagttaatagctgtagcttacctagtgtgttaatgaagtgtgtttatttatgtgacttgataccagtagtcataatagagactgaagaggtatgcgttaagcacgcctacttctatgcagtaaacaggctgcagctgcctagattagattcttagaaatgtcatattttgaattgttttatttcttgtaggggaagctttgtcccacttcattcatttgcatgccataggaattacatattggttatcattacgtatctaacaagattcagaaacaaaaatcttggacttttcacatccgaaatatgtcagctcttaataaatgtgtggtgcttaagtctacatatggcatccatagttgatttagagtatggatatgagtgtgttgaccagttatcagtaggtggacaaatatttgggcatctacagatgagactatgcactaagtgtggactgagtcctaaagaagcttatagtcaggtgttgtttaaaacattatcagaattcttaaacccaaggaatttaattttatttggtatttcttaagcctaaaatgaaccaagagaaagatgattttagaaagtacttgtagtgaaagatgattttagaaagtacttgtagtgcatgtgtggcttctgacttttgggatggcaccattttataatagtttcaaaatttagcttttgaaattctcaacattttatggtagaagactttggacctcaagtataaaattatacgtttataatttttttaaaatttaaattataagtattgtgaattcacactctcaggctattgtctgacttgatctacgtctcataaagcctgtacctgagtggagtggaaggtggagtcttaggttaatcagttactgactctaccctcaccctctttcaattgaggtaaactttgctgtttttctttttcataaagcattctcaaattgttgagtttattgctgaaaaaaatctccatgactttacagatagaattacaaactaaatgatgtcttgtatttagaagcagagtacagacctaacgaactgttagattctccaccatcacttagggtttgcccagaagcaacaccagagaattacagacaacgcgcttttgctgaactgtccattttggtggttgtgtttttcagtcaaatataagcaggatgggcgatagagatatatttatatatagatacatattctatatatctaatgcctaaatatgggtattaaagggaaaatttttaaagtctgattaaatccaatatgacatgaaattaaatatatggattagtaaggaaaaatgttaaaaagatctggtgctgctttcagatgtttatcttttatttttttcccttaagctttaatcttcgtcattgtcttaaagtcaactggtgtttcttgttcattgactttggtacgatggtgctttgcaaggatgtatttatgttataatggccaacatttggtcagcccttgtccacttattcacttccctccttttgtaaaataagtgctttaattataaactgtataaaaataccttgtataaaccccttttttgattattacaataaataagctgaattgtaacaaatgaaatttgatttttgtaataaaacagtggaaaagtaaaaaaaactgtcctttcttttcagc

SEQ ID NO: 441886 - DNA, 4702 bp, Homo sapiens
  misc_feature (4648)..(4648): n is a, c, g, or t
  misc_feature (4657)..(4657): n is a, c, g, or t
  misc_feature (4666)..(4666): n is a, c, g, or t
  misc_feature (4675)..(4675): n is a, c, g, or t
  misc_feature (4686)..(4686): n is a, c, g, or t
  misc_feature (4696)..(4696): n is a, c, g, or t
gcggccgccccggctcctcgcctcccccacttctggccacccctcgccggtgagagaagagaacgcgagaagggaagatgggggccgtcctgaggagcctcctggcctgcagcttctgtgtgctcctgagagcggcccctttgttgctttatgcaaacagacgggacttgcgattggttgatgctacaaatggcaaagagaatgctacgattgtagttggaggcttggaggatgcagctgcggtggactttgtgtttagtcatggcttgatatactggagtgatgtcagcgaagaagccattaaacgaacagaatttaacaaaactgagagtgtgcagaatgttgttgtttctggattattgtcccccgatgggctggcatgtgattggcttggagaaaaattgtactggacagattctgaaactaatcggattgaagtttctaatttagatggatctttacgaaaagttttattttggcaagagttggatcaacccagagctattgccttagatccttcaagtgggttcatgtactggacagactggggagaagtgccaaagatagaacgtgctggaatggatggttcaagtcgcttcattataataaacagtgaaatttactggccaaatggactgactttggattatgaagaacaaaagctttattgggcagatgcaaaacttaatttcatccacaaatcaaatctggatggaacaaatcggcaggcagtggttaaaggttcccttccacatccttttgccttgacgttatttgaggacatattgtactggactgactggagcacacactccattttggcttgcaacaagtatactggtgagggtctgcgtgaaatccattctgacatcttctctcccatggatatacatgccttcagccaacagaggcagccaaatgccacaaatccatgtggaattgacaatgggggttgttcccatttgtgtttgatgtctccagtcaagcctttttatcagtgtgcttgccccactggggtcaaactcctggagaatggaaaaacctgcaaagatggtgccacagaattattgcttttagctcgaaggacagacttgagacgcatttctttggatacaccagattttacagacattgttctgcagttagaagacatccgtcatgccattgccatagattacgatcctgtggaaggctacatctactggactgatgatgaagtgagggccatacgccgttcatttatagatggatctggcagtcagtttgtggtcactgctcaaattgcccatcctgatggtattgctgtggactgggttgcacgaaatctttattggacagacactggcactgatcgaatagaagtgacaaggctcaatgggaccatgaggaagatcttgatttcagaggacttagaggaaccccgggctattgtgttagatcccatggttgggtacatgtattggactgactggggagaaattccgaaaattgagcgagcagctctggatggttctgaccgtgtagtattggttaacacttctcttggttggccaaatggtttagccttggattatgatgaaggcaaaatatactggggagatgccaaaacagacaagattgaggttatgaatactgatggcactgggagacgagtactagtggaagacaaaattcctcacatatttggatttactttgttgggtgactatgtttactggactgactggcagaggcgtagcattgaaagagttcataaacgaagtgcagagagggaagtgatcatagatcagctgcctgacctcatgggcctaaaggctacaaatgttcatcgagtgattggttccaacccctgtgctgaggaaaacgggggatgtagccatctctgcctctatagacctcagggccttcgctgtgcttgccctattggctttgaactcatcagtgacatgaagacctgcattgtcccagaggctttccttttgttttcacggagagcagatatcagacgaatttctctggaaacaaacaataataatgtggctattccactcactggtgtcaaagaagcttctgctttggattttgatgtgacagacaaccgaatttattggactgatatatcactcaagaccatcagcagagcctttatgaatggcagtgcactggaacatgtggtagaattcggcttagattatccagaaggcatggcagtagactggcttgggaagaacttgtactgggcagacacaggaacgaatcgaattgaggtgtcaaagttggatgggcagcaccgacaagttttggtgtggaaagacctagatagtcccagagctctcgcgttggaccctgccgaaggatttatgtattggactgaatggggtggaaaacctaagatagacagagctgcaatggatggaagtgaacgtactaccttagttccaaatgtggggcgggcaaacggcctaactattgattatgctaaaaggaggctttattggacagacctggacaccaacttaatagaatcttcaaatatgcttgggctcaaccgtgaagttatagcagatgacttgcctcatccttttggcttaactcagtaccaagattatatctactggacggactggagccgacgcagcattgagcgtgccaacaaaaccagtggccaaaaccgcaccatcattcagggccatttggattatgtgatggacatcctcgtctttcactcatctcgacagtcagggtggaatgaatgtgcttccagcaatgggcactgctcccacctctgcttggctgtgccagttgggggttttgtttgtggatgccctgcccactactctcttaatgctgacaacaggacttgtagtgctcctacgactttcctgctcttcagtcaaaagagtgccatcaaccgcatggtgattgatgaacaacagagccccgacatcatccttcccatccacagccttcggaatgtccgggccattgactatgacccactggacaagcaactctattggattgactcacgacaaaacatgatccgaaaggcacaagaagatggcagccagggctttactgtggttgtgagctcagttccgagtcagaacctggaaatacaaccctatgacctcagcattgatatttacagccgctacatctactggacttgtgaggctaccaatgtcattaatgtgacaagattagatgggagatcagttggagtggtgctgaaaggcgagcaggacagacctcgagccattgtggtaaacccagagaaagggtatatgtattttaccaatcttcaggaaaggtctcctaaaattgaacgggctgctttggatgggacagaacgggaggtcctctttttcagtggcttaagtaaaccaattgctttagcccttgatagcaggctgggcaagctcttttgggctgattcagatctccggcgaattgaaagcagtgatctctcaggtgctaaccggatagtattagaagactccaatatcttgcagcctgtgggacttactgtgtttgaaaactggctctattggattgataaacagcagcaaatgattgaaaaaattgacatgacaggtcgagagggtagaaccaaagtccaagctcgaattgcccagcttagtgacattcatgcagtaaaggagctgaaccttcaagaatacagacagcacccttgtgctcaggataatggtggctgttcacatatttgtcttgtaaagggggatggtactacaaggtgttcttgccccatgcacctggttctacttcaagatgagctatcatgtggagaacctccaacatgttctcctcagcagtttacttgtttcacgggggaaattgactgtatccctgtggcttggcggtgcgatgggtttactgaatgtgaagaccacagtgatgaactcaattgtcctgtatgctcagagtcccagttccagtgtgccagtgggcagtgtattgatggtgccctccgatgcaatggagatgcaaactgccaggacaaatcagatgagaagaactgtgaagtgctttgtttaattgatcagttccgctgtgccaatggtcagtgcattggaaagcacaagaagtgtgatcataatgtggattgcagtgacaagtcagatgaactggattgttatccgactgaagaaccagcaccacaggccaccaatacagttggttctgttattggcgtaattgtcaccatttttgtgtctggaactgtatactttatctgccagaggatgttgtgtccacgtatgaagggagatggggaaactatgactaatgactatgtagttcatggaccagcttctgtgcctcttggttatgtgccacacccaagttctttgtcaggatctcttccaggaatgtctcgaggtaaatcaatgatcagctccctcagtatcatggggggaagcagtggacccccctatgaccgagcccatgttacaggagcatcatcaagtagttcttcaagcaccaaaggcacttacttccctgcaattttgaaccctccaccatccccagccacagagcgatcacattacactatggaatttggatattcttcaaacagtccttccactcataggtcatacagctacaggccatatagctaccggcnctttacatntcccctccnctcccctgnttaataaactntaaaaatccncttgta

SEQ ID NO: 441887 - DNA, 1038 bp, Homo sapiens
gcggccgccccggctcctcgcctcccccacttctggccacccctcgccggtgagagaagagaacgcgagaagggaagatgggggccgtcctgaggagcctcctggcctgcagcttctgtgtgctcctgagagcggcccctttgttgctttatgcaaacagacgggacttgcgattggttgatgctacaaatggcaaagagaatgctacgattgtagttggaggcttggaggatgcagctgcggtggactttgtgtttagtcatggcttgatatactggagtgatgtcagcgaagaagccattaaacgaacagaatttaacaaaactgagagtgtgcagaatgttgttgtttctggattattgtcccccgatgggctggcatgtgattggcttggagaaaaattgtactggacagattctgaaactaatcggattgaagtttctaatttagatggatctttacgaaaagttttattttggcaagagttggatcaacccagagctattgccttagatccttcaagtgggttcatgtactggacagactggggagaagtgccaaagatagaacgtgctggaatggatggttcaagtcgcttcattataataaacagtgaaatttactggccaaatggactgactttggattatgaagaacaaaagctttattgggcagatgcaaaacttaatttcatccacaaatcaaatctggatggaacaaatcggcaggcagtggttaaaggttcccttccacatccttttgccttgacgttatttgaggacatattgtactggactgactggagcacacactccattttggcttgcaacaagtatactggtgagggtctgcgtgaaatccattctgacatcttctctcccatggatatacatgccttcagccaacagaggcagccaaatggtaagtgatccttgatttttaaattgcaagttggaacagctttgtagcactctaatgtctggctttagtgaggatcaggaggagggagggcatatccaaagatagttggcgggaata

SEQ ID NO: 441888 - DNA, 203 bp, Homo sapiens
caaagatagaacgtgctggaatggatggttcaagtcgcttcattataataaacagtgaaatttactggccaaatggactgactttggattatgaagaacaaaagctttattgggcagatgcaaaacttaatttcatccacaaatcaaatctggatggaacaaatcggtaagattacaagaattagaaaaaacttttaagaaaa

SEQ ID NO: 441889 - DNA, 579 bp, Homo sapiens
cctaaaacagacaagcatgaactcttcccattgctggaactaagtgcccacagtgtcagacaaaatggacattgaacttggattctgtgatacacagggcacttgatgcttaaatgaagatggaaaggttagcaatacctgggtgtcagttagaatttgagaattctatatgtttacatatttaaatgtgcatcttgatctggtgggcttcccatgtggagacttgcactctaattaactaagaagaatattgccttgttggatctcagtccacgtgcttgcactgcgatggcaatggcctcttcttcaaaatactaatttgtgtgccaatttgtttaaaattatttgaaggcagttcagcctaatctcagtgttctctttctggggtagatgagatggattcttaatatttctgggagtactttttaatgagagaattgtcaaatttggaaagatttattgagccttaggttacatggacagttaagcttaagtaaactgtatattgattatcaaacacaagctgtaattggaaaagttgagaggaaaagcatgagatcacaaattagggggaaaaaa

SEQ ID NO: 441890 - DNA, 5862 bp, Homo sapiens
gcggccgccccggctcctcgcctcccccacttctggccacccctcgccggtgagagaagagaacgcgagaagggaagatgggggccgtcctgaggagcctcctggcctgcagcttctgtgtgctcctgagagcggcccctttgttgctttatgcaaacagacgggacttgcgattggttgatgctacaaatggcaaagagaatgctacgattgtagttggaggcttggaggatgcagctgcggtggactttgtgtttagtcatggcttgatatactggagtgatgtcagcgaagaagccattaaacgaacagaatttaacaaaactgagagtgtgcagaatgttgttgtttctggattattgtcccccgatgggctggcatgtgattggcttggagaaaaattgtactggacagattctgaaactaatcggattgaagtttctaatttagatggatctttacgaaaagttttattttggcaagagttggatcaacccagagctattgccttagatccttcaagtgggttcatgtactggacagactggggagaagtgccaaagatagaacgtgctggaatggatggttcaagtcgcttcattataataaacagtgaaatttactggccaaatggactgactttggattatgaagaacaaaagctttattgggcagatgcaaaacttaatttcatccacaaatcaaatctggatggaacaaatcggcaggcagtggttaaaggttcccttccacatccttttgccttgacgttatttgaggacatattgtactggactgactggagcacacactccattttggcttgcaacaagtatactggtgagggtctgcgtgaaatccattctgacatcttctctcccatggatatacatgccttcagccaacagaggcagccaaatgccacaaatccatgtggaattgacaatgggggttgttcccatttgtgtttgatgtctccagtcaagcctttttatcagtgtgcttgccccactggggtcaaactcctggagaatggaaaaacctgcaaagatggtgccacagaattattgcttttagctcgaaggacagacttgagacgcatttctttggatacaccagattttacagacattgttctgcagttagaagacatccgtcatgccattgccatagattacgatcctgtggaaggctacatctactggactgatgatgaagtgagggccatacgccgttcatttatagatggatctggcagtcagtttgtggtcactgctcaaattgcccatcctgatggtattgctgtggactgggttgcacgaaatctttattggacagacactggcactgatcgaatagaagtgacaaggctcaatgggaccatgaggaagatcttgatttcagaggacttagaggaaccccgggctattgtgttagatcccatggttgggtacatgtattggactgactggggagaaattccgaaaattgagcgagcagctctggatggttctgaccgtgtagtattggttaacacttctcttggttggccaaatggtttagccttggattatgatgaaggcaaaatatactggggagatgccaaaacagacaagattgaggttatgaatactgatggcactgggagacgagtactagtggaagacaaaattcctcacatatttggatttactttgttgggtgactatgtttactggactgactggcagaggcgtagcattgaaagagttcataaacgaagtgcagagagggaagtgatcatagatcagctgcctgacctcatgggcctaaaggctacaaatgttcatcgagtgattggttccaacccctgtgctgaggaaaacgggggatgtagccatctctgcctctatagacctcagggccttcgctgtgcttgccctattggctttgaactcatcagtgacatgaagacctgcattgtcccagaggctttccttttgttttcacggagagcagatatcagacgaatttctctggaaacaaacaataataatgtggctattccactcactggtgtcaaagaagcttctgctttggattttgatgtgacagacaaccgaatttattggactgatatatcactcaagaccatcagcagagcctttatgaatggcagtgcactggaacatgtggtagaattcggcttagattatccagaaggcatggcagtagactggcttgggaagaacttgtactgggcagacacaggaacgaatcgaattgaggtgtcaaagttggatgggcagcaccgacaagttttggtgtggaaagacctagatagtcccagagctctcgcgttggaccctgccgaaggatttatgtattggactgaatggggtggaaaacctaagatagacagagctgcaatggatggaagtgaacgtactaccttagttccaaatgtggggcgggcaaacggcctaactattgattatgctaaaaggaggctttattggacagacctggacaccaacttaatagaatcttcaaatatgcttgggctcaaccgtgaagttatagcagatgacttgcctcatccttttggcttaactcagtaccaagattatatctactggacggactggagccgacgcagcattgagcgtgccaacaaaaccagtggccaaaaccgcaccatcattcagggccatttggattatgtgatggacatcctcgtctttcactcatctcgacagtcagggtggaatgaatgtgcttccagcaatgggcactgctcccacctctgcttggctgtgccagttgggggttttgtttgtggatgccctgcccactactctcttaatgctgacaacaggacttgtagtgctcctacgactttcctgctcttcagtcaaaagagtgccatcaaccgcatggtgattgatgaacaacagagccccgacatcatccttcccatccacagccttcggaatgtccgggccattgactatgacccactggacaagcaactctattggattgactcacgacaaaacatgatccgaaaggcacaagaagatggcagccaggtaattgagagcttggttcaaaattcatttctcctgactaataactggactcaccaaccactctgtttcacttaagtcttgactctgcttaagtgtgtgtgtatgtgtgtatgaaactgaaattatggattcttaatatttctgggagtactttttaatgagagaattgtcaaatttggaaagatttattgagccttaggttacatggacagttaagcttaagtaaactgtatattgattatcaaacacaagctgtaattggaaaagttgagaggaaaagcatgagatcacaaattagggggaaaaaagaaaagggatttttaaatttggtgtattaaattcattgtccaagggggaaaatgaataatgtttcattagattccttatatgcaaaagtatttattttgaacatgtgtcctaaaatatatgcactaactgatgtgattaaaattgtccaagaaataaacttgagcataacatactttgtgtgcaccacagtaagctattctgcattgaagtggtcttttataactaaggcctggactttgctccaacagagtcgtggtcttctgaatagtgacttaaggagttttgtttgcttaagtcagataatagcacattcacagggaaacaaagagagttggtggatagaattttctgactattaatttttcttccatgaaattttattatgcctttggcactttctgccactcttacagcatatcacaagatatctgtttagcagaagattatgtagttactttaattttaatataaaagtagcttgtgatacattaccaagagatctctgattctttagtaagtttgagaacacctattctacagagatgataggtacttagaaatgaagactttaaagtacattttaatctaatataggccagtaattgggggaaggggctttgagcagtacaattttaagatgattttgagggttgtatttctttatcatttaaaaatatcctaaagtcagtaatttatatgaaggaaactcattcattattgaaggtattatgctataaagccctattaatgaagaatacttccagtagagttaatagctgtagcttacctagtgtgttaatgaagtgtgtttatttatgtgacttgataccagtagtcataatagagactgaagaggtatgcgttaagcacgcctacttctatgcagtaaacaggctgcagctgcctagattagattcttagaaatgtcatattttgaattgttttatttcttgtaggggaagctttgtcccacttcattcatttgcatgccataggaattacatattggttatcattacgtatctaacaagattcagaaacaaaaatcttggacttttcacatccgaaatatgtcagctcttaataaatgtgtggtgcttaagtctacatatggcatccatagttgatttagagtatggatatgagtgtgttgaccagttatcagtaggtggacaaatatttgggcatctacagatgagactatgcactaagtgtggactgagtcctaaagaagcttatagtcaggtgttgtttaaaacattatcagaattcttaaacccaaggaatttaattttatttggtatttcttaagcctaaaatgaaccaagagaaagatgattttagaaagtacttgtagtgaaagatgattttagaaagtacttgtagtgcatgtgtggcttctgacttttgggatggcaccattttataatagtttcaaaatttagcttttgaaattctcaacattttatggtagaagactttggacctcaagtataaaattatacgtttataatttttttaaaatttaaattataagtattgtgaattcacactctcaggctattgtctgacttgatctacgtctcataaagcctgtacctgagtggagtggaaggtggagtcttaggttaatcagttactgactctaccctcaccctctttcaattgaggtaaactttgctgtttttctttttcataaagcattctcaaattgttgagtttattgctgaaaaaaatctccatgactttacagatagaattacaaactaaatgatgtcttgtatttagaagcagagtacagacctaacgaactgttagattctccaccatcacttagggtttgcccagaagcaacaccagagaattacagacaacgcgcttttgctgaactgtccattttggtggttgtgtttttcagtcaaatataagcaggatgggcgatagagatatatttatatatagatacatattctatatatctaatgcctaaatatgggtattaaagggaaaatttttaaagtctgattaaatccaatatgacatgaaattaaatatatggattagtaaggaaaaatgttaaaaagtagagaggataccaagaagattaaactggactagccttatttgcaagtgaaggatctggtgctgctttcagatgtttatcttttatttttttcccttaagctttaatcttcgtcattgtcttaaagtcaactggtgtttcttgttcattgactttggtacgatggtgctttgcaaggatgtatttatgttataatggccaacatttggtcagcccttgtccacttattcacttccctccttttgtaaaataagtgctttaattataaactgtataaaaataccttgtataaaccccttttttgattattacaataaataagctgaattgtaacaaatgaaatttgatttttgtaataaaacagtggaaaagtaaaaaaaactgtcctttcttttcagc

SEQ ID NO: 441891 - DNA, 5862 bp, Homo sapiens
gcggccgccccggctcctcgcctcccccacttctggccacccctcgccggtgagagaagagaacgcgagaagggaagatgggggccgtcctgaggagcctcctggcctgcagcttctgtgtgctcctgagagcggcccctttgttgctttatgcaaacagacgggacttgcgattggttgatgctacaaatggcaaagagaatgctacgattgtagttggaggcttggaggatgcagctgcggtggactttgtgtttagtcatggcttgatatactggagtgatgtcagcgaagaagccattaaacgaacagaatttaacaaaactgagagtgtgcagaatgttgttgtttctggattattgtcccccgatgggctggcatgtgattggcttggagaaaaattgtactggacagattctgaaactaatcggattgaagtttctaatttagatggatctttacgaaaagttttattttggcaagagttggatcaacccagagctattgccttagatccttcaagtgggttcatgtactggacagactggggagaagtgccaaagatagaacgtgctggaatggatggttcaagtcgcttcattataataaacagtgaaatttactggccaaatggactgactttggattatgaagaacaaaagctttattgggcagatgcaaaacttaatttcatccacaaatcaaatctggatggaacaaatcggcaggcagtggttaaaggttcccttccacatccttttgccttgacgttatttgaggacatattgtactggactgactggagcacacactccattttggcttgcaacaagtatactggtgagggtctgcgtgaaatccattctgacatcttctctcccatggatatacatgccttcagccaacagaggcagccaaatgccacaaatccatgtggaattgacaatgggggttgttcccatttgtgtttgatgtctccagtcaagcctttttatcagtgtgcttgccccactggggtcaaactcctggagaatggaaaaacctgcaaagatggtgccacagaattattgcttttagctcgaaggacagacttgagacgcatttctttggatacaccagattttacagacattgttctgcagttagaagacatccgtcatgccattgccatagattacgatcctgtggaaggctacatctactggactgatgatgaagtgagggccatacgccgttcatttatagatggatctggcagtcagtttgtggtcactgctcaaattgcccatcctgatggtattgctgtggactgggttgcacgaaatctttattggacagacactggcactgatcgaatagaagtgacaaggctcaatgggaccatgaggaagatcttgatttcagaggacttagaggaaccccgggctattgtgttagatcccatggttgggtacatgtattggactgactggggagaaattccgaaaattgagcgagcagctctggatggttctgaccgtgtagtattggttaacacttctcttggttggccaaatggtttagccttggattatgatgaaggcaaaatatactggggagatgccaaaacagacaagattgaggttatgaatactgatggcactgggagacgagtactagtggaagacaaaattcctcacatatttggatttactttgttgggtgactatgtttactggactgactggcagaggcgtagcattgaaagagttcataaacgaagtgcagagagggaagtgatcatagatcagctgcctgacctcatgggcctaaaggctacaaatgttcatcgagtgattggttccaacccctgtgctgaggaaaacgggggatgtagccatctctgcctctatagacctcagggccttcgctgtgcttgccctattggctttgaactcatcagtgacatgaagacctgcattgtcccagaggctttccttttgttttcacggagagcagatatcagacgaatttctctggaaacaaacaataataatgtggctattccactcactggtgtcaaagaagcttctgctttggattttgatgtgacagacaaccgaatttattggactgatatatcactcaagaccatcagcagagcctttatgaatggcagtgcactggaacatgtggtagaattcggcttagattatccagaaggcatggcagtagactggcttgggaagaacttgtactgggcagacacaggaacgaatcgaattgaggtgtcaaagttggatgggcagcaccgacaagttttggtgtggaaagacctagatagtcccagagctctcgcgttggaccctgccgaaggatttatgtattggactgaatggggtggaaaacctaagatagacagagctgcaatggatggaagtgaacgtactaccttagttccaaatgtggggcgggcaaacggcctaactattgattatgctaaaaggaggctttattggacagacctggacaccaacttaatagaatcttcaaatatgcttgggctcaaccgtgaagttatagcagatgacttgcctcatccttttggcttaactcagtaccaagattatatctactggacggactggagccgacgcagcattgagcgtgccaacaaaaccagtggccaaaaccgcaccatcattcagggccatttggattatgtgatggacatcctcgtctttcactcatctcgacagtcagggtggaatgaatgtgcttccagcaatgggcactgctcccacctctgcttggctgtgccagttgggggttttgtttgtggatgccctgcccactactctcttaatgctgacaacaggacttgtagtgctcctacgactttcctgctcttcagtcaaaagagtgccatcaaccgcatggtgattgatgaacaacagagccccgacatcatccttcccatccacagccttcggaatgtccgggccattgactatgacccactggacaagcaactctattggattgactcacgacaaaacatgatccgaaaggcacaagaagatggcagccaggtaattgagagcttggttcaaaattcatttctcctgactaataactggactcaccaaccactctgtttcacttaagtcttgactctgcttaagtgtgtgtgtatgtgtgtatgaaactgaaattatggattcttaatatttctgggagtactttttaatgagagaattgtcaaatttggaaagatttattgagccttaggttacatggacagttaagcttaagtaaactgtatattgattatcaaacacaagctgtaattggaaaagttgagaggaaaagcatgagatcacaaattagggggaaaaaagaaaagggatttttaaatttggtgtattaaattcattgtccaagggggaaaatgaataatgtttcattagattccttatatgcaaaagtatttattttgaacatgtgtcctaaaatatatgcactaactgatgtgattaaaattgtccaagaaataaacttgagcataacatactttgtgtgcaccacagtaagctattctgcattgaagtggtcttttataactaaggcctggactttgctccaacagagtcgtggtcttctgaatagtgacttaaggagttttgtttgcttaagtcagataatagcacattcacagggaaacaaagagagttggtggatagaattttctgactattaatttttcttccatgaaattttattatgcctttggcactttctgccactcttacagcatatcacaagatatctgtttagcagaagattatgtagttactttaattttaatataaaaacctattctacagagatgataggtacttagaaatgaagactttaaagtacattttaatctaatataggccagtaattgggggaaggggctttgagcagtacaattttaagatgattttgagggttgtatttctttatcatttaaaaatatcctaaagtcagtaatttatatgaaggaaactcattcattattgaaggtattaaaaatagccatcatctgtattaggtagcagttttggaggatcatctttttcttttgctataaagccctattaatgaagaatacttccagtagagttaatagctgtagcttacctagtgtgttaatgaagtgtgtttatttatgtgacttgataccagtagtcataatagagactgaagaggtatgcgttaagcacgcctacttctatgcagtaaacaggctgcagctgcctagattagattcttagaaatgtcatattttgaattgttttatttcttgtaggggaagctttgtcccacttcattcatttgcatgccataggaattacatattggttatcattacgtatctaacaagattcagaaacaaaaatcttggacttttcacatccgaaatatgtcagctcttaataaatgtgtggtgcttaagtctacatatggcatccatagttgatttagagtatggatatgagtgtgttgaccagttatcagtaggtggacaaatatttgggcatctacagatgagactatgcactaagtgtggactgagtcctaaagaagcttatagtcaggtgttgtttaaaacattatcagaattcttaaacccaaggaatttaattttatttggtatttcttaagcctaaaatgaaccaagagaaagatgattttagaaagtacttgtagtgaaagatgattttagaaagtacttgtagtgcatgtgtggcttctgacttttgggatggcaccattttataatagtttcaaaatttagcttttgaaattctcaacattttatggtagaagactttggacctcaagtataaaattatacgtttataatttttttaaaatttaaattataagtattgtgaattcacactctcaggctattgtctgacttgatctacgtctcataaagcctgtacctgagtggagtggaaggtggagtcttaggttaatcagttactgactctaccctcaccctctttcaattgaggtaaactttgctgtttttctttttcataaagcattctcaaattgttgagtttattgctgaaaaaaatctccatgactttacagatagaattacaaactaaatgatgtcttgtatttagaagcagagtacagacctaacgaactgttagattctccaccatcacttagggtttgcccagaagcaacaccagagaattacagacaacgcgcttttgctgaactgtccattttggtggttgtgtttttcagtcaaatataagcaggatgggcgatagagatatatttatatatagatacatattctatatatctaatgcctaaatatgggtattaaagggaaaatttttaaagtctgattaaatccaatatgacatgaaattaaatatatggattagtaaggaaaaatgttaaaaagtagagaggataccaagaagattaaactggactagccttatttgcaagtgaaggatctggtgctgctttcagatgtttatcttttatttttttcccttaagctttaatcttcgtcattgtcttaaagtcaactggtgtttcttgttcattgactttggtacgatggtgctttgcaaggatgtatttatgttataatggccaacatttggtcagcccttgtccacttattcacttccctccttttgtaaaataagtgctttaattataaactgtataaaaataccttgtataaaccccttttttgattattacaataaataagctgaattgtaacaaatgaaatttgatttttgtaataaaacagtggaaaagtaaaaaaaactgtcctttcttttcagc

SEQ ID NO: 441892 - DNA, 5468 bp, Homo sapiens
gcggccgccccggctcctcgcctcccccacttctggccacccctcgccggtgagagaagagaacgcgagaagggaagatgggggccgtcctgaggagcctcctggcctgcagcttctgtgtgctcctgagaggttcatgtactggacagactggggagaagtgccaaagatagaacgtgctggaatggatggttcaagtcgcttcattataataaacagtgaaatttactggccaaatggactgactttggattatgaagaacaaaagctttattgggcagatgcaaaacttaatttcatccacaaatcaaatctggatggaacaaatcggcaggcagtggttaaaggttcccttccacatccttttgccttgacgttatttgaggacatattgtactggactgactggagcacacactccattttggcttgcaacaagtatactggtgagggtctgcgtgaaatccattctgacatcttctctcccatggatatacatgccttcagccaacagaggcagccaaatgccacaaatccatgtggaattgacaatgggggttgttcccatttgtgtttgatgtctccagtcaagcctttttatcagtgtgcttgccccactggggtcaaactcctggagaatggaaaaacctgcaaagatggtgccacagaattattgcttttagctcgaaggacagacttgagacgcatttctttggatacaccagattttacagacattgttctgcagttagaagacatccgtcatgccattgccatagattacgatcctgtggaaggctacatctactggactgatgatgaagtgagggccatacgccgttcatttatagatggatctggcagtcagtttgtggtcactgctcaaattgcccatcctgatggtattgctgtggactgggttgcacgaaatctttattggacagacactggcactgatcgaatagaagtgacaaggctcaatgggaccatgaggaagatcttgatttcagaggacttagaggaaccccgggctattgtgttagatcccatggttgggtacatgtattggactgactggggagaaattccgaaaattgagcgagcagctctggatggttctgaccgtgtagtattggttaacacttctcttggttggccaaatggtttagccttggattatgatgaaggcaaaatatactggggagatgccaaaacagacaagattgaggttatgaatactgatggcactgggagacgagtactagtggaagacaaaattcctcacatatttggatttactttgttgggtgactatgtttactggactgactggcagaggcgtagcattgaaagagttcataaacgaagtgcagagagggaagtgatcatagatcagctgcctgacctcatgggcctaaaggctacaaatgttcatcgagtgattggttccaacccctgtgctgaggaaaacgggggatgtagccatctctgcctctatagacctcagggccttcgctgtgcttgccctattggctttgaactcatcagtgacatgaagacctgcattgtcccagaggctttccttttgttttcacggagagcagatatcagacgaatttctctggaaacaaacaataataatgtggctattccactcactggtgtcaaagaagcttctgctttggattttgatgtgacagacaaccgaatttattggactgatatatcactcaagaccatcagcagagcctttatgaatggcagtgcactggaacatgtggtagaattcggcttagattatccagaaggcatggcagtagactggcttgggaagaacttgtactgggcagacacaggaacgaatcgaattgaggtgtcaaagttggatgggcagcaccgacaagttttggtgtggaaagacctagatagtcccagagctctcgcgttggaccctgccgaaggatttatgtattggactgaatggggtggaaaacctaagatagacagagctgcaatggatggaagtgaacgtactaccttagttccaaatgtggggcgggcaaacggcctaactattgattatgctaaaaggaggctttattggacagacctggacaccaacttaatagaatcttcaaatatgcttgggctcaaccgtgaagttatagcagatgacttgcctcatccttttggcttaactcagtaccaagattatatctactggacggactggagccgacgcagcattgagcgtgccaacaaaaccagtggccaaaaccgcaccatcattcagggccatttggattatgtgatggacatcctcgtctttcactcatctcgacagtcagggtggaatgaatgtgcttccagcaatgggcactgctcccacctctgcttggctgtgccagttgggggttttgtttgtggatgccctgcccactactctcttaatgctgacaacaggacttgtagtgctcctacgactttcctgctcttcagtcaaaagagtgccatcaaccgcatggtgattgatgaacaacagagccccgacatcatccttcccatccacagccttcggaatgtccgggccattgactatgacccactggacaagcaactctattggattgactcacgacaaaacatgatccgaaaggcacaagaagatggcagccaggtaattgagagcttggttcaaaattcatttctcctgactaataactggactcaccaaccactctgtttcacttaagtcttgactctgcttaagtgtgtgtgtatgtgtgtatgaaactgaaattatggattcttaatatttctgggagtactttttaatgagagaattgtcaaatttggaaagatttattgagccttaggttacatggacagttaagcttaagtaaactgtatattgattatcaaacacaagctgtaattggaaaagttgagaggaaaagcatgagatcacaaattagggggaaaaaagaaaagggatttttaaatttggtgtattaaattcattgtccaagggggaaaatgaataatgtttcattagattccttatatgcaaaagtatttattttgaacatgtgtcctaaaatatatgcactaactgatgtgattaaaattgtccaagaaataaacttgagcataacatactttgtgtgcaccacagtaagctattctgcattgaagtggtcttttataactaaggcctggactttgctccaacagagtcgtggtcttctgaatagtgacttaaggagttttgtttgcttaagtcagataatagcacattcacagggaaacaaagagagttggtggatagaattttctgactattaatttttcttccatgaaattttattatgcctttggcactttctgccactcttacagcatatcacaagatatctgtttagcagaagattatgtagttactttaattttaatataaaagtagcttgtgatacattaccaagagatctctgattctttagtaagtttgagaacacctattctacagagatgataggtacttagaaatgaagactttaaagtacattttaatctaatataggccagtaattgggggaaggggctttgagcagtacaattttaagatgattttgagggttgtatttctttatcatttaaaaatatcctaaagtcagtaatttatatgaaggaaactcattcattattgaaggtattatgctataaagccctattaatgaagaatacttccagtagagttaatagctgtagcttacctagtgtgttaatgaagtgtgtttatttatgtgacttgataccagtagtcataatagagactgaagaggtatgcgttaagcacgcctacttctatgcagtaaacaggctgcagctgcctagattagattcttagaaatgtcatattttgaattgttttatttcttgtaggggaagctttgtcccacttcattcatttgcatgccataggaattacatattggttatcattacgtatctaacaagattcagaaacaaaaatcttggacttttcacatccgaaatatgtcagctcttaataaatgtgtggtgcttaagtctacatatggcatccatagttgatttagagtatggatatgagtgtgttgaccagttatcagtaggtggacaaatatttgggcatctacagatgagactatgcactaagtgtggactgagtcctaaagaagcttatagtcaggtgttgtttaaaacattatcagaattcttaaacccaaggaatttaattttatttggtatttcttaagcctaaaatgaaccaagagaaagatgattttagaaagtacttgtagtgaaagatgattttagaaagtacttgtagtgcatgtgtggcttctgacttttgggatggcaccattttataatagtttcaaaatttagcttttgaaattctcaacattttatggtagaagactttggacctcaagtataaaattatacgtttataatttttttaaaatttaaattataagtattgtgaattcacactctcaggctattgtctgacttgatctacgtctcataaagcctgtacctgagtggagtggaaggtggagtcttaggttaatcagttactgactctaccctcaccctctttcaattgaggtaaactttgctgtttttctttttcataaagcattctcaaattgttgagtttattgctgaaaaaaatctccatgactttacagatagaattacaaactaaatgatgtcttgtatttagaagcagagtacagacctaacgaactgttagattctccaccatcacttagggtttgcccagaagcaacaccagagaattacagacaacgcgcttttgctgaactgtccattttggtggttgtgtttttcagtcaaatataagcaggatgggcgatagagatatatttatatatagatacatattctatatatctaatgcctaaatatgggtattaaagggaaaatttttaaagtctgattaaatccaatatgacatgaaattaaatatatggattagtaaggaaaaatgttaaaaagtagagaggataccaagaagattaaactggactagccttatttgcaagtgaaggatctggtgctgctttcagatgtttatcttttatttttttcccttaagctttaatcttcgtcattgtcttaaagtcaactggtgtttcttgttcattgactttggtacgatggtgctttgcaaggatgtatttatgttataatggccaacatttggtcagcccttgtccacttattcacttccctccttttgtaaaataagtgctttaattataaactgtataaaaataccttgtataaaccccttttttgattattacaataaataagctgaattgtaacaaatgaaatttgatttttgtaataaaacagtggaaaagtaaaaaaaactgtcctttcttttcagc

SEQ ID NO: 441893 - DNA, 4367 bp, Homo sapiens
gcggccgccccggctcctcgcctcccccacttctggccacccctcgccggtgagagaagagaacgcgagaagggaagatgggggccgtcctgaggagcctcctggcctgcagcttctgtgtgctcctgagagcggcccctttgttgctttatgcaaacagacgggacttgcgattggttgatgctacaaatggcaaagagaatgctacgattgtagttggaggcttggaggatgcagctgcggtggactttgtgtttagtcatggcttgatatactggagtgatgtcagcgaagaagccattaaacgaacagaatttaacaaaactgagagtgtgcagaatgttgttgtttctggattattgtcccccgatgggctggcatgtgattggcttggagaaaaattgtactggacagattctgaaactaatcggattgaagtttctaatttagatggatctttacgaaaagttttattttggcaagagttggatcaacccagagctattgccttagatccttcaagtgggttcatgtactggacagactggggagaagtgccaaagatagaacgtgctggaatggatggttcaagtcgcttcattataataaacagtgaaatttactggccaaatggactgactttggattatgaagaacaaaagctttattgggcagatgcaaaacttaatttcatccacaaatcaaatctggatggaacaaatcggcaggcagtggttaaaggttcccttccacatccttttgccttgacgttatttgaggacatattgtactggactgactggagcacacactccattttggcttgcaacaagtatactggtgagggtctgcgtgaaatccattctgacatcttctctcccatggatatacatgccttcagccaacagaggcagccaaatgccacaaatccatgtggaattgacaatgggggttgttcccatttgtgtttgatgtctccagtcaagcctttttatcagtgtgcttgccccactggggtcaaactcctggagaatggaaaaacctgcaaagatggtgccacagaattattgcttttagctcgaaggacagacttgagacgcatttctttggatacaccagattttacagacattgttctgcagttagaagacatccgtcatgccattgccatagattacgatcctgtggaaggctacatctactggactgatgatgaagtgagggccatacgccgttcatttatagatggatctggcagtcagtttgtggtcactgctcaaattgcccatcctgatggtattgctgtggactgggttgcacgaaatctttattggacagacactggcactgatcgaatagaagtgacaaggctcaatgggaccatgaggaagatcttgatttcagaggacttagaggaaccccgggctattgtgttagatcccatggttgggtacatgtattggactgactggggagaaattccgaaaattgagcgagcagctctggatggttctgaccgtgtagtattggttaacacttctcttggttggccaaatggtttagccttggattatgatgaaggcaaaatatactggggagatgccaaaacagacaagattgaggttatgaatactgatggcactgggagacgagtactagtggaagacaaaattcctcacatatttggatttactttgttgggtgactatgtttactggactgactggcagaggcgtagcattgaaagagttcataaacgaagtgcagagagggaagtgatcatagatcagctgcctgacctcatgggcctaaaggctacaaatgttcatcgagtgattggttccaacccctgtgctgaggaaaacgggggatgtagccatctctgcctctatagacctcagggccttcgctgtgcttgccctattggctttgaactcatcagtgacatgaagacctgcattgtcccagaggctttccttttgttttcacggagagcagatatcagacgaatttctctggaaacaaacaataataatgtggctattccactcactggtgtcaaagaagcttctgctttggattttgatgtgacagacaaccgaatttattggactgatatatcactcaagaccatcagcagagcctttatgaatggcagtgcactggaacatgtggtagaattcggcttagattatccagaaggcatggcagtagactggcttgggaagaacttgtactgggcagacacaggaacgaatcgaattgaggtgtcaaagttggatgggcagcaccgacaagttttggtgtggaaagacctagatagtcccagagctctcgcgttggaccctgccgaaggatttatgtattggactgaatggggtggaaaacctaagatagacagagctgcaatggatggaagtgaacgtactaccttagttccaaatgtggggcgggcaaacggcctaactattgattatgctaaaaggaggctttattggacagacctggacaccaacttaatagaatcttcaaatatgcttgggctcaaccgtgaagttatagcagatgacttgcctcatccttttggcttaactcagtaccaagattatatctactggacggactggagccgacgcagcattgagcgtgccaacaaaaccagtggccaaaaccgcaccatcattcagggccatttggattatgtgatggacatcctcgtctttcactcatctcgacagtcagggtggaatgaatgtgcttccagcaatgggcactgctcccacctctgcttggctgtgccagttgggggttttgtttgtggatgccctgcccactactctcttaatgctgacaacaggacttgtagtgctcctacgactttcctgctcttcagtcaaaagagtgccatcaaccgcatggtgattgatgaacaacagagccccgacatcatccttcccatccacagccttcggaatgtccgggccattgactatgacccactggacaagcaactctattggattgactcacgacaaaacatgatccgaaaggcacaagaagatggcagccagggctttactgtggttgtgagctcagttccgagtcagaacctggaaatacaaccctatgacctcagcattgatatttacagccgctacatctactggacttgtgaggctaccaatgtcattaatgtgacaagattagatgggagatcagttggagtggtgctgaaaggcgagcaggacagacctcgagccattgtggtaaacccagagaaagggtatatgtattttaccaatcttcaggaaaggtctcctaaaattgaacgggctgctttggatgggacagaacgggaggtcctctttttcagtggcttaagtaaaccaattgctttagcccttgatagcaggctgggcaagctcttttgggctgattcagatctccggcgaattgaaagcagtgatctctcaggtgctaaccggatagtattagaagactccaatatcttgcagcctgtgggacttactgtgtttgaaaactggctctattggattgataaacagcagcaaatgattgaaaaaattgacatgacaggtcgagagggtagaaccaaagtccaagctcgaattgcccagcttagtgacattcatgcagtaaaggagctgaaccttcaagaatacagacagcacccttgtgctcaggataatggtggctgttcacatatttgtcttgtaaagggggatggtactacaaggtgttcttgccccatgcacctggttctacttcaagatgagctatcatgtggagaacctccaacatgttctcctcagcagtttacttgtttcacgggggaaattgactgtatccctgtggcttggcggtgcgatgggtttactgaatgtgaagaccacagtgatgaactcaattgtcctgtatgctcagagtcccagttccagtgtgccagtgggcagtgtattgatggtgccctccgatgcaatggagatgcaaactgccaggacaaatcagatgagaagaactgtgaagtgctttgtttaattgatcagttccgctgtgccaatggtcagtgcattggaaagcacaagaagtgtgatcataatgtggattgcagtgacaagtcagatgaactggattgttatccgactgaagaaccagcaccacaggccaccaatacagttggttctgttattggcgtaattgtcaccatttttgtgtctggaactgtatactttatctgccagaggatgttgtgtccacgtatgaagggagatggggccaacattaatgtcggcccatgcaacaacagggagctcactcaggggtttgatgtggtggatgctggctcg

SEQ ID NO: 441894 - DNA, 362 bp, Homo sapiens
gactttgtgtttagtcatggcttgatatactggagtgatgtcagcgaagaagccattaaacgaacagaatttaacaaaactgagagtgtgcagaatgttgttgtttctggattattgtcccccgatgggctggcatgtgattggcttggagaaaaattgtactggacagattctgaaactaatcggattgaagtttctaatttagatggatctttacgaaaagttttattttggcaagagttggatcaacccagagctattgccttagatccttcaagtgggtaagtttttgtacagtgtacgaagatcatcatacctcctttcggtttttctccactgacatacaccaccctgacccctat

SEQ ID NO: 441895 - DNA, 946 bp, Homo sapiens
agaatggcttcggctcctttcgccgccggtattctggtgtatatgatcccactctcactctcataggagacgatctcgaagtagatcatatacaccagaataccggcggcgaaggagccgaagctcaagggtaaagacagtagaaatattattcagtaaacaataatgtgtgaacttttaagatggataatagggcatggactgagtgctgctatcttgaaatgtgcacaggtacacttaccttttttttttttttttttaagtttttcccattcaggataacaacattgtgatctgtactacaggaaccaaatgtcatgcgtcatacatgtggctataaagtacataaaatatatctaactattcataatgtggggtgggtaatactgctgtgaaataatgtaagaagcttttcacttaaaaaaaatgcattactttcacttaacactagacaccaggtcgaaaattttcaaggttatagtacttatttcaacaattcttagagatgctagctagtgttgaagctaaaaatagctttatttatgctgaattgtgatttttttatgccaaaatttttttagttctaatcattgatgatagcttggaaataaataattatgccatggcatttgacagttcattattcctataagaattaaattgagtttagagagaatggtggtgttgagctgattattaacagttactgaaatcaaataatattatttgttacattattccatttgtattttaggtttccttttacattcttttatatgcattctgacattacatattttttaagactatggaaataatttaaagatttaagctctggtggatgattatctgctaagtaagtctgaaaatgtaatattttgataatactgtaatatacctgtcacacaaatgcttttctaatgtattaaccttgagtattgcagtt

SEQ ID NO: 441896 - DNA, 777 bp, Homo sapiens
taagtgcctcatatctgtgcagttaaaaaaaacaagcttatgatcagtaagttattttatttggaatgctttgatttacacccaattttttcagaaacccatcactttttggatatagaatatagtcactgaagggagtaccagtatacataaatgcataaattatgtaaaaactgaacataattctaaagagatggaatcaaagataaagactatgatataaattttgtaccttcttgcacattgtggtatgtcgtggataatagagcattttaaagtgatctggttgcaaaaatgtgtatatcaggaattaataagctaatggggaaattttaagaatttcatgcttattagttttttcggtatgtttgtcttcagaacatattttaagtcagaatgagcaaagatagtagtcaaagttgggagaaggtgtaattttactgatttttttctttttgacttatttgaaccttgacatgtgctatgggtgagtttagataggtgtgtacaaatatttcagcctgggatgccttgctctaactatatcttgatttcttagcatgacttagtgaaagcttatttttaagaatcttcagattataaagtagtgaaaatttaacacttaggtggggggaaattatagttgttagatttatatttgaattatattaaaattgctcacattttaggaactagaatgaaacatggttcgaggggtcataatagtgtttatggagattgtaagatatattattattttttctttgtttgtagact

SEQ ID NO: 441897 - DNA, 1632 bp, Homo sapiens
agagacgcccgccccctttacgtcgtgctctgaggaggccaggagatttctggcggcgccggcgccattttgctggagcctgcgaccgagtgggagtggagtggagcggctgtggttgccgactctttcctcttccccacggtccagtcagcgggttaattaggccatcggccctcgagccgagacttgtctcttatttagttctggggagcgcctcgtcgacatgagtgatgtggaggaaaacaacttcgagggcagagagtctcgctctcagtcaaaatctccaacgggaactcctgctcgtgtaaaatcggagagcaggtcaggatctcgtagtccatcaagggtttccaaacactctgaatcccattctcgatcaagatcaaaatccaggtcgaggtcaaggagacattctcatagacgttacactcgatccagatcccactctcactctcataggagacgatctcgaagtagatcatatacaccagaataccggcggcgaaggagccgaagccattctccaatgtctaaccggagaagacatactggcagcagggcaaatccagatcccaacacttgccttggagtgtttggcctcagtttgtacacaacagagagggatcttcgtgaagtattttctcgatatggaccattgagtggtgtcaatgtggtttatgatcagcgaactgggcgatctcgaggatttgcttttgtgtattttgagagaatagatgactcaaaggaggctatggaaagggcaaatggaatggagctggatggtagaagaattcgggtggattattctataaccaagagagcgcacacaccaacaccaggcatctacatgggcagaccaactcatagtggtgggggtggtggaggaggcggcggcggtggaggtggaggtggtggcagacgtcgagattcttactatgatagaggatatgatcgtgggtatgacagatatgaagactatgattaccgatacagaagacgatcaccttctccttattatagtcgatatagatcacgatcaagatctcgttcctacagcccaagacgctattgataacggaatggttgcaattaaggacattttttttcctcttttttttttttttttttttaattctgagatttccccaagctgtggattcttcctactccttaagaaaaaaactttggtttatttagcatctacacttttgtcagttgtgttgctgttttccacccattttattatactcttaaaagatgtaattgttgtcattttgaacagttaaacatcttgagtataaaaagaaccccaatgttatgttatgctttgtaaatttttttttttgcttttacctagataaacttctagctaatcaaataaggaaagaaactgtctttttaaagcttcttttgtgttagatactgtattagagatctgcatttatcatgagttcctttttttttttaactttatttttgggaaagtaacacatgaagtagttcagtcatgtcaggtttgtctggggtggaatggaacagtcaggtagttgaaagtttttttttagagatgaaaagcttgtgaactcctgtaaaacatgctgtatttgaaatacatctgttaaaacttaaaaa

SEQ ID NO: 441898 - DNA, 2239 bp, Homo sapiens
agagacgcccgccccctttacgtcgtgctctgaggaggccaggagatttctggcggcgccggcgccattttgctggagcctgcgaccgagtgggagtggagtggagcggctgtggttgccgactctttcctcttccccacggtccagtcagcgggttaattaggccatcggccctcgagccgagacttgtctcttatttagttctggggagcgcctcgtcgacatgagtgatgtggaggaaaacaacttcgagggcagagtgagtacaaagccgcgggaccgtctaggcggcggcccaatgctcggggtttcacgggaacaagcgcggtcgggcggggttgcgggtagtcccgcgaggagcaacctctggagccatcgcgattgattcctcccatcccaagatggcttctgggttccactccttccccaaacaccacggataacacccctcccccttttttggaggctgactgatacctggacttctgggtcctcttccctccccgcccccgcattgcttcctcccttctccccacccctgaggcttccttatgtctgctccgaggtgtgggtccccgtcgcggttgggcgggaggaggcggcagggagctcccctccgtccggatagtggtaggtgcttcctgcggtggcatttctggcgaccccgagcatcgtagagggtctcgggatcgaaagtgcgcggggctgctttccgggcggggagaagctggcgtgggactagctggggcctgtgtctccttggctctctatttcagtgagcggccgcgtctctgttggaaccggcggcgttgcgtctaaaaaggcgaaagccttgaggttgaaggtgggacgagcctaatgaagtggagtctcgctctcagtcaaaatctccaacgggaactcctgctcgtgtaaaatcggagagcaggtcaggatctcgtagtccatcaagggtttccaaacactctgaatcccattctcgatcaagatcaaaatccaggtcgaggtcaaggagacattctcatagacgttacactcgatccagatcccactctcactctcataggagacgatctcgaagtagatcatatacaccagaataccggcggcgaaggagccgaagccattctccaatgtctaaccggagaagacatactggcagcagggcaaatccagatcccaacacttgccttggagtgtttggcctcagtttgtacacaacagagagggatcttcgtgaagtattttctcgatatggaccattgagtggtgtcaatgtggtttatgatcagcgaactgggcgatctcgaggatttgcttttgtgtattttgagagaatagatgactcaaaggaggctatggaaagggcaaatggaatggagctggatggtagaagaattcgggtggattattctataaccaagagagcgcacacaccaacaccaggcatctacatgggcagaccaactcatagtggtgggggtggtggaggaggcggcggcggtggaggtggaggtggtggcagacgtcgagattcttactatgatagaggatatgatcgtgggtatgacagatatgaagactatgattaccgatacagaagacgatcaccttctccttattatagtcgatatagatcacgatcaagatctcgttcctacagcccaagacgctattgataacggaatggttgcaattaaggacattttttttcctcttttttttttttttttttttaattctgagatttccccaagctgtggattcttcctactccttaagaaaaaaactttggtttatttagcatctacacttttgtcagttgtgttgctgttttccacccattttattatactcttaaaagatgtaattgttgtcattttgaacagttaaacatcttgagtataaaaagaaccccaatgttatgttatgctttgtaaatttttttttttgcttttacctagataaacttctagctaatcaaataaggaaagaaactgtctttttaaagcttcttttgtgttagatactgtattagagatctgcatttatcatgagttcctttttttttttaactttatttttgggaaagtaacacatgaagtagttcagtcatgtcaggtttgtctggggtggaatggaacagtcaggtagttgaaagtttttttttagagatgaaaagcttgtgaactcctgtaaaacatgctgtatttgaaatacatctgttaaaacttaaaaa

SEQ ID NO: 441899 - DNA, 2811 bp, Homo sapiens
agagacgcccgccccctttacgtcgtgctctgaggaggccaggagatttctggcggcgccggcgccattttgctggagcctgcgaccgagtgggagtggagtggagcggctgtggttgccgactctttcctcttccccacggtccagtcagcgggttaattaggccatcggccctcgagccgagacttgtctcttatttagttctggggagcgcctcgtcgacatgagtgatgtggaggaaaacaacttcgagggcagagtgagtacaaagccgcgggaccgtctaggcggcggcccaatgctcggggtttcacgggaacaagcgcggtcgggcggggttgcgggtagtcccgcgaggagcaacctctggagccatcgcgattgattcctcccatcccaagatggcttctgggttccactccttccccaaacaccacggataacacccctcccccttttttggaggctgactgatacctggacttctgggtcctcttccctccccgcccccgcattgcttcctcccttctccccacccctgaggcttccttatgtctgctccgaggtgtgggtccccgtcgcggttgggcgggaggaggcggcagggagctcccctccgtccggatagtggtaggtgcttcctgcggtggcatttctggcgaccccgagcatcgtagagggtctcgggatcgaaagtgcgcggggctgctttccgggcggggagaagctggcgtgggactagctggggcctgtgtctccttggctctctatttcagtgagcggccgcgtctctgttggaaccggcggcgttgcgtctaaaaaggcgaaagccttgaggttgaaggtgggacgagcctaatgaagtggagtctcgctctcagtcaaaatctccaacgggaactcctgctcgtgtaaaatcggagagcaggtcaggatctcgtagtccatcaagggtttccaaacactctgaatcccattctcgatcaagatcaaaatccaggtcgaggtcaaggagacattctcatagacgttacactcgatccagatcccactctcactctcataggagacgatctcgaagtagatcatatacaccagaataccggcggcgaaggagccgaagccattctccaatgtctaaccggagaagacatactggcagcagggcaaatccagatcccaacacttgccttggagtgtttggcctcagtttgtacacaacagagagggatcttcgtgaagtattttctcgatatggaccattgagtggtgtcaatgtggtttatgatcagcgaactgggcgatctcgaggatttgcttttgtgtattttgagagaatagatgactcaaaggaggctatggaaagggcaaatggaatggagctggatggtagaagaattcgggtggattattctataaccaagagagcgcacacaccaacaccaggcatctacatgggcagaccaactcatagtggtgggggtggtggaggaggcggcggcggtggaggtggaggtggtggcagacgtcgagattcttactatgatagaggatatgatcgtgggtatgacagatatgaagactatgattaccgatacagaagacgatcaccttctccttattatagtcgatatagatcacgatcaagatctcgttcctacagcccaagacgctattgataacggaatggttgcaattaaggacattttttttcctcttttttttttttttttttttaattctgagatttccccaagctgtggattcttcctactccttaagaaaaaaactttggtttatttagcatctacacttttgtcagttgtgttgctgttttccacccattttattatactcttaaaagatgtaattgttgtcattttgaacagttaaacatcttgagtataaaaagaaccccaatgttatgttatgctttgtaaatttttttttttgcttttacctagataaacttctagctaatcaaataaggaaagaaactgtctttttaaagcttcttttgtgttagatactgtattagagatctgcatttatcatgagttcctttttttttttaactttatttttgggaaagtaacacatgaagtagttcagtcatgtcaggtttgtctggggtggaatggaacagtcaggtagttgaaagtttttttttagagatgaaaagcttgtgaactcctgtaaaacatgctgtatttgaaatacatctgttaaaacttaaaaactaaagtgtgattttttttgttgttgttaagtttattgaagtttattcccttaatcagtgaaggacaacccttatttattacctagagcagttgtataattcgctgttagaaattttggtattgggacagtggataagcaggttatcacatagcatagaattcttaaaagatacatgtggggaaaagtagtctcaaataaaagctaatttctttgaaaaaaaacacacaacccacacgcgcaccgaaacaacccagcgaccaacagcagtcgccactccgggcgggggacccacataagcgatcccccgccggaggcgcaccaagacagagccgcacccacgtagtggcgccacgaaggtggccacttaagcagcgcctaattcagacgcacgccagcccgcgacaaaacgagccccgatgtaaaggatcctccgcaggcacgttgcgagcccacctgcgcctgaggggcacaagtcgcgacatcgacgcagcaaaaaccacgagcaatcagtcacagagcatcaggctacaaacgcgattgcacgcgtcaacggcccagatgaaagaaaca

SEQ ID NO: 441900 - DNA, 1160 bp, Homo sapiens
agagacgcccgccccctttacgtcgtgctctgaggaggccaggagatttctggcggcgccggcgccattttgctggagcctgcgaccgagtgggagtggagtggagcggctgtggttgccgactctttcctcttccccacggtccagtcagcgggttaattaggccatcggccctcgagccgagacttgtctcttatttagttctggggagcgcctcgtcgacatgagtgatgtggaggaaaacaacttcgagggcagagtgagtacaaagccgcgggaccgtctaggcggcggcccaatgctcggggtttcacgggaacaagcgcggtcgggcggggttgcgggtagtcccgcgaggagcaacctctggagccatcgcgattgattcctcccatcccaagatggcttctgggttccactccttccccaaacaccacggataacacccctcccccttttttggaggctgactgatacctggacttctgggtcctcttccctccccgcccccgcattgcttcctcccttctccccacccctgaggcttccttatgtctgctccgaggtgtgggtccccgtcgcggttgggcgggaggaggcggcagggagctcccctccgtccggatagtggtaggtgcttcctgcggtggcatttctggcgaccccgagcatcgtagagggtctcgggatcgaaagtgcgcggggctgctttccgggcggggagaagctggcgtgggactagctggggcctgtgtctccttggctctctatttcagtgagcggccgcgtctctgttggaaccggcggcgttgcgtctaaaaaggcgaaagccttgaggttgaaggtgggacgagcctaatgaagtggttagtcaacgaccgcaccgacccttaagcgttcttaagacgagagctgtgaggggaaactacgcaaggagcccttttcccttaatgtcccttcgactttcctttcacttcgaaatgaatgtggaaatgctgtcacgccttatttttctaattcctcgatgttgggttttttctcttctttatatctcaacttttaatgctcttcttcctatgacctttcatctaaaaactgaccactcctttacaggtttttacggtaaaaaaagggcgccgctcagatcctctagagcgccc

SEQ ID NO: 441901 - DNA, 2050 bp, Homo sapiens
agagacgcccgccccctttacgtcgtgctctgaggaggccaggagatttctggcggcgccggcgccattttgctggagcctgcgaccgagtgggagtggagtggagcggctgtggttgccgactctttcctcttccccacggtccagtcagcgggttaattaggccatcggccctcgagccgagacttgtctcttatttagttctggggagcgcctcgtcgacatgagtgatgtggaggaaaacaacttcgagggcagagtgagtacaaagccgcgggaccgtctaggcggcggcccaatgctcggggtttcacgggaacaagcgcggtcgggcggggttgcgggtagtcccgcgaggagcaacctctggagccatcgcgattgattcctcccatcccaagatggcttctgggttccactccttccccaaacaccacggataacacccctcccccttttttggaggctgactgatacctggacttctgggtcctcttccctccccgcccccgcattgcttcctcccttctccccacccctgaggcttccttatgtctgctccgaggtgtgggtccccgtcgcggttgggcgggaggaggcggcagggagctcccctccgtccggatagtggtaggtgcttcctgcggtggcatttctggcgaccccgagcatcgtagagggtctcgggatcgaaagtgcgcggggctgctttccgggcggggagaagctggcgtgggactagctggggcctgtgtctccttggctctctatttcagtgagcggccgcgtctctgttggaaccggcggcgttgcgtctaaaaaggcgaaagccttgaggttgaaggtgggacgagcctaatgaagtggagtctcgctctcagtcaaaatctccaacgggaactcctgctcgtgtaaaatcggagagcaggtcaggatctcgtagtccatcaagggtttccaaacactctgaatcccattctcgatcaagatcaaaatccaggtcgaggtcaaggagacattctcatagacgttacactcgatccagatcccactctcactctcataggagacgatctcgaagtagatcatatacaccagaataccggcggcgaaggagccgaagccattctccaatgtctaaccggagaagacatactggcagcagggctatggaaagggcaaatggaatggagctggatggtagaagaattcgggtggattattctataaccaagagagcgcacacaccaacaccaggcatctacatgggcagaccaactcatagtggtgggggtggtggaggaggcggcggcggtggaggtggaggtggtggcagacgtcgagattcttactatgatagaggatatgatcgtgggtatgacagatatgaagactatgattaccgatacagaagacgatcaccttctccttattatagtcgatatagatcacgatcaagatctcgttcctacagcccaagacgctattgataacggaatggttgcaattaaggacattttttttcctcttttttttttttttttttttaattctgagatttccccaagctgtggattcttcctactccttaagaaaaaaactttggtttatttagcatctacacttttgtcagttgtgttgctgttttccacccattttattatactcttaaaagatgtaattgttgtcattttgaacagttaaacatcttgagtataaaaagaaccccaatgttatgttatgctttgtaaatttttttttttgcttttacctagataaacttctagctaatcaaataaggaaagaaactgtctttttaaagcttcttttgtgttagatactgtattagagatctgcatttatcatgagttcctttttttttttaactttatttttgggaaagtaacacatgaagtagttcagtcatgtcaggtttgtctggggtggaatggaacagtcaggtagttgaaagtttttttttagagatgaaaagcttgtgaactcctgtaaaacatgctgtatttgaaatacatctgttaaaacttaaaaa

SEQ ID NO: 441902 - DNA, 1472 bp, Homo sapiens
agagacgcccgccccctttacgtcgtgctctgaggaggccaggagatttctggcggcgccggcgccattttgctggagcctgcgaccgagtgggagtggagtggagcggctgtggttgccgactctttcctcttccccacggtccagtcagcgggttaattaggccatcggccctcgagccgagacttgtctcttatttagttctggggagcgcctcgtcgacatgagtgatgtggaggaaaacaacttcgagggcagagtgagtacaaagccgcgggaccgtctaggcggcggcccaatgctcggggtttcacgggaacaagcgcggtcgggcggggttgcgggtagtcccgcgaggagcaacctctggagccatcgcgattgattcctcccatcccaagatggcttctgggttccactccttccccaaacaccacggataacacccctcccccttttttggaggctgactgatacctggacttctgggtcctcttccctccccgcccccgcattgcttcctcccttctccccacccctgaggcttccttatgtctgctccgaggtgtgggtccccgtcgcggttgggcgggaggaggcggcagggagctcccctccgtccggatagtggtaggtgcttcctgcggtggcatttctggcgaccccgagcatcgtagagggtctcgggatcgaaagtgcgcggggctgctttccgggcggggagaagctggcgtgggactagctggggcctgtgtctccttggctctctatttcagtgagcggccgcgtctctgttggaaccggcggcgttgcgtctaaaaaggcgaaagccttgaggttgaaggtgggacgagcctaatgaagtggttagtcaacgaccgcaccgacccttaagcgttcttaagacgagagctgtgaggggaaactacgcaaggagcccttttcccttaatgtcccttcgactttcctttcacttcgaaatgaatgtggaaatgctgtcacgccttatttttctaattcctcgatgttgggttttttctcttctttatatctcaacttttaatgctcttcttcctatgacctttcatctaaaaactgaccactcctttacaggtttttacggtaaaaattaagataactagtcagtatatactgttctgtaacttaaaagatgacctgaaaattaacaggccctctcccatttctcttctcactctatcccccaccgaagagggctcagaaaaaagtttttattaatatatttggggtcggagaaatacaaacatcacaaagaatacgatatccccagcttaaatgtactggaacgtttgtcagtgagtttcatttccaaagtttaccctacatagggaattgtagaagtgagttagtagaagtgagttcgtgtgaaaccctggaaagaaaacgccactggaaccgtccggctgtggtgaagtttttctctcacttggggc

SEQ ID NO: 441903 - DNA, 2915 bp, Homo sapiens
taagtgcctcatatctgtgcagttaaaaaaaacaagcttatgatcagtaagttattttatttggaatgctttgatttacacccaattttttcagaaacccatcactttttggatatagaatatagtcactgaagggagtaccagtatacataaatgcataaattatgtaaaaactgaacataattctaaagagatggaatcaaagataaagactatgatataaattttgtaccttcttgcacattgtggtatgtcgtggataatagagcattttaaagtgatctggttgcaaaaatgtgtatatcaggaattaataagctaatggggaaattttaagaatttcatgcttattagttttttcggtatgtttgtcttcagaacatattttaagtcagaatgagcaaagatagtagtcaaagttgggagaaggtgtaattttactgatttttttctttttgacttatttgaaccttgacatgtgctatgggtgagtttagataggtgtgtacaaatatttcagcctgggatgccttgctctaactatatcttgatttcttagcatgacttagtgaaagcttatttttaagaatcttcagattataaagtagtgaaaatttaacacttaggtggggggaaattatagttgttagatttatatttgaattatattaaaattgctcacattttaggaactagaatgaaacatgggaggagggtgaagagtatggtttaaaaagcatttagagaaatttagtaaattctctttgttagaaactagagttttgaacaattttaaagactataaaattgttttttttttttttttaaataaactagttacttgcactttacctgctggcttttccatttggtagataacattctgaactccagcagagttttataatccccacgtgcttaaatatactaaatgttctttttccattaaggttaatgttcgtgaagaaattgaagagttttttccaagaatgtggaagataaatcaagataaaagaaggctaatgaaaagtattaaagatcagaaaattaaaattgaatgggggaaaaaattgaacagaagattggtcagatagaagcacttgaatatttttttaaggctattttgaattgtttgaattggggaagaatacacgaagtatgaaaaatgaaaaactcaatgaagaatgaagagaagtagaaagcaagagtgaagtagaattaaaagaatctggaagaatgaatgggtcctaggttaagtaaatgtatggtttatgttccagtgtctgtatgatcaagttgtagatgaatttgcatgattacttagttaatagagaattggtgatctggttcaagtagggaattattgaggacagttagcagtattaacagtgggttattattgagctgaaattttttctggagggtgttgtctaaccatttgtttttcaggagcaatcaatataaataattacggtactttaaatgttaggtgttaggcatctacatgaccagtgccatttgtaatactgtcttctttgttaggagtctcgctctcagtcaaaatctccaacgggaactcctgctcgtgtaaaatcggagagcaggtcaggatctcgtagtccatcaagggtttccaaacactctgaatcccattctcgatcaagatcaaaatccaggtcgaggtcaaggagacattctcatagacgttacactcgatccagatcccactctcactctcataggagacgatctcgaagtagatcatatacaccagaataccggcggcgaaggagccgaagccattctccaatgtctaaccggagaagacatactggcagcagggcaaatccagatcccaacacttgccttggagtgtttggcctcagtttgtacacaacagagagggatcttcgtgaagtattttctcgatatggaccattgagtggtgtcaatgtggtttatgatcagcgaactgggcgatctcgaggatttgcttttgtgtattttgagagaatagatgactcaaaggaggctatggaaagggcaaatggaatggagctggatggtagaagaattcgggtggattattctataaccaagagagcgcacacaccaacaccaggcatctacatgggcagaccaactcatagtggtgggggtggtggaggaggcggcggcggtggaggtggaggtggtggcagacgtcgagattcttactatgatagaggatatgatcgtgggtatgacagatatgaagactatgattaccgatacagaagacgatcaccttctccttattatagtcgatatagatcacgatcaagatctcgttcctacagcccaagacgctattgataacggaatggttgcaattaaggacattttttttcctcttttttttttttttttttttaattctgagatttccccaagctgtggattcttcctactccttaagaaaaaaactttggtttatttagcatctacacttttgtcagttgtgttgctgttttccacccattttattatactcttaaaagatgtaattgttgtcattttgaacagttaaacatcttgagtataaaaagaaccccaatgttatgttatgctttgtaaatttttttttttgcttttacctagataaacttctagctaatcaaataaggaaagaaactgtctttttaaagcttcttttgtgttagatactgtattagagatctgcatttatcatgagttcctttttttttttaactttatttttgggaaagtaacacatgaagtagttcagtcatgtcaggtttgtctggggtggaatggaacagtcaggtagttgaaagtttttttttagagatgaaaagcttgtgaactcctgtaaaacatgctgtatttgaaatacatctgttaaaacttaaaaa

SEQ ID NO: 441904 - DNA, 2758 bp, Homo sapiens
agagacgcccgccccctttacgtcgtgctctgaggaggccaggagatttctggcggcgccggcgccattttgctggagcctgcgaccgagtgggagtggagtggagcggctgtggttgccgactctttcctcttccccacggtccagtcagcgggttaattaggccatcggccctcgagccgagacttgtctcttatttagttctggggagcgcctcgtcgacatgagtgatgtggaggaaaacaacttcgagggcagagtgagtacaaagccgcgggaccgtctaggcggcggcccaatgctcggggtttcacgggaacaagcgcggtcgggcggggttgcgggtagtcccgcgaggagcaacctctggagccatcgcgattgattcctcccatcccaagatggcttctgggttccactccttccccaaacaccacggataacacccctcccccttttttggaggctgactgatacctggacttctgggtcctcttccctccccgcccccgcattgcttcctcccttctccccacccctgaggcttccttatgtctgctccgaggtgtgggtccccgtcgcggttgggcgggaggaggcggcagggagctcccctccgtccggatagtggtaggtgcttcctgcggtggcatttctggcgaccccgagcatcgtagagggtctcgggatcgaaagtgcgcggggctgctttccgggcggggagaagctggcgtgggactagctggggcctgtgtctccttggctctctatttcagtgagcggccgcgtctctgttggaaccggcggcgttgcgtctaaaaaggcgaaagccttgaggttgaaggtgggacgagcctaatgaagtggagtctcgctctcagtcaaaatctccaacgggaactcctgctcgtgtaaaatcggagagcaggtcaggatctcgtagtccatcaagggtttccaaacactctgaatcccattctcgatcaagatcaaaatccaggtcgaggtcaaggagacattctcatagacgttacactcgatccagatcccactctcactctcataggagacgatctcgaagtagatcatatacaccagaataccggcggcgaaggagccgaagccattctccaatgtctaaccggagaagacatactggcagcagggcaaatccagatcccaacacttgccttggagtgtttggcctcagtttgtacacaacagagagggatcttcgtgaagtattttctcgatatggaccattgagtggtgtcaatgtggtttatgatcagcgaactgggcgatctcgaggatttgcttttgtgtattttgagagaatagatgactcaaaggaggctatggaaagggcaaatggaatggagctggatggtagaagaattcgggtggattattctataaccaagagagcgcacacaccaacaccaggcatctacatgggcagaccaactcatagtggtgggggtggtggaggaggcggcggcggtggaggtggaggtggtggcagacgtcgagattcttactatgatagaggatatgatcgtgggtatgacagatatgaagactatgattaccgatacagaagacgatcaccttctccttattatagtcgatatagatcacgatcaagatctcgttcctacagcccaagacgctattgataacggaatggttgcaattaaggacattttttttcctcttttttttttttttttttttaattctgagatttccccaagctgtggattcttcctactccttaagaaaaaaactttggtttatttagcatctacacttttgtcagttgtgttgctgttttccacccattttattatactcttaaaagatgtaattgttgtcattttgaacagttaaacatcttgagtatactagataaacttctagctaatcaaataaggaaagaaactgtctttttaaagcttcttttgtgttagatactgtattagagatctgcatttatcatgagttcctttttttttttaactttatttttgggaaagtaacacatgaagtagttcagtcatgtcaggtttgtctggggtggaatggaacagtcaggtagttgaaagtttttttttagagatgaaaagcttgtgaactcctgtaaaacatgctgtatttgaaatacatctgttaaaacttaaaaactaaagtgtgattttttttgttgttgttaagtttattgaagtttattcccttaatcagtgaaggacaacccttatttattacctagagcagttgtataattcgctgttagaaattttggtattgggacagtggataagcaggttatcacatagcatagaattcttaaaagatacatgtggggaaaagtagtctcaaataaaagctaatttctttgaaaaaaaacacacaacccacacgcgcaccgaaacaacccagcgaccaacagcagtcgccactccgggcgggggacccacataagcgatcccccgccggaggcgcaccaagacagagccgcacccacgtagtggcgccacgaaggtggccacttaagcagcgcctaattcagacgcacgccagcccgcgacaaaacgagccccgatgtaaaggatcctccgcaggcacgttgcgagcccacctgcgcctgaggggcacaagtcgcgacatcgacgcagcaaaaaccacgagcaatcagtcacagagcatcaggctacaaacgcgattgcacgcgtcaacggcccagatgaaagaaaca

SEQ ID NO: 441905 - DNA, 2224 bp, Homo sapiens
agagacgcccgccccctttacgtcgtgctctgaggaggccaggagatttctggcggcgccggcgccattttgctggagcctgcgaccgagtgggagtggagtggagcggctgtggttgccgactctttcctcttccccacggtccagtcagcgggttaattaggccatcggccctcgagccgagacttgtctcttatttagttctggggagcgcctcgtcgacatgagtgatgtggaggaaaacaacttcgagggcagagttaatgttcgtgaagaaattgaagagttttttccaagaatgtggaagataaatcaagataaaagaaggctaatgaaaagtattaaagatcagaaaattaaaattgaatgggggaaaaaattgaacagaagattggtcagatagaagcacttgaatatttttttaaggctattttgaattgtttgaattggggaagaatacacgaagtatgaaaaatgaaaaactcaatgaagaatgaagagaagtagaaagcaagagtgaagtagaattaaaagaatctggaagaatgaatgggtcctaggttaagtaaatgtatggtttatgttccagtgtctgtatgatcaagttgtagatgaatttgcatgattacttagttaatagagaattggtgatctggttcaagtagggaattattgaggacagttagcagtattaacagtgggttattattgagctgaaattttttctggagggtgttgtctaaccatttgtttttcaggagcaatcaatataaataattacggtactttaaatgttaggtgttaggcatctacatgaccagtgccatttgtaatactgtcttctttgttaggagtctcgctctcagtcaaaatctccaacgggaactcctgctcgtgtaaaatcggagagcaggtcaggatctcgtagtccatcaagggtttccaaacactctgaatcccattctcgatcaagatcaaaatccaggtcgaggtcaaggagacattctcatagacgttacactcgatccagatcccactctcactctcataggagacgatctcgaagtagatcatatacaccagaataccggcggcgaaggagccgaagccattctccaatgtctaaccggagaagacatactggcagcagggcaaatccagatcccaacacttgccttggagtgtttggcctcagtttgtacacaacagagagggatcttcgtgaagtattttctcgatatggaccattgagtggtgtcaatgtggtttatgatcagcgaactgggcgatctcgaggatttgcttttgtgtattttgagagaatagatgactcaaaggaggctatggaaagggcaaatggaatggagctggatggtagaagaattcgggtggattattctataaccaagagagcgcacacaccaacaccaggcatctacatgggcagaccaactcatagtggtgggggtggtggaggaggcggcggcggtggaggtggaggtggtggcagacgtcgagattcttactatgatagaggatatgatcgtgggtatgacagatatgaagactatgattaccgatacagaagacgatcaccttctccttattatagtcgatatagatcacgatcaagatctcgttcctacagcccaagacgctattgataacggaatggttgcaattaaggacattttttttcctcttttttttttttttttttttaattctgagatttccccaagctgtggattcttcctactccttaagaaaaaaactttggtttatttagcatctacacttttgtcagttgtgttgctgttttccacccattttattatactcttaaaagatgtaattgttgtcattttgaacagttaaacatcttgagtataaaaagaaccccaatgttatgttatgctttgtaaatttttttttttgcttttacctagataaacttctagctaatcaaataaggaaagaaactgtctttttaaagcttcttttgtgttagatactgtattagagatctgcatttatcatgagttcctttttttttttaactttatttttgggaaagtaacacatgaagtagttcagtcatgtcaggtttgtctggggtggaatggaacagtcaggtagttgaaagtttttttttagagatgaaaagcttgtgaactcctgtaaaacatgctgtatttgaaatacatctgttaaaacttaaaaa

SEQ ID NO: 441906 - DNA, 1944 bp, Homo sapiens
agagacgcccgccccctttacgtcgtgctctgaggaggccaggagatttctggcggcgccggcgccattttgctggagcctgcgaccgagtgggagtggagtggagcggctgtggttgccgactctttcctcttccccacggtccagtcagcgggttaattaggccatcggccctcgagccgagacttgtctcttatttagttctggggagcgcctcgtcgacatgagtgatgtggaggaaaacaacttcgagggcagagttaatgttcgtgaagaaattgaagagttttttccaagaatgtggaagataaatcaagataaaagaaggctaatgaaaagtattaaagatcagaaaattaaaattgaatgggggaaaaaattgaacagaagattggtcagatagaagcacttgaatatttttttaaggctattttgaattgtttgaattggggaagaatacacgaagtatgaaaaatgaaaaactcaatgaagaatgaagagaagtagaaagcaagagtgaagtagaattaaaagaatctggaagaatgaatgggtcctaggttaagtaaatgagtctcgctctcagtcaaaatctccaacgggaactcctgctcgtgtaaaatcggagagcaggtcaggatctcgtagtccatcaagggtttccaaacactctgaatcccattctcgatcaagatcaaaatccaggtcgaggtcaaggagacattctcatagacgttacactcgatccagatcccactctcactctcataggagacgatctcgaagtagatcatatacaccagaataccggcggcgaaggagccgaagccattctccaatgtctaaccggagaagacatactggcagcagggcaaatccagatcccaacacttgccttggagtgtttggcctcagtttgtacacaacagagagggatcttcgtgaagtattttctcgatatggaccattgagtggtgtcaatgtggtttatgatcagcgaactgggcgatctcgaggatttgcttttgtgtattttgagagaatagatgactcaaaggaggctatggaaagggcaaatggaatggagctggatggtagaagaattcgggtggattattctataaccaagagagcgcacacaccaacaccaggcatctacatgggcagaccaactcatagtggtgggggtggtggaggaggcggcggcggtggaggtggaggtggtggcagacgtcgagattcttactatgatagaggatatgatcgtgggtatgacagatatgaagactatgattaccgatacagaagacgatcaccttctccttattatagtcgatatagatcacgatcaagatctcgttcctacagcccaagacgctattgataacggaatggttgcaattaaggacattttttttcctcttttttttttttttttttttaattctgagatttccccaagctgtggattcttcctactccttaagaaaaaaactttggtttatttagcatctacacttttgtcagttgtgttgctgttttccacccattttattatactcttaaaagatgtaattgttgtcattttgaacagttaaacatcttgagtataaaaagaaccccaatgttatgttatgctttgtaaatttttttttttgcttttacctagataaacttctagctaatcaaataaggaaagaaactgtctttttaaagcttcttttgtgttagatactgtattagagatctgcatttatcatgagttcctttttttttttaactttatttttgggaaagtaacacatgaagtagttcagtcatgtcaggtttgtctggggtggaatggaacagtcaggtagttgaaagtttttttttagagatgaaaagcttgtgaactcctgtaaaacatgctgtatttgaaatacatctgttaaaacttaaaaa

SEQ ID NO: 441907 - DNA, 1482 bp, Homo sapiens
taaaagaagatggggccttaacatttttgtaaggttaggtgaaaagggtgaatgtagaggggcttgactgagaagagtggaagatgtagtgacttaagtgaaccaaaggaagaataccctttcctcagaagcaaggaggaaggacctgagaatagttagggatatatgtataccttcttggaagagggaaggactttagccattttgtttcagtatttttacctaaatgtatttctctcaaaggtcgaggtcaaggagacattctcatagacgttacactcgatccagatcccactctcactctcataggagacgatctcgaagtagatcatatacaccagaataccggcggcgaaggagccgaagccattctccaatgtctaaccggagaagacatactggcagcagggcaaatccagatcccaacacttgccttggagtgtttggcctcagtttgtacacaacagagagggatcttcgtgaagtattttctcgatatggaccattgagtggtgtcaatgtggtttatgatcagcgaactgggcgatctcgaggatttgcttttgtgtattttgagagaatagatgactcaaaggaggctatggaaagggcaaatggaatggagctggatggtagaagaattcgggtggattattctataaccaagagagcgcacacaccaacaccaggcatctacatgggcagaccaactcatagtggtgggggtggtggaggaggcggcggcggtggaggtggaggtggtggcagacgtcgagattcttactatgatagaggatatgatcgtgggtatgacagatatgaagactatgattaccgatacagaagacgatcaccttctccttattatagtcgatatagatcacgatcaagatctcgttcctacagcccaagacgctattgataacggaatggttgcaattaaggacattttttttcctcttttttttttttttttttttaattctgagatttccccaagctgtggattcttcctactccttaagaaaaaaactttggtttatttagcatctacacttttgtcagttgtgttgctgttttccacccattttattatactcttaaaagatgtaattgttgtcattttgaacagttaaacatcttgagtataaaaagaaccccaatgttatgttatgctttgtaaatttttttttttgcttttacctagataaacttctagctaatcaaataaggaaagaaactgtctttttaaagcttcttttgtgttagatactgtattagagatctgcatttatcatgagttcctttttttttttaactttatttttgggaaagtaacacatgaagtagttcagtcatgtcaggtttgtctggggtggaatggaacagtcaggtagttgaaagtttttttttagagatgaaaagcttgtgaactcctgtaaaacatgctgtatttgaaatacatctgttaaaacttaaaaa

SEQ ID NO: 441908 - DNA, 1624 bp, Homo sapiens
aatgacctttagtttatgggacactcttacggagaaatatttgtggatacataaaaattgtgtagtttttattagtttattatacttttattagttcagtctcaataaaaggttgaaaggcattacgataaatttgttcttgtctgtttatatcatttcttcttggctgctcactgagtcttaatcagtgtactagactgcaaactaaagaataagattgggggcaggttataaaaagaacatgtataaagcttagcaaaccctttttaatgttctgaagtcagtctttgtaagtgaaatcgctggagactagaaagtatgaaatggcagtctacctgggcaacctacaaaaaatttagcttgaaaagacttcagtctccgctcccctgttgatctcatggagtggggaatgggaattgaaccagaactggaaaattatttaggaaagtttgttaactactctttgttgatctcatggagtggggaatgggaattgaaccagaactggaaaattatttgggaaagtttattaactactctttctgctgagtaaatttaaatgtgttctggacattgttgaggtctagaattgtctatacaatgccctgtacaagctacattgctgtcattttcaaaatcaggagtttatttggattacatatactttgtgcttaattttaagtaatgattacttcaagactggtgaattatacgtgactttttgtgcctgttctttataggctatggaaagggcaaatggaatggagctggatggtagaagaattcgggtggattattctataaccaagagagcgcacacaccaacaccaggcatctacatgggcagaccaactcatagtggtgggggtggtggaggaggcggcggcggtggaggtggaggtggtggcagacgtcgagattcttactatgatagaggatatgatcgtgggtatgacagatatgaagactatgattaccgatacagaagacgatcaccttctccttattatagtcgatatagatcacgatcaagatctcgttcctacagcccaagacgctattgataacggaatggttgcaattaaggacattttttttcctcttttttttttttttttttttaattctgagatttccccaagctgtggattcttcctactccttaagaaaaaaactttggtttatttagcatctacacttttgtcagttgtgttgctgttttccacccattttattatactcttaaaagatgtaattgttgtcattttgaacagttaaacatcttgagtataaaaagaaccccaatgttatgttatgctttgtaaatttttttttttgcttttacctagataaacttctagctaatcaaataaggaaagaaactgtctttttaaagcttcttttgtgttagatactgtattagagatctgcatttatcatgagttcctttttttttttaactttatttttgggaaagtaacacatgaagtagttcagtcatgtcaggtttgtctggggtggaatggaacagtcaggtagttgaaagtttttttttagagatgaaaagcttgtgaactcctgtaaaacatgctgtatttgaaatacatctgttaaaacttaaaaa

SEQ ID NO: 441909 - DNA, 1271 bp, Homo sapiens
ccaaaggcagtattcacagaggtatttcttgggaataaaagaaggaatatagtcattccttggtattctctttggtgtccagagttacttaaaaattcttggtgtttattgccttttagtcacagggatacaccttttattcatttatttatttatttaccagtctcatttagcagtaggaatgcatcttagcatttttatactgctgctcaacacagtgcttcatcgtttcaatttgttgaaaagattttaatttgggcagtgcattagtagaaaagcagttaatagttttgagagttttgtgaagcccttcttgattatgtatgtagggaataaggcaaaccagaataccatgggagtcagtaaaatgagatacggaggcaatttctcatgaaagggatgttcttcctcacttttctcttttttaagccattcaatttgtattaaagtgtcctggaaaatagtcattcacactaatggagaatttttacatttttctgcagtagtggtgggggtggtggaggaggcggcggcggtggaggtggaggtggtggcagacgtcgagattcttactatgatagaggatatgatcgtgggtatgacagatatgaagactatgattaccgatacagaagacgatcaccttctccttattatagtcgatatagatcacgatcaagatctcgttcctacagcccaagacgctattgataacggaatggttgcaattaaggacattttttttcctcttttttttttttttttttttaattctgagatttccccaagctgtggattcttcctactccttaagaaaaaaactttggtttatttagcatctacacttttgtcagttgtgttgctgttttccacccattttattatactcttaaaagatgtaattgttgtcattttgaacagttaaacatcttgagtataaaaagaaccccaatgttatgttatgctttgtaaatttttttttttgcttttacctagataaacttctagctaatcaaataaggaaagaaactgtctttttaaagcttcttttgtgttagatactgtattagagatctgcatttatcatgagttcctttttttttttaactttatttttgggaaagtaacacatgaagtagttcagtcatgtcaggtttgtctggggtggaatggaacagtcaggtagttgaaagtttttttttagagatgaaaagcttgtgaactcctgtaaaacatgctgtatttgaaatacatctgttaaaacttaaaaa

SEQ ID NO: 441910 - DNA, 757 bp, Homo sapiens
  misc_feature (724)..(724): n is a, c, g, or t
  misc_feature (727)..(727): n is a, c, g, or t
  misc_feature (730)..(730): n is a, c, g, or t
  misc_feature (755)..(755): n is a, c, g, or t
agagacgcccgccccctttacgtcgtgctctgaggaggccaggagatttctggcggcgccggcgccattttgctggagcctgcgaccgagtgggagtggagtggagcggctgtggttgccgactctttcctcttccccacggtccagtcagcgggttaattaggccatcggccctcgagccgagacttgtctcttatttagttctggggagcgcctcgtcgacatgagtgatgtggaggaaaacaacttcgagggcagagagtctcgctctcagtcaaaatctccaacgggaactcctgctcgtgtaaaatcggagagcaggtcaggatctcgtagtccatcaagggtttccaaacactctgaatcccattctcgatcaagatcaaaatccaggtcgaggtcaaggagacattctcatagacgttacactcgatccagatcccactctcactctcataggagacgatctcgaatattttctcgatatggaccattgagtggtgtcaatgtggtttatgatcagcgaactgggcgatctcgaggatttgcttttgtgtattttgagagaatagatgactcaaaggaggctatggaaagggcaaatggaatggagctggatggtagaagaattcgggtggattattctataaccaagagagcgcacacaccaacaccaggcatctacatgggcagaccaactcatatggtgggggtggtggaagangcngcngcggtggaagtggaagtggtggcanac

SEQ ID NO: 441911 - DNA, 341 bp, Homo sapiens
ttttctggtctcattggcagaaagagaacttaatattaagtagttatcaccttaggtacattattattttgaatgatgaggaatttttattttcatctgcctcagtggagtgattatatagtatgctaagtaatctttcatttcttacagaagacgatcaccttctccttattatagtcgatatagatcacgatcaagatctcgttcctacagcccaagtatgtgaactttacttttgtagcataaaaaacctcatttctaattaatggcttactttagaatattagagtataaggtggaaggtggcagttaatagttggaaaaatatgaggcaaattaaa

SEQ ID NO: 441912 - DNA, 2188 bp, Homo sapiens
agagacgcccgccccctttacgtcgtgctctgaggaggccaggagatttctggcggcgccggcgccattttgctggagcctgcgaccgagtgggagtggagtggagcggctgtggttgccgactctttcctcttccccacggtccagtcagcgggttaattaggccatcggccctcgagccgagacttgtctcttatttagttctggggagcgcctcgtcgacatgagtgatgtggaggaaaacaacttcgagggcagagtgagtacaaagccgcgggaccgtctaggcggcggcccaatgctcggggtttcacgggaacaagcgcggtcgggcggggttgcgggtagtcccgcgaggagcaacctctggagccatcgcgattgattcctcccatcccaagatggcttctgggttccactccttccccaaacaccacggataacacccctcccccttttttggaggctgactgatacctggacttctgggtcctcttccctccccgcccccgcattgcttcctcccttctccccacccctgaggcttccttatgtctgctccgaggtgtgggtccccgtcgcggttgggcgggaggaggcggcagggagctcccctccgtccggatagtggtaggtgcttcctgcggtggcatttctggcgaccccgagcatcgtagagggtctcgggatcgaaagtgcgcggggctgctttccgggcggggagaagctggcgtgggactagctggggcctgtgtctccttggctctctatttcagtgagcggccgcgtctctgttggaaccggcggcgttgcgtctaaaaaggcgaaagccttgaggttgaaggtgggacgagcctaatgaagtggttagtcaacgaccgcaccgacccttaagcgttcttaagacgagagctgtgaggggaaactacgcaaggagcccttttcccttaatgtcccttcgactttcctttcacttcgaaatgaatgtggaaatgctgtcacgccttatttttctaattcctcgatgttgggttttttctcttctttatatctcaacttttaatgctcttcttcctatgacctttcatctaaaaactgaccactcctttacaggtttttacggtaaaaaaaaaaaaaatctgtctttctttaatcttacatagctgaacgaattcattggctcagtatttttaagataactagtcagtatatactgttctgtaacttaaaagatgacctgaaaattaacaggccctctcccatttctcttctcactctatcccccaccgaagagggctcagaaaaaagtttttattaatatatttggggtcggagaaatacaaacatcacaaagaatacgatatccccagcttaaatgtactggaacgtttgtcagtgagtttcatttccaaagtttaccctacatagggaattgtagaagtgagttagtagaagtgagttcgtgtgaaaccctggaaagaaaacaaaagccccatgcaacacgttccgggctgttgtgtagatgtttattctagtcactaggggaagcacataaaaacacctgaggtgtgtgtgctgaagggcgaattttgtccttttggggagttcatgatataaacatctagaaccaaaaagtcaaatcagaaggtcagtttaggctttagttctctttgaggaaagatttaaagcaatagactataatagttacccggtagactaaaaaatttgcctttaattcttttgattggaatttttttttacaaagtttggagcatggaaacaaatgaaaattgaacctgcttattttttaggatggtgtattgatggccccaacagaactttctaaaatcatgcgataaacatatatgatagtagttgtaaaatgcttcttgttttgaaaatgttgagtaattatcgatagaaattttgctgtccattcatacattccttcaattaactttcattgttaaaaaattgggggattgatgtttggtttggtttgtggggagtgaagaggactactggagggaccttgtttgcttgctttttttctttttttaatttatcatcaagtctaggaaaggagtaagttgccgacaattgtcacttttccctcctaagaaagtaacatgttaagattcccacctaccagcctgggtgacagtgagactcccgtctcaaaaaaaaa

SEQ ID NO: 441913 - DNA, 2416 bp, Homo sapiens
agagacgcccgccccctttacgtcgtgctctgaggaggccaggagatttctggcggcgccggcgccattttgctggagcctgcgaccgagtgggagtggagtggagcggctgtggttgccgactctttcctcttccccacggtccagtcagcgggttaattaggccatcggccctcgagccgagacttgtctcttatttagttctggggagcgcctcgtcgacatgagtgatgtggaggaaaacaacttcgagggcagagtgagtacaaagccgcgggaccgtctaggcggcggcccaatgctcggggtttcacgggaacaagcgcggtcgggcggggttgcgggtagtcccgcgaggagcaacctctggagccatcgcgattgattcctcccatcccaagatggcttctgggttccactccttccccaaacaccacggataacacccctcccccttttttggaggctgactgatacctggacttctgggtcctcttccctccccgcccccgcattgcttcctcccttctccccacccctgaggcttccttatgtctgctccgaggtgtgggtccccgtcgcggttgggcgggaggaggcggcagggagctcccctccgtccggatagtggtaggtgcttcctgcggtggcatttctggcgaccccgagcatcgtagagggtctcgggatcgaaagtgcgcggggctgctttccgggcggggagaagctggcgtgggactagctggggcctgtgtctccttggctctctatttcagtgagcggccgcgtctctgttggaaccggcggcgttgcgtctaaaaaggcgaaagccttgaggttgaaggtgggacgagcctaatgaagtggagtctcgctctcagtcaaaatctccaacgggaactcctgctcgtgtaaaatcggagagcaggtcaggatctcgtagtccatcaagggtttccaaacactctgaatcccattctcgatcaagatcaaaatccaggtcgaggtcaaggagacattctcatagacgttacactcgatccagatcccactctcactctcataggagacgatctcgaagtagatcatatacaccagaataccggcggcgaaggagccgaagccattctccaatgtctaaccggagaagacatactggcagcagggcaaatccagatcccaacacttgccttggagtgtttggcctcagtttgtacacaacagagagggatcttcgtgaagtattttctcgatatggaccattgagtggtgtcaatgtggtttatgatcagcgaactgggcgatctcgaggatttgcttttgtgtattttgagagaatagatgactcaaaggaggctatggaaagggcaaatggaatggagctggatggtagaagaattcgggtggattattctataaccaagagagcgcacacaccaacaccaggcatctacatgggcagaccaactcatagtggtgggggtggtggaggaggcggcggcggtggaggtggaggtggtggcagacgtcgagattcttactatgatagaggatatgatcgtgggtatgacagatatgaagactatgattaccgatacagaagacgatcaccttctccttattatagtcgatatagatcacgatcaagatctcgttcctacagcccaagtatgtgaactttacttttgtagcataaaaaacctcatttctaattaatggcttactttagaatattagagtataaggtggaaggtggcagttaatagttggaaaaatatgaggcaaattaaactataattgttaactttttttttttttttttttttttgggttttcctcttttgggacgctattgataacggaatggttgcaattaaggacattttttttcctcttttttttttttttttttttaattctgagatttccccaagctgtggattcttcctactccttaagaaaaaaactttggtttatttagcatctacacttttgtcagttgtgttgctgttttccacccattttattatactcttaaaagatgtaattgttgtcattttgaacagttaaacatcttgagtataaaaagaaccccaatgttatgttatgctttgtaaatttttttttttgcttttacctagataaacttctagctaatcaaataaggaaagaaactgtctttttaaagcttcttttgtgttagatactgtattagagatctgcatttatcatgagttcctttttttttttaactttatttttgggaaagtaacacatgaagtagttcagtcatgtcaggtttgtctggggtggaatggaacagtcaggtagttgaaagtttttttttagagatgaaaagcttgtgaactcctgtaaaacatgctgtatttgaaatacatctgttaaaacttaaaaa

SEQ ID NO: 441914 - DNA, 2339 bp, Homo sapiens
agagacgcccgccccctttacgtcgtgctctgaggaggccaggagatttctggcggcgccggcgccattttgctggagcctgcgaccgagtgggagtggagtggagcggctgtggttgccgactctttcctcttccccacggtccagtcagcgggttaattaggccatcggccctcgagccgagacttgtctcttatttagttctggggagcgcctcgtcgacatgagtgatgtggaggaaaacaacttcgagggcagagtgagtacaaagccgcgggaccgtctaggcggcggcccaatgctcggggtttcacgggaacaagcgcggtcgggcggggttgcgggtagtcccgcgaggagcaacctctggagccatcgcgattgattcctcccatcccaagatggcttctgggttccactccttccccaaacaccacggataacacccctcccccttttttggaggctgactgatacctggacttctgggtcctcttccctccccgcccccgcattgcttcctcccttctccccacccctgaggcttccttatgtctgctccgaggtgtgggtccccgtcgcggttgggcgggaggaggcggcagggagctcccctccgtccggatagtggtaggtgcttcctgcggtggcatttctggcgaccccgagcatcgtagagggtctcgggatcgaaagtgcgcggggctgctttccgggcggggagaagctggcgtgggactagctggggcctgtgtctccttggctctctatttcagtgagcggccgcgtctctgttggaaccggcggcgttgcgtctaaaaaggcgaaagccttgaggttgaaggtgggacgagcctaatgaagtggagtctcgctctcagtcaaaatctccaacgggaactcctgctcgtgtaaaatcggagagcaggtcaggatctcgtagtccatcaagggtttccaaacactctgaatcccattctcgatcaagatcaaaatccaggtcgaggtcaaggagacattctcatagacgttacactcgatccagatcccactctcactctcataggagacgatctcgaagtagatcatatacaccagaataccggcggcgaaggagccgaagccattctccaatgtctaaccggagaagacatactggcagcagggcaaatccagatcccaacacttgccttggagtgtttggcctcagtttgtacacaacagagagggatcttcgtgaagtattttctcgatatggaccattgagtggtgtcaatgtggtttatgatcagcgaactgggcgatctcgaggatttgcttttgtgtattttgagagaatagatgactcaaaggaggctatggaaagggcaaatggaatggagctggatggtagaagaattcgggtggattattctataaccaagagagcgcacacaccaacaccaggcatctacatgggcagaccaactcatagtggtgggggtggtggaggaggcggcggcggtggaggtggaggtggtggcagacgtcgagattcttactatgatagaggatatgatcgtgggtatgacagatatgaagactatgattaccgatacagaagacgatcaccttctccttattatagtcgatatagatcacgatcaagatctcgttcctacagcccaagacgctattgataacggaatggttgcaattaaggacattttttttcctcttttttttttttttttttttaattctgagatttccccaagctgtggattcttcctactccttaagaaaaaaactttggtttatttagcatctacacttttgtcagttgtgttgctgttttccacccattttattatactcttaaaagatgtaattgttgtcattttgaacagttaaacatcttgagtataaaaagaaccccaatgttatgttatgctttgtaaatttttttttttgcttttacctagataaacttctagctaatcaaataaggaaagaaactgtctttttaaagcttcttttgtgttagatactgtattagagatctgcatttatcatgagttcctttttttttttaactttatttttgggaaagtaacacatgaagtagttcagtcatgtcaggtttgtctggggtggaatggaacagtcaggtagttgaaagtttttttttagagatgaaaagcttgtgaactcctgtaaaacatgctgtatttgaaatacatctgttaaaacttaaaaaaaaaaacaaaaacccttgtatccatacttcactgtccgtcgtttacaacgttgtgactgggccctggggtacccaacttcgccttgcagacttccctttt

SEQ ID NO: 441915 - DNA, 1755 bp, Homo sapiens
agagacgcccgccccctttacgtcgtgctctgaggaggccaggagatttctggcggcgccggcgccattttgctggagcctgcgaccgagtgggagtggagtggagcggctgtggttgccgactctttcctcttccccacggtccagtcagcgggttaattaggccatcggccctcgagccgagacttgtctcttatttagttctggggagcgcctcgtcgacatgagtgatgtggaggaaaacaacttcgagggcagagtgagtacaaagccgcgggaccgtctaggcggcggcccaatgctcggggtttcacgggaacaagcgcggtcgggcggggttgcgggtagtcccgcgaggagcaacctctggagccatcgcgattgattcctcccatcccaagatggcttctgggttccactccttccccaaacaccacggataacacccctcccccttttttggaggctgactgatacctggacttctgggtcctcttccctccccgcccccgcattgcttcctcccttctccccacccctgaggcttccttatgtctgctccgaggtgtgggtccccgtcgcggttgggcgggaggaggcggcagggagctcccctccgtccggatagtggtaggtgcttcctgcggtggcatttctggcgaccccgagcatcgtagagggtctcgggatcgaaagtgcgcggggctgctttccgggcggggagaagctggcgtgggactagctggggcctgtgtctccttggctctctatttcagtgagcggccgcgtctctgttggaaccggcggcgttgcgtctaaaaaggcgaaagccttgaggttgaaggtgggacgagcctaatgaagtggagtctcgctctcagtcaaaatctccaacgggaactcctgctcgtgtaaaatcggagagcaggtcaggatctcgtagtccatcaagggtttccaaacactctgaatcccattctcgatcaagatcaaaatccaggtcgaggtcaaggagacattctcatagacgttacactcgatccagatcccactctcactctcataggagacgatctcgaagtagatcatatacaccagaataccggcggcgaaggagccgaagccattctccaatgtctaaccggagaagacatactggcagcagggcaaatccagatcccaacacttgccttggagtgtttggcctcagtttgtacacaacagagagggatcttcgtgaagtattttctcgatatggaccattgagtggtgtcaatgtggtttatgatcagcgaactgggcgatctcgaggatttgcttttgtgtattttgagagaatagatgactcaaaggaggctatggaaagggcaaatggaatggagctggatggtagaagaattcgggtggattattctataaccaagagagcgcacacaccaacaccaggcatctacatgggcagaccaactcagtaagagttcaagtttcctaagctaaactatgaaatccaccagaaatatgtgcaaaattttgattactcagaaacttttttcctataattagaattgattctggcaaggggcaacatggcaaaaccctgcttctactaaaaaaaaataaaaaatcagccaggtgtggtggcacatgcctgtaatcccagctgctcgggagctgaggcacaggaatcacttgaacttgggaggcagaggttgcagtgagcctgggcaacagagtgagactctttctcaaaaaaga

SEQ ID NO: 441916 - DNA, 1388 bp, Homo sapiens
agagacgcccgccccctttacgtcgtgctctgaggaggccaggagatttctggcggcgccggcgccattttgctggagcctgcgaccgagtgggagtggagtggagcggctgtggttgccgactctttcctcttccccacggtccagtcagcgggttaattaggccatcggccctcgagccgagacttgtctcttatttagttctggggagcgcctcgtcgacatgagtgatgtggaggaaaacaacttcgagggcagagtgagtacaaagccgcgggaccgtctaggcggcggcccaatgctcggggtttcacgggaacaagcgcggtcgggcggggttgcgggtagtcccgcgaggagcaacctctggagccatcgcgattgattcctcccatcccaagatggcttctgggttccactccttccccaaacaccacggataacacccctcccccttttttggaggctgactgatacctggacttctgggtcctcttccctccccgcccccgcattgcttcctcccttctccccacccctgaggcttccttatgtctgctccgaggtgtgggtccccgtcgcggttgggcgggaggaggcggcagggagctcccctccgtccggatagtggtaggtgcttcctgcggtggcatttctggcgaccccgagcatcgtagagggtctcgggatcgaaagtgcgcggggctgctttccgggcggggagaagctggcgtgggactagctggggcctgtgtctccttggctctctatttcagtgagcggccgcgtctctgttggaaccggcggcgttgcgtctaaaaaggcgaaagccttgaggttgaaggtgggacgagcctaatgaagtggagtctcgctctcagtcaaaatctccaacgggaactcctgctcgtgtaaaatcggagagcaggtcaggatctcgtagtccatcaagggtttccaaacactctgaatcccattctcgatcaagatcaaaatccaggtcgaggtcaaggagacattctcatagacgttacactcgatccagatcccactctcactctcataggagacgatctcgaagtagatcatatacaccagaataccggcggcgaaggagccgaagccattctccaatgtctaaccggagaagacatactggcagcagggcaaatccagatcccaacacttgccttggagtgtttggcctcagtttgtacacaacagagagggatcttcgtgaagtattttctcgatatggaccattgagtggtgtcaatgtggtttatgatcagcgaactgggcgatctcgaggatttgcttttgtgtattttgagagaatagatgactcaaaggaggtaaatttgtcttttatatgcctgattatagta

SEQ ID NO: 441917 - DNA, 1587 bp, Homo sapiens
agagacgcccgccccctttacgtcgtgctctgaggaggccaggagatttctggcggcgccggcgccattttgctggagcctgcgaccgagtgggagtggagtggagcggctgtggttgccgactctttcctcttccccacggtccagtcagcgggttaattaggccatcggccctcgagccgagacttgtctcttatttagttctggggagcgcctcgtcgacatgagtgatgtggaggaaaacaacttcgagggcagagagtctcgctctcagtcaaaatctccaacgggaactcctgctcgtgtaaaatcggagagcaggtcaggatctcgtagtccatcaagggtttccaaacactctgaatcccattctcgatcaagatcaaaatccagatcccactctcactctcataggagacgatctcgaagtagatcatatacaccagaataccggcggcgaaggagccgaagccattctccaatgtctaaccggagaagacatactggcagcagggcaaatccagatcccaacacttgccttggagtgtttggcctcagtttgtacacaacagagagggatcttcgtgaagtattttctcgatatggaccattgagtggtgtcaatgtggtttatgatcagcgaactgggcgatctcgaggatttgcttttgtgtattttgagagaatagatgactcaaaggaggctatggaaagggcaaatggaatggagctggatggtagaagaattcgggtggattattctataaccaagagagcgcacacaccaacaccaggcatctacatgggcagaccaactcatagtggtgggggtggtggaggaggcggcggcggtggaggtggaggtggtggcagacgtcgagattcttactatgatagaggatatgatcgtgggtatgacagatatgaagactatgattaccgatacagaagacgatcaccttctccttattatagtcgatatagatcacgatcaagatctcgttcctacagcccaagacgctattgataacggaatggttgcaattaaggacattttttttcctcttttttttttttttttttttaattctgagatttccccaagctgtggattcttcctactccttaagaaaaaaactttggtttatttagcatctacacttttgtcagttgtgttgctgttttccacccattttattatactcttaaaagatgtaattgttgtcattttgaacagttaaacatcttgagtataaaaagaaccccaatgttatgttatgctttgtaaatttttttttttgcttttacctagataaacttctagctaatcaaataaggaaagaaactgtctttttaaagcttcttttgtgttagatactgtattagagatctgcatttatcatgagttcctttttttttttaactttatttttgggaaagtaacacatgaagtagttcagtcatgtcaggtttgtctggggtggaatggaacagtcaggtagttgaaagtttttttttagagatgaaaagcttgtgaactcctgtaaaacatgctgtatttgaaatacatctgttaaaacttaaaaa

SEQ ID NO: 441918 - DNA, 919 bp, Homo sapiens
  misc_feature (886)..(886): n is a, c, g, or t
  misc_feature (889)..(889): n is a, c, g, or t
  misc_feature (892)..(892): n is a, c, g, or t
  misc_feature (917)..(917): n is a, c, g, or t
agagacgcccgccccctttacgtcgtgctctgaggaggccaggagatttctggcggcgccggcgccattttgctggagcctgcgaccgagtgggagtggagtggagcggctgtggttgccgactctttcctcttccccacggtccagtcagcgggttaattaggccatcggccctcgagccgagacttgtctcttatttagttctggggagcgcctcgtcgacatgagtgatgtggaggaaaacaacttcgagggcagagagtctcgctctcagtcaaaatctccaacgggaactcctgctcgtgtaaaatcggagagcaggtcaggatctcgtagtccatcaagggtttccaaacactctgaatcccattctcgatcaagatcaaaatccaggtcgaggtcaaggagacattctcatagacgttacactcgatccagatcccactctcactctcataggagacgatctcgaagtagatcatatacaccagaataccggcggcgaaggagccgaagccattctccaatgtctaaccggagaagacatactggcagcagggcaaatccagatcccaacacttgccttggagtgtttggcctcagtttgtacacaacagagagggatcttcgtgaagtattttctcgatatggaccattgagtggtgtcaatgtggtttatgatcagcgaactgggcgatctcgaggatttgcttttgtgtattttgagagaatagatgactcaaaggaggctatggaaagggcaaatggaatggagctggatggtagaagaattcgggtggattattctataaccaagagagcgcacacaccaacaccaggcatctacatgggcagaccaactcatatggtgggggtggtggaagangcngcngcggtggaagtggaagtggtggcanac

SEQ ID NO: 441919 - DNA, 659 bp, Homo sapiens
accgcaccggcctcaccgcagtgtcccacaatggaagctacgtctacttccccaaaattggggacaaaaacaaagtcactatttgggacttggcagaaggcgaggaacaagattccctggacacctccagtgagatcaggtgtctggaggttgctgagcagcgcaagctcctatttacgggcctcgtgtcgggggtcgtccttgtgttccccctgaattccaggcaggacgtgatatgcattccccctcccgaggcccggaaagcaatcaactgcatgtccctgagcaagtgcgaggaccgcctggccatcgcctatgacaacatcgtcctggtgctggacatcacctccggggacccctgcccggtcatcgatgggccaagatacaccttttacactcagctgcccgagaccctctccagcgtggccattctgacggactaccgcgtggtctacagcatgaccaatggggacctctttctttacgagtgtgcaacttccaaagcgtttcccttggagacccacaggagccgagttgcctgtgtggaggtcagccacaaggagcagctggtggtcagcgggtctgaggatgccctgctgtgtctctgggacctgcaggcacgcaagtggaaattcgagatgagctacacggtgggtggc

SEQ ID NO: 441920 - DNA, 1953 bp, Homo sapiens
tgattggctgcgctggggcggaccgccgggggcgaggcccctcctctcaggaaggtctagggggcgcccccgggggagggcggttgcctagcaacggggcggtggctcggcgggtacccggcctagtgagctcgagaagccgctaggccgcagccggcccaccctgggctccggagaggtgcagcccccggccccggagccctcccgggggcgccagaaagccactttgggcctgtccccaggaaaacgtggtctcagctgtggggccgtcgagcaggcctcgacccctcttcctgacctgaggagaggcccagcgcctcaccctcacccagtctttgtgcagggcgccggcggccattgtgtccgggcggggaatggaggacccggcaatccccaactgccacgttctgggcctttggggaattcagagcaaaccagcggcatttgttgggggtctccggccttcaacatcacagacaggcctgggggtggccttcccaaagtcagattgcagatctgaggcagtttccccctccctgcgtccctcactgaaaccttgaaccccattgagaagtccctttagggtttcggacgcctccacctcaccctgggctggtgcttaaatagaaaaaagaaaaacaaaaaccaactaaatccataccagccacctccgggagagtactcctggctcccagtaggaggcggagagccaaggggcgtgcaagagagagggggctgggctcccgggtggcaggaggccgcggctgcggagcggccgccctcgatccgggcgatggaggaggaagcaagcgagggggctggttcctgagcttcgcaattcctgtgtcgccttctgggctcccagcctgccgggtcgcatgatccctccggccggagctggtttttttgccagccaccgcgaggccagagcagaagaaaccaagctaccccaacatccaccgaccacacccaaccgaaaaaacaaaagaacaaccaaaaacaacaccaaccaaccaaaccaaagagcgaagaagatgaatacgacgaggacacggcccgaacaggaatgacgaaagacgtaagctgaagaggatacgagacgaatataagacacgaaaagccgaagagtacggagacacgtgagaagaaacgcagtgaatattgtatgacaataatactaattaaaaagtccccgagacgccgaacgagaaatagatagagaagacacaagatgcaaaggcagtgagaggcgaaattgaagggagaaaacgaggagcgagcgacccgaaacagagtcgagtggcctcagaaaaaggaataatagggcgaagtaagtgacagtgggggagtggaaattgaggaagtggagaggatgaatcaggtagacggaagaagaagcgcgccctaatgaacagagagtgaatcgaggagagggactggtggaaggacgatgataggaagccgcgcgccagtggaagtcgcgaggacgaaagaagtgcgtaggggtgcgcgaagggagcctaagaagcggagtctcggagagtttcaatggaagcagggttcccctctatgcgtgtatggagaacatggaatgtgagagcctcggaccgaaaggggctagcgaaagtgcaattgtcgagtgtgagtggagaaaggagctcgcaggtgggaatgggtgaaaaaaacgctccgaagtaagtgtcgacagtgcaggtgaaaagagtcaacaagcgatgcgaaggaatgaagagacatgaagctcagggagctgaaacgttaatgggtgagagagaacaatgctgaaaagcatgtgtgaacctccagggacgtaggatgaagataagaggcccagtgtgaaagaacctcgagaaagcggaggatcccggcaaggggggacgccatgctgataggacagctccccccgagatagtaacccattgcatagagatcgcg

SEQ ID NO: 441921 - DNA, 3355 bp, Homo sapiens
tgattggctgcgctggggcggaccgccgggggcgaggcccctcctctcaggaaggtctagggggcgcccccgggggagggcggttgcctagcaacggggcggtggctcggcgggtacccggcctagtgagctcgagaagccgctaggccgcagccggcccaccctgggctccggagaggtgcagcccccggccccggagccctcccgggggcgccagaaagccactttgggcctgtccccaggaaaacgtggtctcagctgtggggccgtcgagcaggcctcgacccctcttcctgacctgaggagaggcccagcgcctcaccctcacccagtctttgtgcagggcgccggcggccattgtgtccgggcggggaatggaggacccggcaatccccaactgccacgttctgggcctttggggaattcagagcaaaccagcggcatttgttgggggtctccggccttcaacatcacagacaggcctgggggtggccttcccaaagtcagattgcagatctgaggcagtttccccctccctgcgtccctcactgaaaccttgaaccccattgagaagtccctttagggtttcggacgcctccacctcaccctgggctggtgcttaaatagaaaaaagaaaaacaaaaaccaactaaatccataccagccacctccgggagagtactcctggctcccagtaggaggcggagagccaaggggcgtgcaagagagagggggctgggctcccgggtggcaggaggccgcggctgcggagcggccgccctcgatccgggcgatggaggaggaagcaagcgagggggctggttcctgagcttcgcaattcctgtgtcgccttctgggctcccagcctgccgggtcgcatgatccctccggccggagctggtttttttgccagccaccgcgaggccggctgagttaccggcatccccgcagccacctcctctcccgacctgtgatacaaaagatcttccgggggctgcacctgcctgcctttgcctaaggcggatttgaatctctttctctcccttcagaaatcttatcttggctttggatcttagaagagaatcactaaccagagacgagactcagtgagtgagcaggtgttttggacaatggactggttgagcccatccctattataaaaatgtctcagagcaaccgggagctggtggttgactttctctcctacaagctttcccagaaaggatacagctggagtcagtttagtgatgtggaagagaacaggactgaggccccagaagggactgaatcggagatggagacccccagtgccatcaatggcaacccatcctggcacctggcagacagccccgcggtgaatggagccactggccacagcagcagtttggatgcccgggaggtgatccccatggcagcagtaaagcaagcgctgagggaggcaggcgacgagtttgaactgcggtaccggcgggcattcagtgacctgacatcccagctccacatcaccccagggacagcatatcagagctttgaacaggtagtgaatgaactcttccgggatggggtaaactggggtcgcattgtggcctttttctccttcggcggggcactgtgcgtggaaagcgtagacaaggagatgcaggtattggtgagtcggatcgcagcttggatggccacttacctgaatgaccacctagagccttggatccaggagaacggcggctgggatacttttgtggaactctatgggaacaatgcagcagccgagagccgaaagggccaggaacgcttcaaccgctggttcctgacgggcatgactgtggccggcgtggttctgctgggctcactcttcagtcggaaatgaccagacactgaccatccactctaccctcccacccccttctctgctccaccacatcctccgtccagccgccattgccaccaggagaaccactacatgcagcccatgcccacctgcccatcacagggttgggcccagatctggtcccttgcagctagttttctagaatttatcacacttctgtgagacccccacacctcagttcccttggcctcagaattcacaaaatttccacaaaatctgtccaaaggaggctggcaggtatggaagggtttgtggctgggggcaggagggccctacctgattggtgcaacccttaccccttagcctccctgaaaatgtttttctgccagggagcttgaaagttttcagaacctcttccccagaaaggagactagattgcctttgttttgatgtttgtggcctcagaattgatcattttccccccactctccccacactaacctgggttccctttccttccatccctaccccctaagagccatttaggggccacttttgactagggattcaggctgcttgggataaagatgcaaggaccaggactccctcctcacctctggactggctagagtcctcactcccagtccaaatgtcctccagaagcctctggctagaggccagccccacccaggagggagggggctatagctacaggaagcaccccatgccaaagctagggtggcccttgcagttcagcaccaccctagtcccttcccctccctggctcccatgaccatactgagggaccaactgggcccaagacagatgccccagagctgtttatggcctcagctgcctcacttcctacaagagcagcctgtggcatctttgccttgggctgctcctcatggtgggttcaggggactcagccctgaggtgaaagggagctatcaggaacagctatgggagccccagggtcttccctacctcaggcaggaagggcaggaaggagagcctgctgcatggggtggggtagggctgactagaagggccagtcctgcctggccaggcagatctgtgccccatgcctgtccagcctgggcagccaggctgccaaggccagagtggcctggccaggagctcttcaggcctccctctctcttctgctccacccttggcctgtctcatccccaggggtcccagccaccccgggctctctgctgtacatatttgagactagtttttattccttgtgaagatgatatactatttttgttaagcgtgtctgtatttatgtgtgaggagctgctggcttgcagtgcgcgtgcacgtggagagctggtgcccggagattggacggcctgatgctccctcccctgccctggtccagggaagctggccgagggtcctggctcctgaggggcatctgcccctcccccaacccccaccccacacttgttccagctctttgaaatagtctgtgtgaaggtgaaagtgcagttcagtaataaactgtgtttactcagtgaa

SEQ ID NO: 441922 - DNA, 3537 bp, Homo sapiens
tgattggctgcgctggggcggaccgccgggggcgaggcccctcctctcaggaaggtctagggggcgcccccgggggagggcggttgcctagcaacggggcggtggctcggcgggtacccggcctagtgagctcgagaagccgctaggccgcagccggcccaccctgggctccggagaggtgcagcccccggccccggagccctcccgggggcgccagaaagccactttgggcctgtccccaggaaaacgtggtctcagctgtggggccgtcgagcaggcctcgacccctcttcctgacctgaggagaggcccagcgcctcaccctcacccagtctttgtgcagggcgccggcggccattgtgtccgggcggggaatggaggacccggcaatccccaactgccacgttctgggcctttggggaattcagagcaaaccagcggcatttgttgggggtctccggccttcaacatcacagacaggcctgggggtggccttcccaaagtcagattgcagatctgaggcagtttccccctccctgcgtccctcactgaaaccttgaaccccattgagaagtccctttagggtttcggacgcctccacctcaccctgggctggtgcttaaatagaaaaaagaaaaacaaaaaccaactaaatccataccagccacctccgggagagtactcctggctcccagtaggaggcggagagccaaggggcgtgcaagagagagggggctgggctcccgggtggcaggaggccgcggctgcggagcggccgccctcgatccgggcgatggaggaggaagcaagcgagggggctggttcctgagcttcgcaattcctgtgtcgccttctgggctcccagcctgccgggtcgcatgatccctccggccggagctggtttttttgccagccaccgcgaggccggctgagttaccggcatccccgcagccacctcctctcccgacctgtgatacaaaagatcttccgggggctgcacctgcctgcctttgcctaaggcggatttgaatgtaggtggtgcgggggagcgggagtggggcgggggggactgcccagggagtgactttccgaggaaggcatttcggagaagacgggggtagaaaaggctggtgggagattcagagtccactggtgctttcgatttgacttaagtgaagtatcttggaacctagacccagaccttcgtaagacccacaaagaaaccagttctgaatcttatcttggctttggatcttagaagagaatcactaaccagagacgagactcagtgagtgagcaggtgttttggacaatggactggttgagcccatccctattataaaaatgtctcagagcaaccgggagctggtggttgactttctctcctacaagctttcccagaaaggatacagctggagtcagtttagtgatgtggaagagaacaggactgaggccccagaagggactgaatcggagatggagacccccagtgccatcaatggcaacccatcctggcacctggcagacagccccgcggtgaatggagccactggccacagcagcagtttggatgcccgggaggtgatccccatggcagcagtaaagcaagcgctgagggaggcaggcgacgagtttgaactgcggtaccggcgggcattcagtgacctgacatcccagctccacatcaccccagggacagcatatcagagctttgaacaggtagtgaatgaactcttccgggatggggtaaactggggtcgcattgtggcctttttctccttcggcggggcactgtgcgtggaaagcgtagacaaggagatgcaggtattggtgagtcggatcgcagcttggatggccacttacctgaatgaccacctagagccttggatccaggagaacggcggctgggatacttttgtggaactctatgggaacaatgcagcagccgagagccgaaagggccaggaacgcttcaaccgctggttcctgacgggcatgactgtggccggcgtggttctgctgggctcactcttcagtcggaaatgaccagacactgaccatccactctaccctcccacccccttctctgctccaccacatcctccgtccagccgccattgccaccaggagaaccactacatgcagcccatgcccacctgcccatcacagggttgggcccagatctggtcccttgcagctagttttctagaatttatcacacttctgtgagacccccacacctcagttcccttggcctcagaattcacaaaatttccacaaaatctgtccaaaggaggctggcaggtatggaagggtttgtggctgggggcaggagggccctacctgattggtgcaacccttaccccttagcctccctgaaaatgtttttctgccagggagcttgaaagttttcagaacctcttccccagaaaggagactagattgcctttgttttgatgtttgtggcctcagaattgatcattttccccccactctccccacactaacctgggttccctttccttccatccctaccccctaagagccatttaggggccacttttgactagggattcaggctgcttgggataaagatgcaaggaccaggactccctcctcacctctggactggctagagtcctcactcccagtccaaatgtcctccagaagcctctggctagaggccagccccacccaggagggagggggctatagctacaggaagcaccccatgccaaagctagggtggcccttgcagttcagcaccaccctagtcccttcccctccctggctcccatgaccatactgagggaccaactgggcccaagacagatgccccagagctgtttatggcctcagctgcctcacttcctacaagagcagcctgtggcatctttgccttgggctgctcctcatggtgggttcaggggactcagccctgaggtgaaagggagctatcaggaacagctatgggagccccagggtcttccctacctcaggcaggaagggcaggaaggagagcctgctgcatggggtggggtagggctgactagaagggccagtcctgcctggccaggcagatctgtgccccatgcctgtccagcctgggcagccaggctgccaaggccagagtggcctggccaggagctcttcaggcctccctctctcttctgctccacccttggcctgtctcatccccaggggtcccagccaccccgggctctctgctgtacatatttgagactagtttttattccttgtgaagatgatatactatttttgttaagcgtgtctgtatttatgtgtgaggagctgctggcttgcagtgcgcgtgcacgtggagagctggtgcccggagattggacggcctgatgctccctcccctgccctggtccagggaagctggccgagggtcctggctcctgaggggcatctgcccctcccccaacccccaccccacacttgttccagctctttgaaatagtctgtgtgaaggtgaaagtgcagttcagtaataaactgtgtttactcagtgaa

SEQ ID NO: 441923 - DNA, 3486 bp, Homo sapiens
tgattggctgcgctggggcggaccgccgggggcgaggcccctcctctcaggaaggtctagggggcgcccccgggggagggcggttgcctagcaacggggcggtggctcggcgggtacccggcctagtgagctcgagaagccgctaggccgcagccggcccaccctgggctccggagaggtgcagcccccggccccggagccctcccgggggcgccagaaagccactttgggcctgtccccaggaaaacgtggtctcagctgtggggccgtcgagcaggcctcgacccctcttcctgacctgaggagaggcccagcgcctcaccctcacccagtctttgtgcagggcgccggcggccattgtgtccgggcggggaatggaggacccggcaatccccaactgccacgttctgggcctttggggaattcagagcaaaccagcggcatttgttgggggtctccggccttcaacatcacagacaggcctgggggtggccttcccaaagtcagattgcagatctgaggcagtttccccctccctgcgtccctcactgaaaccttgaaccccattgagaagtccctttagggtttcggacgcctccacctcaccctgggctggtgcttaaatagaaaaaagaaaaacaaaaaccaactaaatccataccagccacctccgggagagtactcctggctcccagtaggaggcggagagccaaggggcgtgcaagagagagggggctgggctcccgggtggcaggaggccgcggctgcggagcggccgccctcgatccgggcgatggaggaggaagcaagcgagggggctggttcctgagcttcgcaattcctgtgtcgccttctgggctcccagcctgccgggtcgcatgatccctccggccggagctggtttttttgccagccaccgcgaggccggctgagttaccggcatccccgcagccacctcctctcccgacctgtgatacaaaagatcttccgggggctgcacctgcctgcctttgcctaaggcggatttgaataatcttatcttggctttggatcttagaagagaatcactaaccagagacgagactcagtgagtgagcaggtgttttggacaatggactggttgagcccatccctattataaaaatgtctcagagcaaccgggagctggtggttgactttctctcctacaagctttcccagaaaggatacagctggagtcagtttagtgatgtggaagagaacaggactgaggccccagaagggactgaatcggagatggagacccccagtgccatcaatggcaacccatcctggcacctggcagacagccccgcggtgaatggagccactggccacagcagcagtttggatgcccgggaggtgatccccatggcagcagtaaagcaagcgctgagggaggcaggcgacgagtttgaactgcggtaccggcgggcattcagtgacctgacatcccagctccacatcaccccagggacagcatatcagagctttgaacaggtagtgaatgaactcttccgggatggggtaaactggggtcgcattgtggcctttttctccttcggcggggcactgtgcgtggaaagcgtagacaaggagatgcaggtattggtgagtcggatcgcagcttggatggccacttacctgaatgaccacctagagccttggatccaggagaacggcggctgggatacttttgtggaactctatgggaacaatgcagcagccgagagccgaaagggccaggaacgcttcaaccgctggttcctgacgggcatgactgtggccggcgtggttctgctgggctcactcttcagtcggaaatgaccagacactgaccatccactctaccctcccacccccttctctgctccaccacatcctccgtccagccgccattgccaccaggagaaccactacatgcagcccatgcccacctgcccatcacagggttgggcccagatctggtcccttgcagctagttttctagaatttatcacacttctgtgagacccccacacctcagttcccttggcctcagaattcacaaaatttccacaaaatctgtccaaaggaggctggcaggtatggaagggtttgtggctgggggcaggagggccctacctgattggtgcaacccttaccccttagcctccctgaaaatgtttttctgccagggagcttgaaagttttcagaacctcttccccagaaaggagactagattgcctttgttttgatgtttgtggcctcagaattgatcattttccccccactctccccacactaacctgggttccctttccttccatccctaccccctaagagccatttaggggccacttttgactagggattcaggctgcttgggataaagatgcaaggaccaggactccctcctcacctctggactggctagagtcctcactcccagtccaaatgtcctccagaagcctctggctagaggccagccccacccaggagggagggggctatagctacaggaagcaccccatgccaaagctagggtggcccttgcagttcagcaccaccctagtcccttcccctccctggctcccatgaccatactgagggaccaactgggcccaagacagatgccccagagctgtttatggcctcagctgcctcacttcctacaagagcagcctgtggcatctttgccttgggctgctcctcatggtgggttcaggggactcagccctgaggtgaaagggagctatcaggaacagctatgggagccccagggtcttccctacctcaggcaggaagggcaggaaggagagcctgctgcatggggtggggtagggctgactagaagggccagtcctgcctggccaggcagatctgtgccccatgcctgtccagcctgggcagccaggctgccaaggccagagtggcctggccaggagctcttcaggcctccctctctcttctgctccacccttggcctgtctcatccccaggggtcccagccaccccgggctctctgctgtacatatttgagactagtttttattccttgtgaagatgatatactatttttgttaagcgtgtctgtatttatgtgtgaggagctgctggcttgcagtgcgcgtgcacgtggagagctggtgcccggagattggacggcctgatgctccctcccctgccctggtccagggaagctggccgagggtcctggctcctgaggggcatctgcccctcccccaacccccaccccacacttgttccagctctttgaaatagtctgtgtgaaggtgaaagtgcagttcagtaataaactgtgtttactcagtgaaaaaagaacacaacaaacctgccacacacaagaaccagaccgcacacagaaacaccgggcttttttggggggcaaaagaggtaataagcggcgggtaatgtggcccccactttttaagagggaacgcggccccaggagatattcgcccact

SEQ ID NO: 441924 - DNA, 3449 bp, Homo sapiens
tgattggctgcgctggggcggaccgccgggggcgaggcccctcctctcaggaaggtctagggggcgcccccgggggagggcggttgcctagcaacggggcggtggctcggcgggtacccggcctagtgagctcgagaagccgctaggccgcagccggcccaccctgggctccggagaggtgcagcccccggccccggagccctcccgggggcgccagaaagccactttgggcctgtccccaggaaaacgtggtctcagctgtggggccgtcgagcaggcctcgacccctcttcctgacctgaggagaggcccagcgcctcaccctcacccagtctttgtgcagggcgccggcggccattgtgtccgggcggggaatggaggacccggcaatccccaactgccacgttctgggcctttggggaattcagagcaaaccagcggcatttgttgggggtctccggccttcaacatcacagacaggcctgggggtggccttcccaaagtcagattgcagatctgaggcagtttccccctccctgcgtccctcactgaaaccttgaaccccattgagaagtccctttagggtttcggacgcctccacctcaccctgggctggtgcttaaatagaaaaaagaaaaacaaaaaccaactaaatccataccagccacctccgggagagtactcctggctcccagtaggaggcggagagccaaggggcgtgcaagagagagggggctgggctcccgggtggcaggaggccgcggctgcggagcggccgccctcgatccgggcgatggaggaggaagcaagcgagggggctggttcctgagcttcgcaattcctgtgtcgccttctgggctcccagcctgccgggtcgcatgatccctccggccggagctggtttttttgccagccaccgcgaggccggctgagttaccggcatccccgcagccacctcctctcccgacctgtgatacaaaagatcttccgggggctgcacctgcctgcctttgcctaaggcggatttgaataatcttatcttggctttggatcttagaagagaatcactaaccagagacgagactcagtgagtgagcaggtgttttggacaatggactggttgagcccatccctattataaaaatgtctcagagcaaccgggagctggtggttgactttctctcctacaagctttcccagaaaggatacagctggagtcagtttagtgatgtggaagagaacaggactgaggccccagaagggactgaatcggagatggagacccccagtgccatcaatggcaacccatcctggcacctggcagacagccccgcggtgaatggagccactggccacagcagcagtttggatgcccgggaggtgatccccatggcagcagtaaagcaagcgctgagggaggcaggcgacgagtttgaactgcggtaccggcgggcattcagtgacctgacatcccagctccacatcaccccagggacagcatatcagagctttgaacaggtagtgaatgaactcttccgggatggggtaaactggggtcgcattgtggcctttttctccttcggcggggcactgtgcgtggaaagcgtagacaaggagatgcaggtattggtgagtcggatcgcagcttggatggccacttacctgaatgaccacctagagccttggatccaggagaacggcggctgggatacttttgtggaactctatgggaacaatgcagcagccgagagccgaaagggccaggaacgcttcaaccgctggttcctgacgggcatgactgtggccggcgtggttctgctgggctcactcttcagtcggaaatgaccagacactgaccatccactctaccctcccacccccttctctgctccaccacatcctccgtccagccgccattgccaccaggagaaccactacatgcagcccatgcccacctgcccatcacagggttgggcccagatctggtcccttgcagctagttttctagaatttatcacacttctgtgagacccccacacctcagttcccttggcctcagaattcacaaaatttccacaaaatctgtccaaaggaggctggcaggtatggaagggtttgtggctgggggcaggagggccctacctgattggtgcaacccttaccccttagcctccctgaaaatgtttttctgccagggagcttgaaagttttcagaacctcttccccagaaaggagactagattgcctttgttttgatgtttgtggcctcagaattgatcattttccccccactctccccacactaacctgggttccctttccttccatccctaccccctaagagccatttaggggccacttttgactagggattcaggctgcttgggataaagatgcaaggaccaggactccctcctcacctctggactggctagagtcctcactcccagtccaaatgtcctccagaagcctctggctagaggccagccccacccaggagggagggggctatagctacaggaagcaccccatgccaaagctagggtggcccttgcagttcagcaccaccctagtcccttcccctccctggctcccatgaccatactgagggaccaactgggcccaagacagatgccccagagctgtttatggcctcagctgcctcacttcctacaagagcagcctgtggcatctttgccttgggctgctcctcatggtgggttcaggggactcagccctgaggtgaaagggagctatcaggaacagctatgggagccccagggtcttccctacctcaggcaggaagggcaggaaggagagcctgctgcatggggtggggtagggctgactagaagggccagtcctgcctggccaggcagatctgtgccccatgcctgtccagcctgggcagccaggctgccaaggccagagtggcctggccaggagctcttcaggcctccctctctcttctgctccacccttggcctgtctcatccccaggggtcccagccaccccgggctctctgctgtacatatttgagactagtttttattccttgtgaagatgatatactatttttgttaagcgtgtctgtatttatgtgtgaggagctgctggcttgcagtgcgcgtgcacgtggagagctggtgcccggagattggacggcctgatgctccctcccctgccctggtccagggaagctggccgagggtcctggctcctgaggggcatctgcccctcccccaacccccaccccacacttgttccagctctttgaaatagtctgtgtgaaggtgaaagtgcagttcagtaataaactgtgtttactcagtgaaaaaaccaaaacaaaaacccgcgggcctcttttcggggggcggacaacacgggttcgcatgggcctggctcagggggtcccggccccttccggcccccggggaaatccggggcc

SEQ ID NO: 441925 - DNA, 2441 bp, Homo sapiens
cgcgcactccctttgcgtctcgggctcgcgcgcgttgccgcggcaccggaagtgactgagcttgcaagttcccctgtctcttcaggggaaactgaggccggcttgttcgggagagacggcgcgagcagtcagccagaatcttatcttggctttggatcttagaagagaatcactaaccagagacgagactcagtgagtgagcaggtgttttggacaatggactggttgagcccatccctattataaaaatgtctcagagcaaccgggagctggtggttgactttctctcctacaagctttcccagaaaggatacagctggagtcagtttagtgatgtggaagagaacaggactgaggccccagaagggactgaatcggagatggagacccccagtgccatcaatggcaacccatcctggcacctggcagacagccccgcggtgaatggagccactggccacagcagcagtttggatgcccgggaggtgatccccatggcagcagtaaagcaagcgctgagggaggcaggcgacgagtttgaactgcggtaccggcgggcattcagtgacctgacatcccagctccacatcaccccagggacagcatatcagagctttgaacaggtagtgaatgaactcttccgggatggggtaaactggggtcgcattgtggcctttttctccttcggcggggcactgtgcgtggaaagcgtagacaaggagatgcaggtattggtgagtcggatcgcagcttggatggccacttacctgaatgaccacctagagccttggatccaggagaacggcggctgggatacttttgtggaactctatgggaacaatgcagcagccgagagccgaaagggccaggaacgcttcaaccgctggttcctgacgggcatgactgtggccggcgtggttctgctgggctcactcttcagtcggaaatgaccagacactgaccatccactctaccctcccacccccttctctgctccaccacatcctccgtccagccgccattgccaccaggagaaccactacatgcagcccatgcccacctgcccatcacagggttgggcccagatctggtcccttgcagctagttttctagaatttatcacacttctgtgagacccccacacctcagttcccttggcctcagaattcacaaaatttccacaaaatctgtccaaaggaggctggcaggtatggaagggtttgtggctgggggcaggagggccctacctgattggtgcaacccttaccccttagcctccctgaaaatgtttttctgccagggagcttgaaagttttcagaacctcttccccagaaaggagactagattgcctttgttttgatgtttgtggcctcagaattgatcattttccccccactctccccacactaacctgggttccctttccttccatccctaccccctaagagccatttaggggccacttttgactagggattcaggctgcttgggataaagatgcaaggaccaggactccctcctcacctctggactggctagagtcctcactcccagtccaaatgtcctccagaagcctctggctagaggccagccccacccaggagggagggggctatagctacaggaagcaccccatgccaaagctagggtggcccttgcagttcagcaccaccctagtcccttcccctccctggctcccatgaccatactgagggaccaactgggcccaagacagatgccccagagctgtttatggcctcagctgcctcacttcctacaagagcagcctgtggcatctttgccttgggctgctcctcatggtgggttcaggggactcagccctgaggtgaaagggagctatcaggaacagctatgggagccccagggtcttccctacctcaggcaggaagggcaggaaggagagcctgctgcatggggtggggtagggctgactagaagggccagtcctgcctggccaggcagatctgtgccccatgcctgtccagcctgggcagccaggctgccaaggccagagtggcctggccaggagctcttcaggcctccctctctcttctgctccacccttggcctgtctcatccccaggggtcccagccaccccgggctctctgctgtacatatttgagactagtttttattccttgtgaagatgatatactatttttgttaagcgtgtctgtatttatgtgtgaggagctgctggcttgcagtgcgcgtgcacgtggagagctggtgcccggagattggacggcctgatgctccctcccctgccctggtccagggaagctggccgagggtcctggctcctgaggggcatctgcccctcccccaacccccaccccacacttgttccagctctttgaaatagtctgtgtgaaggtgaaagtgcagttcagtaataaactgtgtttactcagtgaa

SEQ ID NO: 441926 - DNA, 2570 bp, Homo sapiens
cgcgcactccctttgcgtctcgggctcgcgcgcgttgccgcggcaccggaagtgactgagcttgcaagttcccctgtctcttcaggggaaactgaggccggcttgttcgggagagacggcgcgagcagtcagccaggtaggccggcagccaggtaggccggcccgggtccgcggcgcggaactcggccgcgaagagctcttgcgtctggaagctaccgggccgatgaagggggatgtggccccccacggctcgcggggctcgcagaatcttatcttggctttggatcttagaagagaatcactaaccagagacgagactcagtgagtgagcaggtgttttggacaatggactggttgagcccatccctattataaaaatgtctcagagcaaccgggagctggtggttgactttctctcctacaagctttcccagaaaggatacagctggagtcagtttagtgatgtggaagagaacaggactgaggccccagaagggactgaatcggagatggagacccccagtgccatcaatggcaacccatcctggcacctggcagacagccccgcggtgaatggagccactggccacagcagcagtttggatgcccgggaggtgatccccatggcagcagtaaagcaagcgctgagggaggcaggcgacgagtttgaactgcggtaccggcgggcattcagtgacctgacatcccagctccacatcaccccagggacagcatatcagagctttgaacaggtagtgaatgaactcttccgggatggggtaaactggggtcgcattgtggcctttttctccttcggcggggcactgtgcgtggaaagcgtagacaaggagatgcaggtattggtgagtcggatcgcagcttggatggccacttacctgaatgaccacctagagccttggatccaggagaacggcggctgggatacttttgtggaactctatgggaacaatgcagcagccgagagccgaaagggccaggaacgcttcaaccgctggttcctgacgggcatgactgtggccggcgtggttctgctgggctcactcttcagtcggaaatgaccagacactgaccatccactctaccctcccacccccttctctgctccaccacatcctccgtccagccgccattgccaccaggagaaccactacatgcagcccatgcccacctgcccatcacagggttgggcccagatctggtcccttgcagctagttttctagaatttatcacacttctgtgagacccccacacctcagttcccttggcctcagaattcacaaaatttccacaaaatctgtccaaaggaggctggcaggtatggaagggtttgtggctgggggcaggagggccctacctgattggtgcaacccttaccccttagcctccctgaaaatgtttttctgccagggagcttgaaagttttcagaacctcttccccagaaaggagactagattgcctttgttttgatgtttgtggcctcagaattgatcattttccccccactctccccacactaacctgggttccctttccttccatccctaccccctaagagccatttaggggccacttttgactagggattcaggctgcttgggataaagatgcaaggaccaggactccctcctcacctctggactggctagagtcctcactcccagtccaaatgtcctccagaagcctctggctagaggccagccccacccaggagggagggggctatagctacaggaagcaccccatgccaaagctagggtggcccttgcagttcagcaccaccctagtcccttcccctccctggctcccatgaccatactgagggaccaactgggcccaagacagatgccccagagctgtttatggcctcagctgcctcacttcctacaagagcagcctgtggcatctttgccttgggctgctcctcatggtgggttcaggggactcagccctgaggtgaaagggagctatcaggaacagctatgggagccccagggtcttccctacctcaggcaggaagggcaggaaggagagcctgctgcatggggtggggtagggctgactagaagggccagtcctgcctggccaggcagatctgtgccccatgcctgtccagcctgggcagccaggctgccaaggccagagtggcctggccaggagctcttcaggcctccctctctcttctgctccacccttggcctgtctcatccccaggggtcccagccaccccgggctctctgctgtacatatttgagactagtttttattccttgtgaagatgatatactatttttgttaagcgtgtctgtatttatgtgtgaggagctgctggcttgcagtgcgcgtgcacgtggagagctggtgcccggagattggacggcctgatgctccctcccctgccctggtccagggaagctggccgagggtcctggctcctgaggggcatctgcccctcccccaacccccaccccacacttgttccagctctttgaaatagtctgtgtgaaggtgaaagtgcagttcagtaataaactgtgtttactcagtgaa

SEQ ID NO: 441927 - DNA, 3493 bp, Homo sapiens
tgattggctgcgctggggcggaccgccgggggcgaggcccctcctctcaggaaggtctagggggcgcccccgggggagggcggttgcctagcaacggggcggtggctcggcgggtacccggcctagtgagctcgagaagccgctaggccgcagccggcccaccctgggctccggagaggtgcagcccccggccccggagccctcccgggggcgccagaaagccactttgggcctgtccccaggaaaacgtggtctcagctgtggggccgtcgagcaggcctcgacccctcttcctgacctgaggagaggcccagcgcctcaccctcacccagtctttgtgcagggcgccggcggccattgtgtccgggcggggaatggaggacccggcaatccccaactgccacgttctgggcctttggggaattcagagcaaaccagcggcatttgttgggggtctccggccttcaacatcacagacaggcctgggggtggccttcccaaagtcagattgcagatctgaggcagtttccccctccctgcgtccctcactgaaaccttgaaccccattgagaagtccctttagggtttcggacgcctccacctcaccctgggctggtgcttaaatagaaaaaagaaaaacaaaaaccaactaaatccataccagccacctccgggagagtactcctggctcccagtaggaggcggagagccaaggggcgtgcaagagagagggggctgggctcccgggtggcaggaggccgcggctgcggagcggccgccctcgatccgggcgatggaggaggaagcaagcgagggggctggttcctgagcttcgcaattcctgtgtcgccttctgggctcccagcctgccgggtcgcatgatccctccggccggagctggtttttttgccagccaccgcgaggccggctgagttaccggcatccccgcagccacctcctctcccgacctgtgatacaaaagatcttccgggggctgcacctgcctgcctttgcctaaggcggatttgaataatcttatcttggctttggatcttagaagagaatcactaaccagagacgagactcagtgagtgagcaggtgttttggacaatggactggttgagcccatccctattataaaaatgtctcagagcaaccgggagctggtggttgactttctctcctacaagctttcccagaaaggatacagctggagtcagtttagtgatgtggaagagaacaggactgaggccccagaagggactgaatcggagatggagacccccagtgccatcaatggcaacccatcctggcacctggcagacagccccgcggtgaatggagccactggccacagcagcagtttggatgcccgggaggtgatccccatggcagcagtaaagcaagcgctgagggaggcaggcgacgagtttgaactgcggtaccggcgggcattcagtgacctgacatcccagctccacatcaccccagggacagcatatcagagctttgaacaggtagtgaatgaactcttccgggatggggtaaactggggtcgcattgtggcctttttctccttcggcggggcactgtgcgtggaaagcgtagacaaggagatgcaggtattggtgagtcggatcgcagcttggatggccacttacctgaatgaccacctagagccttggatccaggagaacggcggctgggtgccagatgccagttttagattctggctccaccactgacacagctgggtgaccttgatccagtccctggaccctcagaggcacagcttcttggcctgtaaatggggagagacagcctgcattgcagaattgttgggaggattaaaggacaaattgggatacttttgtggaactctatgggaacaatgcagcagccgagagccgaaagggccaggaacgcttcaaccgctggttcctgacgggcatgactgtggccggcgtggttctgctgggctcactcttcagtcggaaatgaccagacactgaccatccactctaccctcccacccccttctctgctccaccacatcctccgtccagccgccattgccaccaggagaaccactacatgcagcccatgcccacctgcccatcacagggttgggcccagatctggtcccttgcagctagttttctagaatttatcacacttctgtgagacccccacacctcagttcccttggcctcagaattcacaaaatttccacaaaatctgtccaaaggaggctggcaggtatggaagggtttgtggctgggggcaggagggccctacctgattggtgcaacccttaccccttagcctccctgaaaatgtttttctgccagggagcttgaaagttttcagaacctcttccccagaaaggagactagattgcctttgttttgatgtttgtggcctcagaattgatcattttccccccactctccccacactaacctgggttccctttccttccatccctaccccctaagagccatttaggggccacttttgactagggattcaggctgcttgggataaagatgcaaggaccaggactccctcctcacctctggactggctagagtcctcactcccagtccaaatgtcctccagaagcctctggctagaggccagccccacccaggagggagggggctatagctacaggaagcaccccatgccaaagctagggtggcccttgcagttcagcaccaccctagtcccttcccctccctggctcccatgaccatactgagggaccaactgggcccaagacagatgccccagagctgtttatggcctcagctgcctcacttcctacaagagcagcctgtggcatctttgccttgggctgctcctcatggtgggttcaggggactcagccctgaggtgaaagggagctatcaggaacagctatgggagccccagggtcttccctacctcaggcaggaagggcaggaaggagagcctgctgcatggggtggggtagggctgactagaagggccagtcctgcctggccaggcagatctgtgccccatgcctgtccagcctgggcagccaggctgccaaggccagagtggcctggccaggagctcttcaggcctccctctctcttctgctccacccttggcctgtctcatccccaggggtcccagccaccccgggctctctgctgtacatatttgagactagtttttattccttgtgaagatgatatactatttttgttaagcgtgtctgtatttatgtgtgaggagctgctggcttgcagtgcgcgtgcacgtggagagctggtgcccggagattggacggcctgatgctccctcccctgccctggtccagggaagctggccgagggtcctggctcctgaggggcatctgcccctcccccaacccccaccccacacttgttccagctctttgaaatagtctgtgtgaaggtgaaagtgcagttcagtaataaactgtgtttactcagtgaa

SEQ ID NO: 441928 - DNA, 3151 bp, Homo sapiens
tgattggctgcgctggggcggaccgccgggggcgaggcccctcctctcaggaaggtctagggggcgcccccgggggagggcggttgcctagcaacggggcggtggctcggcgggtacccggcctagtgagctcgagaagccgctaggccgcagccggcccaccctgggctccggagaggtgcagcccccggccccggagccctcccgggggcgccagaaagccactttgggcctgtccccaggaaaacgtggtctcagctgtggggccgtcgagcaggcctcgacccctcttcctgacctgaggagaggcccagcgcctcaccctcacccagtctttgtgcagggcgccggcggccattgtgtccgggcggggaatggaggacccggcaatccccaactgccacgttctgggcctttggggaattcagagcaaaccagcggcatttgttgggggtctccggccttcaacatcacagacaggcctgggggtggccttcccaaagtcagattgcagatctgaggcagtttccccctccctgcgtccctcactgaaaccttgaaccccattgagaagtccctttagggtttcggacgcctccacctcaccctgggctggtgcttaaatagaaaaaagaaaaacaaaaaccaactaaatccataccagccacctccgggagagtactcctggctcccagtaggaggcggagagccaaggggcgtgcaagagagagggggctgggctcccgggtggcaggaggccgcggctgcggagcggccgccctcgatccgggcgatggaggaggaagcaagcgagggggctggttcctgagcttcgcaattcctgtgtcgccttctgggctcccagcctgccgggtcgcatgatccctccggccggagctggtttttttgccagccaccgcgaggccggctgagttaccggcatccccgcagccacctcctctcccgacctgtgatacaaaagatcttccgggggctgcacctgcctgcctttgcctaaggcggatttgaataatcttatcttggctttggatcttagaagagaatcactaaccagagacgagactcagtgagtgagcaggtgttttggacaatggactggttgagcccatccctattataaaaatgtctcagagcaaccgggagctggtggttgactttctctcctacaagctttcccagaaaggatacagctggagtcagtttagtgatgtggaagagaacaggactgaggccccagaagggactgaatcggagatggagacccccagtgccatcaatggcaacccatcctggcacctggcagacagccccgcggtgaatggagccactggccacagcagcagtttggatgcccgggaggtgatccccatggcagcagtaaagcaagcgctgagggaggcaggcgacgagtttgaactgcggtaccggcgggcattcagtgacctgacatcccagctccacatcaccccagggacagcatatcagagctttgaacaggtaggatacttttgtggaactctatgggaacaatgcagcagccgagagccgaaagggccaggaacgcttcaaccgctggttcctgacgggcatgactgtggccggcgtggttctgctgggctcactcttcagtcggaaatgaccagacactgaccatccactctaccctcccacccccttctctgctccaccacatcctccgtccagccgccattgccaccaggagaaccactacatgcagcccatgcccacctgcccatcacagggttgggcccagatctggtcccttgcagctagttttctagaatttatcacacttctgtgagacccccacacctcagttcccttggcctcagaattcacaaaatttccacaaaatctgtccaaaggaggctggcaggtatggaagggtttgtggctgggggcaggagggccctacctgattggtgcaacccttaccccttagcctccctgaaaatgtttttctgccagggagcttgaaagttttcagaacctcttccccagaaaggagactagattgcctttgttttgatgtttgtggcctcagaattgatcattttccccccactctccccacactaacctgggttccctttccttccatccctaccccctaagagccatttaggggccacttttgactagggattcaggctgcttgggataaagatgcaaggaccaggactccctcctcacctctggactggctagagtcctcactcccagtccaaatgtcctccagaagcctctggctagaggccagccccacccaggagggagggggctatagctacaggaagcaccccatgccaaagctagggtggcccttgcagttcagcaccaccctagtcccttcccctccctggctcccatgaccatactgagggaccaactgggcccaagacagatgccccagagctgtttatggcctcagctgcctcacttcctacaagagcagcctgtggcatctttgccttgggctgctcctcatggtgggttcaggggactcagccctgaggtgaaagggagctatcaggaacagctatgggagccccagggtcttccctacctcaggcaggaagggcaggaaggagagcctgctgcatggggtggggtagggctgactagaagggccagtcctgcctggccaggcagatctgtgccccatgcctgtccagcctgggcagccaggctgccaaggccagagtggcctggccaggagctcttcaggcctccctctctcttctgctccacccttggcctgtctcatccccaggggtcccagccaccccgggctctctgctgtacatatttgagactagtttttattccttgtgaagatgatatactatttttgttaagcgtgtctgtatttatgtgtgaggagctgctggcttgcagtgcgcgtgcacgtggagagctggtgcccggagattggacggcctgatgctccctcccctgccctggtccagggaagctggccgagggtcctggctcctgaggggcatctgcccctcccccaacccccaccccacacttgttccagctctttgaaatagtctgtgtgaaggtgaaagtgcagttcagtaataaactgtgtttactcagtgaa

SEQ ID NO: 441929 - DNA, 3170 bp, Homo sapiens
tgattggctgcgctggggcggaccgccgggggcgaggcccctcctctcaggaaggtctagggggcgcccccgggggagggcggttgcctagcaacggggcggtggctcggcgggtacccggcctagtgagctcgagaagccgctaggccgcagccggcccaccctgggctccggagaggtgcagcccccggccccggagccctcccgggggcgccagaaagccactttgggcctgtccccaggaaaacgtggtctcagctgtggggccgtcgagcaggcctcgacccctcttcctgacctgaggagaggcccagcgcctcaccctcacccagtctttgtgcagggcgccggcggccattgtgtccgggcggggaatggaggacccggcaatccccaactgccacgttctgggcctttggggaattcagagcaaaccagcggcatttgttgggggtctccggccttcaacatcacagacaggcctgggggtggccttcccaaagtcagattgcagatctgaggcagtttccccctccctgcgtccctcactgaaaccttgaaccccattgagaagtccctttagggtttcggacgcctccacctcaccctgggctggtgcttaaatagaaaaaagaaaaacaaaaaccaactaaatccataccagccacctccgggagagtactcctggctcccagtaggaggcggagagccaaggggcgtgcaagagagagggggctgggctcccgggtggcaggaggccgcggctgcggagcggccgccctcgatccgggcgatggaggaggaagcaagcgagggggctggttcctgagcttcgcaattcctgtgtcgccttctgggctcccagcctgccgggtcgcatgatccctccggccggagctggtttttttgccagccaccgcgaggccggctgagttaccggcatccccgcagccacctcctctcccgacctgtgatacaaaagatcttccgggggctgcacctgcctgcctttgcctaaggcggatttgaatctctttctctcccttcagaaatcttatcttggctttggatcttagaagagaatcactaaccagagacgagactcagtgagtgagcaggtgttttggacaatggactggttgagcccatccctattataaaaatgtctcagagcaaccgggagctggtggttgactttctctcctacaagctttcccagaaaggatacagctggagtcagtttagtgatgtggaagagaacaggactgaggccccagaagggactgaatcggagatggagacccccagtgccatcaatggcaacccatcctggcacctggcagacagccccgcggtgaatggagccactggccacagcagcagtttggatgcccgggaggtgatccccatggcagcagtaaagcaagcgctgagggaggcaggcgacgagtttgaactgcggtaccggcgggcattcagtgacctgacatcccagctccacatcaccccagggacagcatatcagagctttgaacaggtaggatacttttgtggaactctatgggaacaatgcagcagccgagagccgaaagggccaggaacgcttcaaccgctggttcctgacgggcatgactgtggccggcgtggttctgctgggctcactcttcagtcggaaatgaccagacactgaccatccactctaccctcccacccccttctctgctccaccacatcctccgtccagccgccattgccaccaggagaaccactacatgcagcccatgcccacctgcccatcacagggttgggcccagatctggtcccttgcagctagttttctagaatttatcacacttctgtgagacccccacacctcagttcccttggcctcagaattcacaaaatttccacaaaatctgtccaaaggaggctggcaggtatggaagggtttgtggctgggggcaggagggccctacctgattggtgcaacccttaccccttagcctccctgaaaatgtttttctgccagggagcttgaaagttttcagaacctcttccccagaaaggagactagattgcctttgttttgatgtttgtggcctcagaattgatcattttccccccactctccccacactaacctgggttccctttccttccatccctaccccctaagagccatttaggggccacttttgactagggattcaggctgcttgggataaagatgcaaggaccaggactccctcctcacctctggactggctagagtcctcactcccagtccaaatgtcctccagaagcctctggctagaggccagccccacccaggagggagggggctatagctacaggaagcaccccatgccaaagctagggtggcccttgcagttcagcaccaccctagtcccttcccctccctggctcccatgaccatactgagggaccaactgggcccaagacagatgccccagagctgtttatggcctcagctgcctcacttcctacaagagcagcctgtggcatctttgccttgggctgctcctcatggtgggttcaggggactcagccctgaggtgaaagggagctatcaggaacagctatgggagccccagggtcttccctacctcaggcaggaagggcaggaaggagagcctgctgcatggggtggggtagggctgactagaagggccagtcctgcctggccaggcagatctgtgccccatgcctgtccagcctgggcagccaggctgccaaggccagagtggcctggccaggagctcttcaggcctccctctctcttctgctccacccttggcctgtctcatccccaggggtcccagccaccccgggctctctgctgtacatatttgagactagtttttattccttgtgaagatgatatactatttttgttaagcgtgtctgtatttatgtgtgaggagctgctggcttgcagtgcgcgtgcacgtggagagctggtgcccggagattggacggcctgatgctccctcccctgccctggtccagggaagctggccgagggtcctggctcctgaggggcatctgcccctcccccaacccccaccccacacttgttccagctctttgaaatagtctgtgtgaaggtgaaagtgcagttcagtaataaactgtgtttactcagtgaa

SEQ ID NO: 441930 - DNA, 2428 bp, Homo sapiens
ttcttgcttatctccctacctagcggaggtgcaggttttatgagagatgttctatcccctcagagtatgcagaaaagcatcaagctgtggaaaataagtcatccattgaaggagctgaggtggaaggggacatgcaccatggactcaggaatgtcaagaatgcaactgtctataggctgggcctagggtgtggcaggcacttcactttaccactgagcaagagacctcctgagtttgccctggaaccccaccccctctctcattttgcatttctttgcaatttcaactcgtctgtgccagctcttgtaaaaggcaagggggtcaagtcaatagaggtcagataactggggtggggtcaggggaggtaaaggtggtgggttctcttgagctagctgactagacttgaaagccattctgtaaatgaactctctagggggataaatgattaaatagttcctgttggtttgtgcagtgacctctcctgttccctcctgctttgattctcttttggggcaaatatttgttcagctgattacaggagggacaggattccagtactgcagacacaccctctgaggcatctccaagtagggattgaggctgcttgcccactttgcctgactattgtctttggccagtggtcctaataccaggtgggttgttgccagctataaacaaaaggcagtctgggagaggtgcctggtctgctagccagcctctgcagaaggctacccctaccagagaattgccagctgcccagtggtgcatatgaaagaggtcttagacacagcaactctgggatacttttgtggaactctatgggaacaatgcagcagccgagagccgaaagggccaggaacgcttcaaccgctggttcctgacgggcatgactgtggccggcgtggttctgctgggctcactcttcagtcggaaatgaccagacactgaccatccactctaccctcccacccccttctctgctccaccacatcctccgtccagccgccattgccaccaggagaaccactacatgcagcccatgcccacctgcccatcacagggttgggcccagatctggtcccttgcagctagttttctagaatttatcacacttctgtgagacccccacacctcagttcccttggcctcagaattcacaaaatttccacaaaatctgtccaaaggaggctggcaggtatggaagggtttgtggctgggggcaggagggccctacctgattggtgcaacccttaccccttagcctccctgaaaatgtttttctgccagggagcttgaaagttttcagaacctcttccccagaaaggagactagattgcctttgttttgatgtttgtggcctcagaattgatcattttccccccactctccccacactaacctgggttccctttccttccatccctaccccctaagagccatttaggggccacttttgactagggattcaggctgcttgggataaagatgcaaggaccaggactccctcctcacctctggactggctagagtcctcactcccagtccaaatgtcctccagaagcctctggctagaggccagccccacccaggagggagggggctatagctacaggaagcaccccatgccaaagctagggtggcccttgcagttcagcaccaccctagtcccttcccctccctggctcccatgaccatactgagggaccaactgggcccaagacagatgccccagagctgtttatggcctcagctgcctcacttcctacaagagcagcctgtggcatctttgccttgggctgctcctcatggtgggttcaggggactcagccctgaggtgaaagggagctatcaggaacagctatgggagccccagggtcttccctacctcaggcaggaagggcaggaaggagagcctgctgcatggggtggggtagggctgactagaagggccagtcctgcctggccaggcagatctgtgccccatgcctgtccagcctgggcagccaggctgccaaggccagagtggcctggccaggagctcttcaggcctccctctctcttctgctccacccttggcctgtctcatccccaggggtcccagccaccccgggctctctgctgtacatatttgagactagtttttattccttgtgaagatgatatactatttttgttaagcgtgtctgtatttatgtgtgaggagctgctggcttgcagtgcgcgtgcacgtggagagctggtgcccggagattggacggcctgatgctccctcccctgccctggtccagggaagctggccgagggtcctggctcctgaggggcatctgcccctcccccaacccccaccccacacttgttccagctctttgaaatagtctgtgtgaaggtgaaagtgcagttcagtaataaactgtgtttactcagtgaa

SEQ ID NO: 441931 - DNA, 2866 bp, Homo sapiens
tgattggctgcgctggggcggaccgccgggggcgaggcccctcctctcaggaaggtctagggggcgcccccgggggagggcggttgcctagcaacggggcggtggctcggcgggtacccggcctagtgagctcgagaagccgctaggccgcagccggcccaccctgggctccggagaggtgcagcccccggccccggagccctcccgggggcgccagaaagccactttgggcctgtccccaggaaaacgtggtctcagctgtggggccgtcgagcaggcctcgacccctcttcctgacctgaggagaggcccagcgcctcaccctcacccagtctttgtgcagggcgccggcggccattgtgtccgggcggggaatggaggacccggcaatccccaactgccacgttctgggcctttggggaattcagagcaaaccagcggcatttgttgggggtctccggccttcaacatcacagacaggcctgggggtggccttcccaaagtcagattgcagatctgaggcagtttccccctccctgcgtccctcactgaaaccttgaaccccattgagaagtccctttagggtttcggacgcctccacctcaccctgggctggtgcttaaatagaaaaaagaaaaacaaaaaccaactaaatccataccagccacctccgggagagtactcctggctcccagtaggaggcggagagccaaggggcgtgcaagagagagggggctgggctcccgggtggcaggaggccgcggctgcggagcggccgccctcgatccgggcgatggaggaggaagcaagcgagggggctggttcctgagcttcgcaattcctgtgtcgccttctgggctcccagcctgccgggtcgcatgatccctccggccggagctggtttttttgccagccaccgcgaggccggctgagttaccggcatccccgcagccacctcctctcccgacctgtgatacaaaagatcttccgggggctgcacctgcctgcctttgcctaaggcggatttgaataatcttatcttggctttggatcttagaagagaatcactaaccagagacgagactcagtgagtgagcaggtgttttggacaatggactggttgagcccatccctattataaaaatgtctcagagcaaccgggagctggtggttgactttctctcctacaagctttcccagaaaggatacagctggagtcagtttagtgatgtggaagagaacaggactgaggccccagaagggactgaatcggagatggagacccccagtgccatcaatggcaacccatcctggcacctggcagacagccccgcggtgaatggagccactggccacagcagcagtttggatgcccgggaggtgatccccatggcagcagtaaagcaagcgctgagggaggcaggcgacgagtttgaactgcggtaccggcgggcattcagtgacctgacatcccagctccacatcaccccagggacagcatatcagagctttgaacaggtagtgaatgaactcttccgggatggggtaaactggggtcgcattgtggcctttttctccttcggcggggcactgtgcgtggaaagcgtagacaaggagatgcaggtattggtgagtcggatcgcagcttggatggccacttacctgaatgaccacctagagccttggatccaggagaacggcggctgggatacttttgtggaactctatgggaacaatgcagcagccgagagccgaaagggccaggaacgcttcaaccgctggttcctgacgggcatgactgtggccggcgtggttctgctgggctcactcttcagtcggaaatgaccagacactgaccatccactctaccctcccacccccttctctgctccaccacatcctccgtccagccgccattgccaccaggagaaccactacatgcagcccatgcccacctgcccatcacagggttgggcccagatctggtcccttgcagctagttttctagaatttatcacacttctgtgagacccccacacctcagttcccttggcctcagaattcacaaaatttccacaaaatctgtccaaaggaggctggcaggtatggaagggtttgtggctgggggcaggagggccctacctgattggtgcaacccttaccccttagcctccctgaaaatgtttttctgccagggagcttgaaagttttcagaacctcttccccagaaaggagactagattgcctttgttttgatgtttgtggcctcagaattgatcattttccccccactctccccacactaacctgggttccctttccttccatccctaccccctaagagccatttaggggccacttttgactagggattcaggctgcttgggataaagatgcaaggaccaggactccctcctcacctctggactggctagagtcctcactcccagtccaaatgtcctccagaagcctctggctagaggccagccccacccaggagggagggggctatagctacaggaagcaccccatgccaaagctagggtggcccttgcagttcagcaccaccctagtcccttcccctccctggctcccatgaccatactgagggaccaactgggcccaagacagatgccccagactgctggcttgcagtgcgcgtgcacgtggagagctggtgcccggagattggacggcctgatgctccctcccctgccctggtccagggaagctggccgagggtcctggctcctgaggggcatctgcccctcccccaacccccaccccacacttgttccagctctttgaaatagtctgtgtgaaggtgaaagtgcagttcagtaataaactgtgtttactcagtgaa

SEQ ID NO: 441932 - DNA, 2383 bp, Homo sapiens
tgattggctgcgctggggcggaccgccgggggcgaggcccctcctctcaggaaggtctagggggcgcccccgggggagggcggttgcctagcaacggggcggtggctcggcgggtacccggcctagtgagctcgagaagccgctaggccgcagccggcccaccctgggctccggagaggtgcagcccccggccccggagccctcccgggggcgccagaaagccactttgggcctgtccccaggaaaacgtggtctcagctgtggggccgtcgagcaggcctcgacccctcttcctgacctgaggagaggcccagcgcctcaccctcacccagtctttgtgcagggcgccggcggccattgtgtccgggcggggaatggaggacccggcaatccccaactgccacgttctgggcctttggggaattcagagcaaaccagcggcatttgttgggggtctccggccttcaacatcacagacaggcctgggggtggccttcccaaagtcagattgcagatctgaggcagtttccccctccctgcgtccctcactgaaaccttgaaccccattgagaagtccctttagggtttcggacgcctccacctcaccctgggctggtgcttaaatagaaaaaagaaaaacaaaaaccaactaaatccataccagccacctccgggagagtactcctggctcccagtaggaggcggagagccaaggggcgtgcaagagagagggggctgggctcccgggtggcaggaggccgcggctgcggagcggccgccctcgatccgggcgatggaggaggaagcaagcgagggggctggttcctgagcttcgcaattcctgtgtcgccttctgggctcccagcctgccgggtcgcatgatccctccggccggagctggtttttttgccagccaccgcgaggccggctgagttaccggcatccccgcagccacctcctctcccgacctgtgatacaaaagatcttccgggggctgcacctgcctgcctttgcctaaggcggatttgaataatcttatcttggctttggatcttagaagagaatcactaaccagagacgagactcagtgagtgagcaggtgttttggacaatggactggttgagcccatccctattataaaaatgtctcagagcaaccgggagctggtggttgactttctctcctacaagctttcccagaaaggatacagctggagtcagtttagtgatgtggaagagaacaggactgaggccccagaagggactgaatcggagatggagacccccagtgccatcaatggcaacccatcctggcacctggcagacagccccgcggtgaatggagccactggccacagcagcagtttggatgcccgggaggtgatccccatggcagcagtaaagcaagcgctgagggaggcaggcgacgagtttgaactgcggtaccggcgggcattcagtgacctgacatcccagctccacatcaccccagggacagcatatcagagctttgaacaggtagtgaatgaactcttccgggatggggtaaactggggtcgcattgtggcctttttctccttcggcggggcactgtgcgtggaaagcgtagacaaggagatgcaggtattggtgagtcggatcgcagcttggatggccacttacctgaatgaccacctagagccttggatccaggagaacggcggctgggatacttttgtggaactctatgggaacaatgcagcagccgagagccgaaagggccaggaacgcttcaaccgctggttcctgacgggcatgactgtggccggcgtggttctgctgggctcactcttcagtcggaaatgaccagacactgaccatccactctaccctcccacccccttctctgctccaccacatcctccgtccagccgccattgccaccaggagaaccactacatgcagcccatgcccacctgcccatcacagggttgggcccagatctggtcccttgcagctagttttctagaatttatcacacttctgtgagacccccacacctcagttcccttggcctcagaattcacaaaatttccacaaaatctgtccaaaggaggctggcaggtatggaagggtttgtggctgggggcaggagggccctacctgattggtgcaacccttaccccttagcctccctgaaaatgtttttctgccagggagcttgaaagttttcagaacctcttccccagaaaggagactagattgcctttgttttgatgtttgtggcctcagaattgatcattttccccccactctccccacactaaccttgttccagctctttgaaatagtctgtgtgaaggtgaaagtgcagttcagtaataaactgtgtttactcagtgaa

SEQ ID NO: 441933 - DNA, 1312 bp, Homo sapiens
ataaaagctcgtttataaagcaggctggtacggtcggaatcccgggatatcgcaaaatctgtccaaaggaggctggcaggtatggaagggtttgtggctgggggcaggagggccctacctgattggtgcaacccttaccccttagcctccctgaaaatgtttttctgccagggagcttgaaagttttcagaacctcttccccagaaaggagactagattgcctttgttttgatgtttgtggcctcagaattgatcattttccccccactctccccacactaacctgggttccctttccttccatccctaccccctaagagccatttaggggccacttttgactagggattcaggctgcttgggataaagatgcaaggaccaggactccctcctcacctctggactggctagagtcctcactcccagtccaaatgtcctccagaagcctctggctagaggccagccccacccaggagggagggggctatagctacaggaagcaccccatgccaaagctagggtggcccttgcagttcagcaccaccctagtcccttcccctccctggctcccatgaccatactgagggaccaactgggcccaagacagatgccccagagctgtttatggcctcagctgcctcacttcctacaagagcagcctgtggcatctttgccttgggctgctcctcatggtgggttcaggggactcagccctgaggtgaaagggagctatcaggaacagctatgggagccccagggtcttccctacctcaggcaggaagggcaggaaggagagcctgctgcatggggtggggtagggctgactagaagggccagtcctgcctggccaggcagatctgtgccccatgcctgtccagcctgggcagccaggctgccaaggccagagtggcctggccaggagctcttcaggcctccctctctcttctgctccacccttggcctgtctcatccccaggggtcccagccaccccgggctctctgctgtacatatttgagactagtttttattccttgtgaagatgatatactatttttgttaagcgtgtctgtatttatgtgtgaggagctgctggcttgcagtgcgcgtgcacgtggagagctggtgcccggagattggacggcctgatgctccctcccctgccctggtccagggaagctggccgagggtcctggctcctgaggggcatctgcccctcccccaacccccaccccacacttgttccagctctttgaaatagtctgtgtgaaggtgaaagtgcagttcagtaataaactgtgtttactcagtgaa

SEQ ID NO: 441934 - DNA, 3336 bp, Homo sapiens
tgattggctgcgctggggcggaccgccgggggcgaggcccctcctctcaggaaggtctagggggcgcccccgggggagggcggttgcctagcaacggggcggtggctcggcgggtacccggcctagtgagctcgagaagccgctaggccgcagccggcccaccctgggctccggagaggtgcagcccccggccccggagccctcccgggggcgccagaaagccactttgggcctgtccccaggaaaacgtggtctcagctgtggggccgtcgagcaggcctcgacccctcttcctgacctgaggagaggcccagcgcctcaccctcacccagtctttgtgcagggcgccggcggccattgtgtccgggcggggaatggaggacccggcaatccccaactgccacgttctgggcctttggggaattcagagcaaaccagcggcatttgttgggggtctccggccttcaacatcacagacaggcctgggggtggccttcccaaagtcagattgcagatctgaggcagtttccccctccctgcgtccctcactgaaaccttgaaccccattgagaagtccctttagggtttcggacgcctccacctcaccctgggctggtgcttaaatagaaaaaagaaaaacaaaaaccaactaaatccataccagccacctccgggagagtactcctggctcccagtaggaggcggagagccaaggggcgtgcaagagagagggggctgggctcccgggtggcaggaggccgcggctgcggagcggccgccctcgatccgggcgatggaggaggaagcaagcgagggggctggttcctgagcttcgcaattcctgtgtcgccttctgggctcccagcctgccgggtcgcatgatccctccggccggagctggtttttttgccagccaccgcgaggccggctgagttaccggcatccccgcagccacctcctctcccgacctgtgatacaaaagatcttccgggggctgcacctgcctgcctttgcctaaggcggatttgaataatcttatcttggctttggatcttagaagagaatcactaaccagagacgagactcagtgagtgagcaggtgttttggacaatggactggttgagcccatccctattataaaaatgtctcagagcaaccgggagctggtggttgactttctctcctacaagctttcccagaaaggatacagctggagtcagtttagtgatgtggaagagaacaggactgaggccccagaagggactgaatcggagatggagacccccagtgccatcaatggcaacccatcctggcacctggcagacagccccgcggtgaatggagccactggccacagcagcagtttggatgcccgggaggtgatccccatggcagcagtaaagcaagcgctgagggaggcaggcgacgagtttgaactgcggtaccggcgggcattcagtgacctgacatcccagctccacatcaccccagggacagcatatcagagctttgaacaggtagtgaatgaactcttccgggatggggtaaactggggtcgcattgtggcctttttctccttcggcggggcactgtgcgtggaaagcgtagacaaggagatgcaggtattggtgagtcggatcgcagcttggatggccacttacctgaatgaccacctagagccttggatccaggagaacggcggctgggatacttttgtggaactctatgggaacaatgcagcagccgagagccgaaagggccaggaacgcttcaaccgctggttcctgacgggcatgactgtggccggcgtggttctgctgggctcactcttcagtcggaaatgaccagacactgaccatccactctaccctcccacccccttctctgctccaccacatcctccgtccagccgccattgccaccaggagaaccactacatgcagcccatgcccacctgcccatcacagggttgggcccagatctggtcccttgcagctagttttctagaatttatcacacttctgtgagacccccacacctcagttcccttggcctcagaattcacaaaatttccacaaaatctgtccaaaggaggctggcaggtatggaagggtttgtggctgggggcaggagggccctacctgattggtgcaacccttaccccttagcctccctgaaaatgtttttctgccagggagcttgaaagttttcagaacctcttccccagaaaggagactagattgcctttgttttgatgtttgtggcctcagaattgatcattttccccccactctccccacactaacctgggttccctttccttccatccctaccccctaagagccatttaggggccacttttgactagggattcaggctgcttgggataaagatgcaaggaccaggactccctcctcacctctggactggctagagtcctcactcccagtccaaatgtcctccagaagcctctggctagaggccagccccacccaggagggagggggctatagctacaggaagcaccccatgccaaagctagggtggcccttgcagttcagcaccaccctagtcccttcccctccctggctcccatgaccatactgagggaccaactgggcccaagacagatgccccagagctgtttatggcctcagctgcctcacttcctacaagagcagcctgtggcatctttgccttgggctgctcctcatggtgggttcaggggactcagccctgaggtgaaagggagctatcaggaacagctatgggagccccagggtcttccctacctcaggcaggaagggcaggaaggagagcctgctgcatggggtggggtagggctgactagaagggccagtcctgcctggccaggcagatctgtgccccatgcctgtccagcctgggcagccaggctgccaaggccagagtggcctggccaggagctcttcaggcctccctctctcttctgctccacccttggcctgtctcatccccaggggtcccagccaccccgggctctctgctgtacatatttgagactagtttttattccttgtgaagatgatatactatttttgttaagcgtgtctgtatttatgtgtgaggagctgctggcttgcagtgcgcgtgcacgtggagagctggtgcccggagattggacggcctgatgctccctcccctgccctggtccagggaagctggccgagggtcctggctcctgaggggcatctgcccctcccccaacccccaccccacacttgttccagctctttgaaatagtctgtgtgaaggtgaaagtgcagttcagtaataaactgtgtttactcagtgaa

SEQ ID NO: 441935 - DNA, 3622 bp, Homo sapiens
tgattggctgcgctggggcggaccgccgggggcgaggcccctcctctcaggaaggtctagggggcgcccccgggggagggcggttgcctagcaacggggcggtggctcggcgggtacccggcctagtgagctcgagaagccgctaggccgcagccggcccaccctgggctccggagaggtgcagcccccggccccggagccctcccgggggcgccagaaagccactttgggcctgtccccaggaaaacgtggtctcagctgtggggccgtcgagcaggcctcgacccctcttcctgacctgaggagaggcccagcgcctcaccctcacccagtctttgtgcagggcgccggcggccattgtgtccgggcggggaatggaggacccggcaatccccaactgccacgttctgggcctttggggaattcagagcaaaccagcggcatttgttgggggtctccggccttcaacatcacagacaggcctgggggtggccttcccaaagtcagattgcagatctgaggcagtttccccctccctgcgtccctcactgaaaccttgaaccccattgagaagtccctttagggtttcggacgcctccacctcaccctgggctggtgcttaaatagaaaaaagaaaaacaaaaaccaactaaatccataccagccacctccgggagagtactcctggctcccagtaggaggcggagagccaaggggcgtgcaagagagagggggctgggctcccgggtggcaggaggccgcggctgcggagcggccgccctcgatccgggcgatggaggaggaagcaagcgagggggctggttcctgagcttcgcaattcctgtgtcgccttctgggctcccagcctgccgggtcgcatgatccctccggccggagctggtttttttgccagccaccgcgaggccggctgagttaccggcatccccgcagccacctcctctcccgacctgtgatacaaaagatcttccgggggctgcacctgcctgcctttgcctaaggcggatttgaatgtaggtggtgcgggggagcgggagtggggcgggggggactgcccagggagtgactttccgaggaaggcatttcggagaagacgggggtagaaaaggctggtgggagattcagagtccactggtgctttcgatttgacttaagtgaagtatcttggaacctagacccagaccttcgtaagacccacaaagaaaccagttctggtacctggagggggaatggaatttttagggtaaatggcatgcatattaattatttttttttcctgactctttctctcccttcagaaatcttatcttggctttggatcttagaagagaatcactaaccagagacgagactcagtgagtgagcaggtgttttggacaatggactggttgagcccatccctattataaaaatgtctcagagcaaccgggagctggtggttgactttctctcctacaagctttcccagaaaggatacagctggagtcagtttagtgatgtggaagagaacaggactgaggccccagaagggactgaatcggagatggagacccccagtgccatcaatggcaacccatcctggcacctggcagacagccccgcggtgaatggagccactggccacagcagcagtttggatgcccgggaggtgatccccatggcagcagtaaagcaagcgctgagggaggcaggcgacgagtttgaactgcggtaccggcgggcattcagtgacctgacatcccagctccacatcaccccagggacagcatatcagagctttgaacaggtagtgaatgaactcttccgggatggggtaaactggggtcgcattgtggcctttttctccttcggcggggcactgtgcgtggaaagcgtagacaaggagatgcaggtattggtgagtcggatcgcagcttggatggccacttacctgaatgaccacctagagccttggatccaggagaacggcggctgggatacttttgtggaactctatgggaacaatgcagcagccgagagccgaaagggccaggaacgcttcaaccgctggttcctgacgggcatgactgtggccggcgtggttctgctgggctcactcttcagtcggaaatgaccagacactgaccatccactctaccctcccacccccttctctgctccaccacatcctccgtccagccgccattgccaccaggagaaccactacatgcagcccatgcccacctgcccatcacagggttgggcccagatctggtcccttgcagctagttttctagaatttatcacacttctgtgagacccccacacctcagttcccttggcctcagaattcacaaaatttccacaaaatctgtccaaaggaggctggcaggtatggaagggtttgtggctgggggcaggagggccctacctgattggtgcaacccttaccccttagcctccctgaaaatgtttttctgccagggagcttgaaagttttcagaacctcttccccagaaaggagactagattgcctttgttttgatgtttgtggcctcagaattgatcattttccccccactctccccacactaacctgggttccctttccttccatccctaccccctaagagccatttaggggccacttttgactagggattcaggctgcttgggataaagatgcaaggaccaggactccctcctcacctctggactggctagagtcctcactcccagtccaaatgtcctccagaagcctctggctagaggccagccccacccaggagggagggggctatagctacaggaagcaccccatgccaaagctagggtggcccttgcagttcagcaccaccctagtcccttcccctccctggctcccatgaccatactgagggaccaactgggcccaagacagatgccccagagctgtttatggcctcagctgcctcacttcctacaagagcagcctgtggcatctttgccttgggctgctcctcatggtgggttcaggggactcagccctgaggtgaaagggagctatcaggaacagctatgggagccccagggtcttccctacctcaggcaggaagggcaggaaggagagcctgctgcatggggtggggtagggctgactagaagggccagtcctgcctggccaggcagatctgtgccccatgcctgtccagcctgggcagccaggctgccaaggccagagtggcctggccaggagctcttcaggcctccctctctcttctgctccacccttggcctgtctcatccccaggggtcccagccaccccgggctctctgctgtacatatttgagactagtttttattccttgtgaagatgatatactatttttgttaagcgtgtctgtatttatgtgtgaggagctgctggcttgcagtgcgcgtgcacgtggagagctggtgcccggagattggacggcctgatgctccctcccctgccctggtccagggaagctggccgagggtcctggctcctgaggggcatctgcccctcccccaacccccaccccacacttgttccagctctttgaaatagtctgtgtgaaggtgaaagtgcagttcagtaataaactgtgtttactcagtgaa

SEQ ID NO: 441936 - DNA, 3538 bp, Homo sapiens
  misc_feature (3349)..(3349): n is a, c, g, or t
  misc_feature (3352)..(3352): n is a, c, g, or t
  misc_feature (3354)..(3354): n is a, c, g, or t
  misc_feature (3366)..(3366): n is a, c, g, or t
tgattggctgcgctggggcggaccgccgggggcgaggcccctcctctcaggaaggtctagggggcgcccccgggggagggcggttgcctagcaacggggcggtggctcggcgggtacccggcctagtgagctcgagaagccgctaggccgcagccggcccaccctgggctccggagaggtgcagcccccggccccggagccctcccgggggcgccagaaagccactttgggcctgtccccaggaaaacgtggtctcagctgtggggccgtcgagcaggcctcgacccctcttcctgacctgaggagaggcccagcgcctcaccctcacccagtctttgtgcagggcgccggcggccattgtgtccgggcggggaatggaggacccggcaatccccaactgccacgttctgggcctttggggaattcagagcaaaccagcggcatttgttgggggtctccggccttcaacatcacagacaggcctgggggtggccttcccaaagtcagattgcagatctgaggcagtttccccctccctgcgtccctcactgaaaccttgaaccccattgagaagtccctttagggtttcggacgcctccacctcaccctgggctggtgcttaaatagaaaaaagaaaaacaaaaaccaactaaatccataccagccacctccgggagagtactcctggctcccagtaggaggcggagagccaaggggcgtgcaagagagagggggctgggctcccgggtggcaggaggccgcggctgcggagcggccgccctcgatccgggcgatggaggaggaagcaagcgagggggctggttcctgagcttcgcaattcctgtgtcgccttctgggctcccagcctgccgggtcgcatgatccctccggccggagctggtttttttgccagccaccgcgaggccggctgagttaccggcatccccgcagccacctcctctcccgacctgtgatacaaaagatcttccgggggctgcacctgcctgcctttgcctaaggcggatttgaataatcttatcttggctttggatcttagaagagaatcactaaccagagacgagactcagtgagtgagcaggtgttttggacaatggactggttgagcccatccctattataaaaatgtctcagagcaaccgggagctggtggttgactttctctcctacaagctttcccagaaaggatacagctggagtcagtttagtgatgtggaagagaacaggactgaggccccagaagggactgaatcggagatggagacccccagtgccatcaatggcaacccatcctggcacctggcagacagccccgcggtgaatggagccactggccacagcagcagtttggatgcccgggaggtgatccccatggcagcagtaaagcaagcgctgagggaggcaggcgacgagtttgaactgcggtaccggcgggcattcagtgacctgacatcccagctccacatcaccccagggacagcatatcagagctttgaacaggtagtgaatgaactcttccgggatggggtaaactggggtcgcattgtggcctttttctccttcggcggggcactgtgcgtggaaagcgtagacaaggagatgcaggtattggtgagtcggatcgcagcttggatggccacttacctgaatgaccacctagagccttggatccaggagaacggcggctgggatacttttgtggaactctatgggaacaatgcagcagccgagagccgaaagggccaggaacgcttcaaccgctggttcctgacgggcatgactgtggccggcgtggttctgctgggctcactcttcagtcggaaatgaccagacactgaccatccactctaccctcccacccccttctctgctccaccacatcctccgtccagccgccattgccaccaggagaaccactacatgcagcccatgcccacctgcccatcacagggttgggcccagatctggtcccttgcagctagttttctagaatttatcacacttctgtgagacccccacacctcagttcccttggcctcagaattcacaaaatttccacaaaatctgtccaaaggaggctggcaggtatggaagggtttgtggctgggggcaggagggccctacctgattggtgcaacccttaccccttagcctccctgaaaatgtttttctgccagggagcttgaaagttttcagaacctcttccccagaaaggagactagattgcctttgttttgatgtttgtggcctcagaattgatcattttccccccactctccccacactaacctgggttccctttccttccatccctaccccctaagagccatttaggggccacttttgactagggattcaggctgcttgggataaagatgcaaggaccaggactccctcctcacctctggactggctagagtcctcactcccagtccaaatgtcctccagaagcctctggctagaggccagccccacccaggagggagggggctatagctacaggaagcaccccatgccaaagctagggtggcccttgcagttcagcaccaccctagtcccttcccctccctggctcccatgaccatactgagggaccaactgggcccaagacagatgccccagagctgtttatggcctcagctgcctcacttcctacaagagcagcctgtggcatctttgccttgggctgctcctcatggtgggttcaggggactcagccctgaggtgaaagggagctatcaggaacagctatgggagccccagggtcttccctacctcaggcaggaagggcaggaaggagagcctgctgcatggggtggggtagggctgactagaagggccagtcctgcctggccaggcagatctgtgccccatgcctgtccagcctgggcagccaggctgccaaggccagagtggcctggccaggagctcttcaggcctccctctctcttctgctccacccttggcctgtctcatccccaggggtcccagccaccccgggctctctgctgtacatatttgagactagtttttattccttgtgaagatgatatactatttttgttaagcgtgtctgtatttatgtgtgaggagctgctggcttgcagtgcgcgtgcacgtggagagctggtgcccggagattggacggcctgatgctccctcccctgccctggtccagggaagctggccgagggtcctggctcctgaggggcatctgcccctcccccaacccccaccccacacttgttccagctctttgaaatagtctgtgtgaaggtgaaagtgcagttcagtaataaactgtgtttactcagtgaaaaacacaaaacanaananacacaacacaanaacaaaacgtgtggtgggccgcgcacgaggggccccacccaagagagctcacctacaacccacccaccataggggcagggggccccaaaaggaaagggaacagaggggcagaaccgagggccacaaggaggcacgcggggaagaaaagagagagggaacacgccacaaaaaa

SEQ ID NO: 441937 - DNA, 2389 bp, Homo sapiens
  misc_feature (9)..(9): n is a, c, g, or t
  misc_feature (22)..(22): n is a, c, g, or t
ccggggaanaacaacataggcnggacgaggctgggtgtgctgaggccggcttgttcgggagagacggcgcgagcagtcagccagaatcttatcttggctttggatcttagaagagaatcactaaccagagacgagactcagtgagtgagcaggtgttttggacaatggactggttgagcccatccctattataaaaatgtctcagagcaaccgggagctggtggttgactttctctcctacaagctttcccagaaaggatacagctggagtcagtttagtgatgtggaagagaacaggactgaggccccagaagggactgaatcggagatggagacccccagtgccatcaatggcaacccatcctggcacctggcagacagccccgcggtgaatggagccactggccacagcagcagtttggatgcccgggaggtgatccccatggcagcagtaaagcaagcgctgagggaggcaggcgacgagtttgaactgcggtaccggcgggcattcagtgacctgacatcccagctccacatcaccccagggacagcatatcagagctttgaacaggtagtgaatgaactcttccgggatggggtaaactggggtcgcattgtggcctttttctccttcggcggggcactgtgcgtggaaagcgtagacaaggagatgcaggtattggtgagtcggatcgcagcttggatggccacttacctgaatgaccacctagagccttggatccaggagaacggcggctgggatacttttgtggaactctatgggaacaatgcagcagccgagagccgaaagggccaggaacgcttcaaccgctggttcctgacgggcatgactgtggccggcgtggttctgctgggctcactcttcagtcggaaatgaccagacactgaccatccactctaccctcccacccccttctctgctccaccacatcctccgtccagccgccattgccaccaggagaaccactacatgcagcccatgcccacctgcccatcacagggttgggcccagatctggtcccttgcagctagttttctagaatttatcacacttctgtgagacccccacacctcagttcccttggcctcagaattcacaaaatttccacaaaatctgtccaaaggaggctggcaggtatggaagggtttgtggctgggggcaggagggccctacctgattggtgcaacccttaccccttagcctccctgaaaatgtttttctgccagggagcttgaaagttttcagaacctcttccccagaaaggagactagattgcctttgttttgatgtttgtggcctcagaattgatcattttccccccactctccccacactaacctgggttccctttccttccatccctaccccctaagagccatttaggggccacttttgactagggattcaggctgcttgggataaagatgcaaggaccaggactccctcctcacctctggactggctagagtcctcactcccagtccaaatgtcctccagaagcctctggctagaggccagccccacccaggagggagggggctatagctacaggaagcaccccatgccaaagctagggtggcccttgcagttcagcaccaccctagtcccttcccctccctggctcccatgaccatactgagggaccaactgggcccaagacagatgccccagagctgtttatggcctcagctgcctcacttcctacaagagcagcctgtggcatctttgccttgggctgctcctcatggtgggttcaggggactcagccctgaggtgaaagggagctatcaggaacagctatgggagccccagggtcttccctacctcaggcaggaagggcaggaaggagagcctgctgcatggggtggggtagggctgactagaagggccagtcctgcctggccaggcagatctgtgccccatgcctgtccagcctgggcagccaggctgccaaggccagagtggcctggccaggagctcttcaggcctccctctctcttctgctccacccttggcctgtctcatccccaggggtcccagccaccccgggctctctgctgtacatatttgagactagtttttattccttgtgaagatgatatactatttttgttaagcgtgtctgtatttatgtgtgaggagctgctggcttgcagtgcgcgtgcacgtggagagctggtgcccggagattggacggcctgatgctccctcccctgccctggtccagggaagctggccgagggtcctggctcctgaggggcatctgcccctcccccaacccccaccccacacttgttccagctctttgaaatagtctgtgtgaaggtgaaagtgcagttcagtaataaactgtgtttactcagtgaa

SEQ ID NO: 441938 - DNA, 3326 bp, Homo sapiens
  misc_feature (1021)..(1021): n is a, c, g, or t
tgattggctgcgctggggcggaccgccgggggcgaggcccctcctctcaggaaggtctagggggcgcccccgggggagggcggttgcctagcaacggggcggtggctcggcgggtacccggcctagtgagctcgagaagccgctaggccgcagccggcccaccctgggctccggagaggtgcagcccccggccccggagccctcccgggggcgccagaaagccactttgggcctgtccccaggaaaacgtggtctcagctgtggggccgtcgagcaggcctcgacccctcttcctgacctgaggagaggcccagcgcctcaccctcacccagtctttgtgcagggcgccggcggccattgtgtccgggcggggaatggaggacccggcaatccccaactgccacgttctgggcctttggggaattcagagcaaaccagcggcatttgttgggggtctccggccttcaacatcacagacaggcctgggggtggccttcccaaagtcagattgcagatctgaggcagtttccccctccctgcgtccctcactgaaaccttgaaccccattgagaagtccctttagggtttcggacgcctccacctcaccctgggctggtgcttaaatagaaaaaagaaaaacaaaaaccaactaaatccataccagccacctccgggagagtactcctggctcccagtaggaggcggagagccaaggggcgtgcaagagagagggggctgggctcccgggtggcaggaggccgcggctgcggagcggccgccctcgatccgggcgatggaggaggaagcaagcgagggggctggttcctgagcttcgcaattcctgtgtcgccttctgggctcccagcctgccgggtcgcatgatccctccggccggagctggtttttttgccagccaccgcgaggcctggatgaacgctagcgccacctccttgcgcctgtctgatactataatgcggcgggtcatcatcgcgtgcgtcctgagtcaagggcgtattggtantattctattgggtttgggtgtctgataatagatgcattaaccagagacgagactcagtgagtgagcaggtgttttggacaatggactggttgagcccatccctattataaaaatgtctcagagcaaccgggagctggtggttgactttctctcctacaagctttcccagaaaggatacagctggagtcagtttagtgatgtggaagagaacaggactgaggccccagaagggactgaatcggagatggagacccccagtgccatcaatggcaacccatcctggcacctggcagacagccccgcggtgaatggagccactggccacagcagcagtttggatgcccgggaggtgatccccatggcagcagtaaagcaagcgctgagggaggcaggcgacgagtttgaactgcggtaccggcgggcattcagtgacctgacatcccagctccacatcaccccagggacagcatatcagagctttgaacaggtagtgaatgaactcttccgggatggggtaaactggggtcgcattgtggcctttttctccttcggcggggcactgtgcgtggaaagcgtagacaaggagatgcaggtattggtgagtcggatcgcagcttggatggccacttacctgaatgaccacctagagccttggatccaggagaacggcggctgggatacttttgtggaactctatgggaacaatgcagcagccgagagccgaaagggccaggaacgcttcaaccgctggttcctgacgggcatgactgtggccggcgtggttctgctgggctcactcttcagtcggaaatgaccagacactgaccatccactctaccctcccacccccttctctgctccaccacatcctccgtccagccgccattgccaccaggagaaccactacatgcagcccatgcccacctgcccatcacagggttgggcccagatctggtcccttgcagctagttttctagaatttatcacacttctgtgagacccccacacctcagttcccttggcctcagaattcacaaaatttccacaaaatctgtccaaaggaggctggcaggtatggaagggtttgtggctgggggcaggagggccctacctgattggtgcaacccttaccccttagcctccctgaaaatgtttttctgccagggagcttgaaagttttcagaacctcttccccagaaaggagactagattgcctttgttttgatgtttgtggcctcagaattgatcattttccccccactctccccacactaacctgggttccctttccttccatccctaccccctaagagccatttaggggccacttttgactagggattcaggctgcttgggataaagatgcaaggaccaggactccctcctcacctctggactggctagagtcctcactcccagtccaaatgtcctccagaagcctctggctagaggccagccccacccaggagggagggggctatagctacaggaagcaccccatgccaaagctagggtggcccttgcagttcagcaccaccctagtcccttcccctccctggctcccatgaccatactgagggaccaactgggcccaagacagatgccccagagctgtttatggcctcagctgcctcacttcctacaagagcagcctgtggcatctttgccttgggctgctcctcatggtgggttcaggggactcagccctgaggtgaaagggagctatcaggaacagctatgggagccccagggtcttccctacctcaggcaggaagggcaggaaggagagcctgctgcatggggtggggtagggctgactagaagggccagtcctgcctggccaggcagatctgtgccccatgcctgtccagcctgggcagccaggctgccaaggccagagtggcctggccaggagctcttcaggcctccctctctcttctgctccacccttggcctgtctcatccccaggggtcccagccaccccgggctctctgctgtacatatttgagactagtttttattccttgtgaagatgatatactatttttgttaagcgtgtctgtatttatgtgtgaggagctgctggcttgcagtgcgcgtgcacgtggagagctggtgcccggagattggacggcctgatgctccctcccctgccctggtccagggaagctggccgagggtcctggctcctgaggggcatctgcccctcccccaacccccaccccacacttgttccagctctttgaaatagtctgtgtgaaggtgaaagtgcagttcagtaataaactgtgtttactcagtgaa

SEQ ID NO: 441939 - DNA, 2537 bp, Homo sapiens
  misc_feature (9)..(9): n is a, c, g, or t
  misc_feature (22)..(22): n is a, c, g, or t
ccggggaanaacaacataggcnggacgaggctgggtgtgctgaggccggcttgttcgggagagacggcgcgagcagtcagccaggtaggccggcagccaggtaggccggcccgggtccgcggcgcggaactcggccgcgaagagctcttgcgtctggaagctaccgggccgatgaagggggatgtggccccccacggctcgcggggctcgcagctctttctctcccttcagaaatcttatcttggctttggatcttagaagagaatcactaaccagagacgagactcagtgagtgagcaggtgttttggacaatggactggttgagcccatccctattataaaaatgtctcagagcaaccgggagctggtggttgactttctctcctacaagctttcccagaaaggatacagctggagtcagtttagtgatgtggaagagaacaggactgaggccccagaagggactgaatcggagatggagacccccagtgccatcaatggcaacccatcctggcacctggcagacagccccgcggtgaatggagccactggccacagcagcagtttggatgcccgggaggtgatccccatggcagcagtaaagcaagcgctgagggaggcaggcgacgagtttgaactgcggtaccggcgggcattcagtgacctgacatcccagctccacatcaccccagggacagcatatcagagctttgaacaggtagtgaatgaactcttccgggatggggtaaactggggtcgcattgtggcctttttctccttcggcggggcactgtgcgtggaaagcgtagacaaggagatgcaggtattggtgagtcggatcgcagcttggatggccacttacctgaatgaccacctagagccttggatccaggagaacggcggctgggatacttttgtggaactctatgggaacaatgcagcagccgagagccgaaagggccaggaacgcttcaaccgctggttcctgacgggcatgactgtggccggcgtggttctgctgggctcactcttcagtcggaaatgaccagacactgaccatccactctaccctcccacccccttctctgctccaccacatcctccgtccagccgccattgccaccaggagaaccactacatgcagcccatgcccacctgcccatcacagggttgggcccagatctggtcccttgcagctagttttctagaatttatcacacttctgtgagacccccacacctcagttcccttggcctcagaattcacaaaatttccacaaaatctgtccaaaggaggctggcaggtatggaagggtttgtggctgggggcaggagggccctacctgattggtgcaacccttaccccttagcctccctgaaaatgtttttctgccagggagcttgaaagttttcagaacctcttccccagaaaggagactagattgcctttgttttgatgtttgtggcctcagaattgatcattttccccccactctccccacactaacctgggttccctttccttccatccctaccccctaagagccatttaggggccacttttgactagggattcaggctgcttgggataaagatgcaaggaccaggactccctcctcacctctggactggctagagtcctcactcccagtccaaatgtcctccagaagcctctggctagaggccagccccacccaggagggagggggctatagctacaggaagcaccccatgccaaagctagggtggcccttgcagttcagcaccaccctagtcccttcccctccctggctcccatgaccatactgagggaccaactgggcccaagacagatgccccagagctgtttatggcctcagctgcctcacttcctacaagagcagcctgtggcatctttgccttgggctgctcctcatggtgggttcaggggactcagccctgaggtgaaagggagctatcaggaacagctatgggagccccagggtcttccctacctcaggcaggaagggcaggaaggagagcctgctgcatggggtggggtagggctgactagaagggccagtcctgcctggccaggcagatctgtgccccatgcctgtccagcctgggcagccaggctgccaaggccagagtggcctggccaggagctcttcaggcctccctctctcttctgctccacccttggcctgtctcatccccaggggtcccagccaccccgggctctctgctgtacatatttgagactagtttttattccttgtgaagatgatatactatttttgttaagcgtgtctgtatttatgtgtgaggagctgctggcttgcagtgcgcgtgcacgtggagagctggtgcccggagattggacggcctgatgctccctcccctgccctggtccagggaagctggccgagggtcctggctcctgaggggcatctgcccctcccccaacccccaccccacacttgttccagctctttgaaatagtctgtgtgaaggtgaaagtgcagttcagtaataaactgtgtttactcagtgaa

SEQ ID NO: 441940 - DNA, 2543 bp, Homo sapiens
cgcgcactccctttgcgtctcgggctcgcgcgcgttgccgcggcaccggaagtgactgagcttgcaagttcccctgtctcttcaggggaaactgaggccggcttgttcgggagagacggcgcgagcagtcagccaggtaggccggcagccaggtaggccggcccgggtccgcggcgcggaactcggccgcgaagagctcttgcgtctggaagctaccggctctttctctcccttcagaaatcttatcttggctttggatcttagaagagaatcactaaccagagacgagactcagtgagtgagcaggtgttttggacaatggactggttgagcccatccctattataaaaatgtctcagagcaaccgggagctggtggttgactttctctcctacaagctttcccagaaaggatacagctggagtcagtttagtgatgtggaagagaacaggactgaggccccagaagggactgaatcggagatggagacccccagtgccatcaatggcaacccatcctggcacctggcagacagccccgcggtgaatggagccactggccacagcagcagtttggatgcccgggaggtgatccccatggcagcagtaaagcaagcgctgagggaggcaggcgacgagtttgaactgcggtaccggcgggcattcagtgacctgacatcccagctccacatcaccccagggacagcatatcagagctttgaacaggtagtgaatgaactcttccgggatggggtaaactggggtcgcattgtggcctttttctccttcggcggggcactgtgcgtggaaagcgtagacaaggagatgcaggtattggtgagtcggatcgcagcttggatggccacttacctgaatgaccacctagagccttggatccaggagaacggcggctgggatacttttgtggaactctatgggaacaatgcagcagccgagagccgaaagggccaggaacgcttcaaccgctggttcctgacgggcatgactgtggccggcgtggttctgctgggctcactcttcagtcggaaatgaccagacactgaccatccactctaccctcccacccccttctctgctccaccacatcctccgtccagccgccattgccaccaggagaaccactacatgcagcccatgcccacctgcccatcacagggttgggcccagatctggtcccttgcagctagttttctagaatttatcacacttctgtgagacccccacacctcagttcccttggcctcagaattcacaaaatttccacaaaatctgtccaaaggaggctggcaggtatggaagggtttgtggctgggggcaggagggccctacctgattggtgcaacccttaccccttagcctccctgaaaatgtttttctgccagggagcttgaaagttttcagaacctcttccccagaaaggagactagattgcctttgttttgatgtttgtggcctcagaattgatcattttccccccactctccccacactaacctgggttccctttccttccatccctaccccctaagagccatttaggggccacttttgactagggattcaggctgcttgggataaagatgcaaggaccaggactccctcctcacctctggactggctagagtcctcactcccagtccaaatgtcctccagaagcctctggctagaggccagccccacccaggagggagggggctatagctacaggaagcaccccatgccaaagctagggtggcccttgcagttcagcaccaccctagtcccttcccctccctggctcccatgaccatactgagggaccaactgggcccaagacagatgccccagagctgtttatggcctcagctgcctcacttcctacaagagcagcctgtggcatctttgccttgggctgctcctcatggtgggttcaggggactcagccctgaggtgaaagggagctatcaggaacagctatgggagccccagggtcttccctacctcaggcaggaagggcaggaaggagagcctgctgcatggggtggggtagggctgactagaagggccagtcctgcctggccaggcagatctgtgccccatgcctgtccagcctgggcagccaggctgccaaggccagagtggcctggccaggagctcttcaggcctccctctctcttctgctccacccttggcctgtctcatccccaggggtcccagccaccccgggctctctgctgtacatatttgagactagtttttattccttgtgaagatgatatactatttttgttaagcgtgtctgtatttatgtgtgaggagctgctggcttgcagtgcgcgtgcacgtggagagctggtgcccggagattggacggcctgatgctccctcccctgccctggtccagggaagctggccgagggtcctggctcctgaggggcatctgcccctcccccaacccccaccccacacttgttccagctctttgaaatagtctgtgtgaaggtgaaagtgcagttcagtaataaactgtgtttactcagtgaa

SEQ ID NO: 441941 - DNA, 2407 bp, Homo sapiens
cccgaagatgtacgagggccggcaccgggttgttacttgcaagtcgagcgggtctggggatacatggtacatatacatggacctagacctcatcaattttgaaatcttatcttggctttggatcttagaagagaatcactaaccagagacgagactcagtgagtgagcaggtgttttggacaatggactggttgagcccatccctattataaaaatgtctcagagcaaccgggagctggtggttgactttctctcctacaagctttcccagaaaggatacagctggagtcagtttagtgatgtggaagagaacaggactgaggccccagaagggactgaatcggagatggagacccccagtgccatcaatggcaacccatcctggcacctggcagacagccccgcggtgaatggagccactggccacagcagcagtttggatgcccgggaggtgatccccatggcagcagtaaagcaagcgctgagggaggcaggcgacgagtttgaactgcggtaccggcgggcattcagtgacctgacatcccagctccacatcaccccagggacagcatatcagagctttgaacaggtagtgaatgaactcttccgggatggggtaaactggggtcgcattgtggcctttttctccttcggcggggcactgtgcgtggaaagcgtagacaaggagatgcaggtattggtgagtcggatcgcagcttggatggccacttacctgaatgaccacctagagccttggatccaggagaacggcggctgggatacttttgtggaactctatgggaacaatgcagcagccgagagccgaaagggccaggaacgcttcaaccgctggttcctgacgggcatgactgtggccggcgtggttctgctgggctcactcttcagtcggaaatgaccagacactgaccatccactctaccctcccacccccttctctgctccaccacatcctccgtccagccgccattgccaccaggagaaccactacatgcagcccatgcccacctgcccatcacagggttgggcccagatctggtcccttgcagctagttttctagaatttatcacacttctgtgagacccccacacctcagttcccttggcctcagaattcacaaaatttccacaaaatctgtccaaaggaggctggcaggtatggaagggtttgtggctgggggcaggagggccctacctgattggtgcaacccttaccccttagcctccctgaaaatgtttttctgccagggagcttgaaagttttcagaacctcttccccagaaaggagactagattgcctttgttttgatgtttgtggcctcagaattgatcattttccccccactctccccacactaacctgggttccctttccttccatccctaccccctaagagccatttaggggccacttttgactagggattcaggctgcttgggataaagatgcaaggaccaggactccctcctcacctctggactggctagagtcctcactcccagtccaaatgtcctccagaagcctctggctagaggccagccccacccaggagggagggggctatagctacaggaagcaccccatgccaaagctagggtggcccttgcagttcagcaccaccctagtcccttcccctccctggctcccatgaccatactgagggaccaactgggcccaagacagatgccccagagctgtttatggcctcagctgcctcacttcctacaagagcagcctgtggcatctttgccttgggctgctcctcatggtgggttcaggggactcagccctgaggtgaaagggagctatcaggaacagctatgggagccccagggtcttccctacctcaggcaggaagggcaggaaggagagcctgctgcatggggtggggtagggctgactagaagggccagtcctgcctggccaggcagatctgtgccccatgcctgtccagcctgggcagccaggctgccaaggccagagtggcctggccaggagctcttcaggcctccctctctcttctgctccacccttggcctgtctcatccccaggggtcccagccaccccgggctctctgctgtacatatttgagactagtttttattccttgtgaagatgatatactatttttgttaagcgtgtctgtatttatgtgtgaggagctgctggcttgcagtgcgcgtgcacgtggagagctggtgcccggagattggacggcctgatgctccctcccctgccctggtccagggaagctggccgagggtcctggctcctgaggggcatctgcccctcccccaacccccaccccacacttgttccagctctttgaaatagtctgtgtgaaggtgaaagtgcagttcagtaataaactgtgtttactcagtgaa

SEQ ID NO: 441942 - DNA, 2962 bp, Homo sapiens
tgattggctgcgctggggcggaccgccgggggcgaggcccctcctctcaggaaggtctagggggcgcccccgggggagggcggttgcctagcaacggggcggtggctcggcgggtacccggcctagtgagctcgagaagccgctaggccgcagccggcccaccctgggctccggagaggtgcagcccccggccccggagccctcccgggggcgccagaaagccactttgggcctgtccccaggaaaacgtggtctcagctgtggggccgtcgagcaggcctcgacccctcttcctgacctgaggagaggcccagcgcctcaccctcacccagtctttgtgcagggcgccggcggccattgtgtccgggcggggaatggaggacccggcaatccccaactgccacgttctgggcctttggggaattcagagcaaaccagcggcatttgttgggggtctccggccttcaacatcacagacaggcctgggggtggccttcccaaagtcagattgcagatctgaggcagtttccccctccctgcgtccctcactgaaaccttgaaccccattgagaagtccctttagggtttcggacgcctccacctcaccctgggctggtgcttaaatagaaaaaagaaaaacaaaaaccaactaaatccataccagccacctccgggagagtactcctggctcccagtaggaggcggagagccaaggggcgtgcaagagagagggggctgggctcccgggtggcaggaggccgcggctgcggagcggccgccctcgatccgggcgatggaggaggaagcaagcgagggggctggttcctgagcttcgcaattcctgtgtcgccttctgggctcccagcctgccgggtcgcatgatccctccggccggagctggtttttttgccagccaccgcgaggccggctgagttaccggcatccccgcagccacctcctctcccgacctgtgatacaaaagatcttccgggggctgcacctgcctgcctttgcctaaggcggatttgaataatcttatcttggctttggatcttagaagagaatcactaaccagagacgagactcagtgagtgagcaggtgttttggacaatggactggttgagcccatccctattataaaaatgtctcagagcaaccgggagctggtggttgactttctctcctacaagctttcccagaaaggatacagctggagtcagtttagtgatgtggaagagaacaggactgaggccccagaagggactgaatcggagatggagacccccagtgccatcaatggcaacccatcctggcacctggcagacagccccgcggtgaatggagccactggccacagcagcagtttggatgcccgggaggtgatccccatggcagcagtaaagcaagcgctgagggaggcaggcgacgagtttgaactgcggtaccggcgggcattcagtgacctgacatcccagctccacatcaccccagggacagcatatcagagctttgaacaggtagtgaatgaactcttccgggatggggtaaactggggtcgcattgtggcctttttctccttcggcggggcactgtgcgtggaaagcgtagacaaggagatgcaggtattggtgagtcggatcgcagcttggatggccacttacctgaatgaccacctagagccttggatccaggagaacggcggctgggatacttttgtggaactctatgggaacaatgcagcagccgagagccgaaagggccaggaacgcttcaaccgctggttcctgacgggcatgactgtggccggcgtggttctgctgggctcactcttcagtcggaaatgaccagacactgaccatccactctaccctcccacccccttctctgctccaccacatcctccgtccagccgccattgccaccaggagaaccactacatgcagcccatgcccacctgcccatcacagggttgggcccagatctggtcccttgcagctagttttctagaatttatcacacttctgtgagacccccacacctcagttcccttggcctcagaattcacaaaatttccacaaaatctgtccaaaggaggctggcaggtatggaagggtttgtggctgggggcaggagggccctacctgattggtgcaacccttaccccttagcctccctgaaaatgtttttctgccagggagcttgaaagttttcagaacctcttccccagaaaggagactagattgcctttgttttgatgtttgtggcctcagaattgatcattttccccccactctccccacactaacctgggttccctttccttccatccctaccccctaagagccatttaggggccacttttgactagggattcaggctgcttgggataaagatgcaaggaccaggactccctcctcacctctggactggctagagtcctcactcccagtccaaatgtcctccagaagcctctggctagaggccagccccacccaggagggagggggctatagctacaggaagcaccccatgccaaagctagggtggcccttgcagttcagcaccaccctagtcccttcccctccctggctcccatgaccatactgagggaccaactgggcccaagacagatgccccagagctgtttatggcctcagctgcctcacttcctacaagagcagcctgtggcatctttgccttgggctgctcctcatggtgggttcaggggactcagccctgaggtgaaagggagctatcaggaacagctatgggagccccagggtcttccctacctcaggcaggaagggcaggaaggagagcctgctgcatggggagggtcctggctcctgaggggcatctgcccctcccccaacccccaccccacacttgttccagctctttgaaatagtctgtgtgaaggtgaaagtgcagttcagtaataaactgtgtttactcagtgaa

SEQ ID NO: 441943 - DNA, 2498 bp, Homo sapiens
tgattggctgcgctggggcggaccgccgggggcgaggcccctcctctcaggaaggtctagggggcgcccccgggggagggcggttgcctagcaacggggcggtggctcggcgggtacccggcctagtgagctcgagaagccgctaggccgcagccggcccaccctgggctccggagaggtgcagcccccggccccggagccctcccgggggcgccagaaagccactttgggcctgtccccaggaaaacgtggtctcagctgtggggccgtcgagcaggcctcgacccctcttcctgacctgaggagaggcccagcgcctcaccctcacccagtctttgtgcagggcgccggcggccattgtgtccgggcggggaatggaggacccggcaatccccaactgccacgttctgggcctttggggaattcagagcaaaccagcggcatttgttgggggtctccggccttcaacatcacagacaggcctgggggtggccttcccaaagtcagattgcagatctgaggcagtttccccctccctgcgtccctcactgaaaccttgaaccccattgagaagtccctttagggtttcggacgcctccacctcaccctgggctggtgcttaaatagaaaaaagaaaaacaaaaaccaactaaatccataccagccacctccgggagagtactcctggctcccagtaggaggcggagagccaaggggcgtgcaagagagagggggctgggctcccgggtggcaggaggccgcggctgcggagcggccgccctcgatccgggcgatggaggaggaagcaagcgagggggctggttcctgagcttcgcaattcctgtgtcgccttctgggctcccagcctgccgggtcgcatgatccctccggccggagctggtttttttgccagccaccgcgaggccggctgagttaccggcatccccgcagccacctcctctcccgacctgtgatacaaaagatcttccgggggctgcacctgcctgcctttgcctaaggcggatttgaataatcttatcttggctttggatcttagaagagaatcactaaccagagacgagactcagtgagtgagcaggtgttttggacaatggactggttgagcccatccctattataaaaatgtctcagagcaaccgggagctggtggttgactttctctcctacaagctttcccagaaaggatacagctggagtcagtttagtgatgtggaagagaacaggactgaggccccagaagggactgaatcggagatggagacccccagtgccatcaatggcaacccatcctggcacctggcagacagccccgcggtgaatggagccactggccacagcagcagtttggatgcccgggaggtgatccccatggcagcagtaaagcaagcgctgagggaggcaggcgacgagtttgaactgcggtaccggcgggcattcagtgacctgacatcccagctccacatcaccccagggacagcatatcagagctttgaacaggtagtgaatgaactcttccgggatggggtaaactggggtcgcattgtggcctttttctccttcggcggggcactgtgcgtggaaagcgtagacaaggagatgcaggtattggtgagtcggatcgcagcttggatggccacttacctgaatgaccacctagagccttggatccaggagaacggcggctgggatacttttgtggaactctatgggaacaatgcagcagccgagagccgaaagggccaggaacgcttcaaccgctggttcctgacgggcatgactgtggccggcgtggttctgctgggctcactcttcagtcggaaatgaccagacactgaccatccactctaccctcccacccccttctctgctccaccacatcctccgtccagccgccattgccaccaggagaaccactacatgcagcccatgcccacctgcccatcacagggttgggcccagatctggtcccttgcagctagttttctagaatttatcacacttctgtgagacccccacacctcagttcccttggcctcagaattcacaaaatttccacaaaatctgtccaaaggaggctggcaggtatggaagggtttgtggctgggggcaggagggccctacctgattggtgcaacccttaccccttagcctccctgaaaatgtttttctgccagggagcttgaaagttttcagaacctcttccccagaaaggagactagattgcctttgttttgatgtttgtggcctcagaattgatcattttccccccactctccccacactaacctgggttccctttccttccatccctaccccctaagagccatttaggggccacttttgactagggattcaggctgatgggagaagactgcgcagtcttctcccatcaggttatctaactcagactactactctgtcttcatctaaagtgggacagtcatactcttcatcatagccatcatactatgcctctt

SEQ ID NO: 441944 - DNA, 2115 bp, Homo sapiens
tgattggctgcgctggggcggaccgccgggggcgaggcccctcctctcaggaaggtctagggggcgcccccgggggagggcggttgcctagcaacggggcggtggctcggcgggtacccggcctagtgagctcgagaagccgctaggccgcagccggcccaccctgggctccggagaggtgcagcccccggccccggagccctcccgggggcgccagaaagccactttgggcctgtccccaggaaaacgtggtctcagctgtggggccgtcgagcaggcctcgacccctcttcctgacctgaggagaggcccagcgcctcaccctcacccagtctttgtgcagggcgccggcggccattgtgtccgggcggggaatggaggacccggcaatccccaactgccacgttctgggcctttggggaattcagagcaaaccagcggcatttgttgggggtctccggccttcaacatcacagacaggcctgggggtggccttcccaaagtcagattgcagatctgaggcagtttccccctccctgcgtccctcactgaaaccttgaaccccattgagaagtccctttagggtttcggacgcctccacctcaccctgggctggtgcttaaatagaaaaaagaaaaacaaaaaccaactaaatccataccagccacctccgggagagtactcctggctcccagtaggaggcggagagccaaggggcgtgcaagagagagggggctgggctcccgggtggcaggaggccgcggctgcggagcggccgccctcgatccgggcgatggaggaggaagcaagcgagggggctggttcctgagcttcgcaattcctgtgtcgccttctgggctcccagcctgccgggtcgcatgatccctccggccggagctggtttttttgccagccaccgcgaggccggctgagttaccggcatccccgcagccacctcctctcccgacctgtgatacaaaagatcttccgggggctgcacctgcctgcctttgcctaaggcggatttgaataatcttatcttggctttggatcttagaagagaatcactaaccagagacgagactcagtgagtgagcaggtgttttggacaatggactggttgagcccatccctattataaaaatgtctcagagcaaccgggagctggtggttgactttctctcctacaagctttcccagaaaggatacagctggagtcagtttagtgatgtggaagagaacaggactgaggccccagaagggactgaatcggagatggagacccccagtgccatcaatggcaacccatcctggcacctggcagacagccccgcggtgaatggagccactggccacagcagcagtttggatgcccgggaggtgatccccatggcagcagtaaagcaagcgctgagggaggcaggcgacgagtttgaactgcggtaccggcgggcattcagtgacctgacatcccagctccacatcaccccagggacagcatatcagagctttgaacaggtagtgaatgaactcttccgggatggggtaaactggggtcgcattgtggcctttttctccttcggcggggcactgtgcgtggaaagcgtagacaaggagatgcaggtattggtgagtcggatcgcagcttggatggccacttacctgaatgaccacctagagccttggatccaggagaacggcggctgggatacttttgtggaactctatgggaacaatgcagcagccgagagccgaaagggccaggaacgcttcaaccgctggttcctgacgggcatgactgtggccggcgtggttctgctgggctcactcttcagtcggaaatgaccagacactgaccatccactctaccctcccacccccttctctgctccaccacatcctccgtccagccgccattgccaccaggagaaccactacatgcagcccatgcccacctgcccatcacagggttgggcccagatctggtcccttgcagctagttttctagaatttatcacacttctgtgagacccccacaccttgttccagctctttgaaatagtctgtgtgaaggtgaaagtgcagttcagtaataaactgtgtttactcagtgaa

SEQ ID NO: 441945 - DNA, 784 bp, Homo sapiens
atgtctcatgacttctgtcaccagactcagagacggaaccagagacgggccagagcatccccctcctccaccatgaaactcgctgtcaccctcaccctggtcacactggctctctgctgcagctccgcttctgcagagatctgcccgagctttcagcgtgtcatcgaaaccctcctcatggacacaccctccagttatgaggctgccatggaacttttcagccctgatcaagacatgagggaggcaggggctcagctgaagaagctggtggacaccctcccccaaaagcccagagaaagcatcattaagctcatggaaaaaatagcccaaagctcactgtgtaattagcatttagaagctgaagatccccaactgctccagcctctgccgctgccatgctttgagtccacgcccaccagccttgctctcttcaataaaccacaagcatctcaaaaaacacaaacacacacacacacaccaccaccacacgtggagccaccatggaccccacgaaaacagcacgctccacacacaacagagttaagcccacggggcgcccaacacgacacagagacaccacggcggcaccaaggggaccccacagagaaacacccggggcacagacaccaaggagaggagagatcaccagccgcacagtaaccaaacgccccgtgccgcaacccgcagacgtcctggacaccagcacacgcagtgcacatctggacaggccaaaggcggaccgtctaaaggagactccgaggacgcccacccaaacaatagccgc

SEQ ID NO: 441946 - DNA, 347 bp, Homo sapiens
cttctctcctctgtgtcgaccgcttctgcagagatctgcccgagctttcagcgtgtcatcgaaaccctcctcatggacacaccctccagttatgaggctgccatggaacttttcagccctgatcaagacatgagggaggcaggggctcagctgaagaagctggtggacaccctcccccaaaagcccagagaaagcatcattaagctcatggaaaaaatagcccaaagctcactgtgtaattagcatttagaagctgaagatccccaactgctccagcctctgccgctgccatgctttgagtccacgcccaccagccttgctctcttcaataaaccacaagcatctca

SEQ ID NO: 441947 - DNA, 384 bp, Homo sapiens
cttctctcctctgtgtcgaccgcttctgcagagatctgcccgagctttcagcgtgtcatcgaaaccctcctcatggacacaccctccagttatgaggctgccatggaacttttcagccctgatcaagacatgagggaggcaggggctcagctgaagaagctggtggacaccctcccccaaaagcccagagaaagcatcattaagctcatggaaaaaatagcccaaagctcactgtgtaattagcatttagaagctgaagatccccaactgctccagcctctgccgctgccatgctttgagtccacgcccaccagccttgctctcttcaataaaccacaagcatctcaaaaaaaagtcgacgcggccgcgaatttagtagtagta

SEQ ID NO: 441948 - DNA, 489 bp, Homo sapiens
atgtctcatgacttctgtcaccagactcagagacggaaccagagacgggccagagcatccccctcctccaccatgaaactcgctgtcaccctcaccctggtcacactggctctctgctgcagctccgcttctgcagagatctgcccgagctttcagcgtgtcatcgaaaccctcctcatggacacaccctccagttatgaggctgccatggaacttttcagccctgatcaagacatgagggaggcaggggctcagctgaagaagctggtggacaccctcccccaaaagcccagagaaagcatcattaagctcatggaaaaaatagcccaaagctcactgtgtaattagcatttagaagctgaagatccccaactgctccagcctctgccgctgccatgctttgagtccacgcccaccagccttgctctcttcaataaaccacaagcatctcaaaaaaaagtcgacgcggccgcgaatttagtagtagta

SEQ ID NO: 441949 - DNA, 306 bp, Homo sapiens
gcagccgcctactactactaaatccccccccggtcgacccctgatcaagacatgagggaggcaggggctcagctgaagaagctggtggacaccctcccccaaaagcccagagaaagcatcattaagctcatggaaaaaatagcccaaagctcactgtgtaattagcatttagaagctgaagatccccaactgctccagcctctgccgctgccatgctttgagtccacgcccaccagccttgctctcttcaataaaccacaagcatctcaaaaaaaagtcgacgcggccgcgaatttagtagtagta

SEQ ID NO: 441950 - DNA, 452 bp, Homo sapiens
atgtctcatgacttctgtcaccagactcagagacggaaccagagacgggccagagcatccccctcctccaccatgaaactcgctgtcaccctcaccctggtcacactggctctctgctgcagctccgcttctgcagagatctgcccgagctttcagcgtgtcatcgaaaccctcctcatggacacaccctccagttatgaggctgccatggaacttttcagccctgatcaagacatgagggaggcaggggctcagctgaagaagctggtggacaccctcccccaaaagcccagagaaagcatcattaagctcatggaaaaaatagcccaaagctcactgtgtaattagcatttagaagctgaagatccccaactgctccagcctctgccgctgccatgctttgagtccacgcccaccagccttgctctcttcaataaaccacaagcatctca

SEQ ID NO: 441951 - DNA, 451 bp, Homo sapiens
tacaagagaagagacgagatgtacagagaagacggaaccagagacgggccagagcatccccctcctccaccatgaaactcgctgtcaccctcaccctggtcacactggctctctgctgcagctccgcttctgcagagatctgcccgagctttcagcgtgtcatcgaaaccctcctcatggacacaccctccagttatgaggctgccatggaacttttcagccctgatcaagacatgagggaggcaggggctcagctgaagaagctggtggacaccctcccccaaaagcccagagaaagcatcattaagctcatggaaaaaatagcccaaagctcactgtgtaattagcatttagaagctgaagatccccaactgctccagcctctgccgctgccatgctttgagtccacgcccaccagccttgctctcttcaataaaccacaagcatctca

SEQ ID NO: 441952 - DNA, 764 bp, Homo sapiens
atgtctcatgacttctgtcaccagactcagagacggaaccagagacgggccagagcatccccctcctccaccatgaaactcgctgtcaccctcaccctggtcacactggctctctgctgcagctccgcttctgcagagatctgcccgagctttcagcgtgtcatcgaaaccctcctcatggacacaccctccagttatgaggctgccatggaacttttcagccctgatcaagacatgagggaggcaggggctcagctgaagaagctggtggacaccctcccccaaaagcccagagaaagcatcattaagctcatggaaaaaatagcccaaagctcactgtgtaattagcatttagaagctgaagatccccaactgctccagcctctgccgctgccatgctttgagtccacgcccaccagccttgctctcttcaataaaccacaagcatctcaaaaaaaaaaaaaaaaaaaaaaaaaaaaaaaaaaaaaaaaaaaaaaccgccggcggggcgtactagttggcggggcggcggaggagaaggagatgagcaagagaaccgggcgcacgagctgcgacacactgtgcgtgctccggcgacccagtttttcttgtgggccaacgggggtcgacacccgccgggcggccccataaaggagggcggcggtaaaatgcgcagacaaccgcggtgtcctcttggttatagcttcctgcgcacacacgacaacagcaagaacgcaccacacaacaaggtatacacaagccgg

SEQ ID NO: 441953 - DNA, 478 bp, Homo sapiens
actgtcagttcatttctgtgctcagtggggtagctttgttttttgtgtctcctgaacagatctccagtctatgtgctgaagaagcagcagcccaagagcagacaggtcaggtggaggagtgcctcaaggtcaacctgctcaagatcaaaacagaattgtgtaaaaaggtaaccaccgtcaccttcttttcctcacttcatttctttttttttttttctcttcttccttttaatgctgtagtctgcctaccttggtaataaaaccaaaaatctcaaccttctgcccagcactcttttcttgctgttccttcttaccaaactttcatttgattttgactgctcatctcctataatgtgaatattcttttcttttctttgagacggagtctcgctctgttgcccaggctggagctctgcagtgagccgagattgcaccactgcactccagcctaggcgacagagcgagactcagtctcaaa

SEQ ID NO: 441954 - DNA, 2171 bp, Homo sapiens
  misc_feature (66)..(66): n is a, c, g, or t
  misc_feature (71)..(71): n is a, c, g, or t
tacaatcgagcggtaccggactgagatgatggaccagagctagactacaccctcatgagggtctgnaagcngatgataaagaggttctgtccggaagcagattctaaaaccatgttgcagtgcttgaagcaaaataaaaacagtgaattgatggatcccaaatgcaaacagatgataaccaagcgccagatcacccagaacacagattaccgcttaaaccccatgttaagaaaagcctgtaaagctgacattcctaaattctgtcacggtatcctgactaaggccaaggatgattcagaattagaaggacaagtcatctcttgcctgaagctgagatatgctgaccagcgcctgtcttcagactgtgaagaccagatccgaatcattatccaggagtccgccctggactaccgcctggatcctcagctccagctgcactgctcagacgagatctccagtctatgtgctgaagaagcagcagcccaagagcagacaggtcaggtggaggagtgcctcaaggtcaacctgctcaagatcaaaacagaattgtgtaaaaaggaagtgctaaacatgctgaaggaaagcaaagcagacatctttgttgacccggtacttcatactgcttgtgccctggacattaaacaccactgcgcagccatcacccctggccgcgggcgtcaaatgtcctgtctcatggaagcactggaggataagcgggtgaggttacagcccgagtgcaaaaagcgcctcaatgaccggattgagatgtggagttacgcagcaaaggtggccccagcagatggcttctctgatcttgccatgcaagtaatgacgtctccatctaagaactacattctctctgtgatcagtgggagcatctgtatattgttcctgattggcctgatgtgtggacggatcaccaagcgagtgacacgagagctcaaggacaggtagagccaccttgaccaccaaaggaactacctatccagtgcccagtttgtacagccctcttgtatagcatccccactcacctcgctcttctcagaagtgacaccaaccccgtgttagagcattagcagatgtccactgcgttgtcccatccagcctccactcgtgtccatggtgtcctcctcctcctcaccgtgcagcagcagcagctggtcgctggggttactgcctttgtttggcaaacttgggtttacctgcctgtagacaagtctctctcataccaacagaacttccggtacttccagaaccaactcacctgacctgcaactcaaaggcttttttaagaaaaccaccaaaaaaaaaaatttttttaaagaaaaaaatgtatatagtaacgcatctcctccaggcttgatttgggcaatggggttatgtctttcatatgactgtgtaaaacaaagacaggacttggaggggaagcacaccacccagtgtgccatgactgaggtgtctcgttcatctctcagaagcaccttggggcctcgccagggccgtggtcttcaccgaggcgtgggtgggcagccgttccccaggctgtgtggggtcctgctttcttctgctgagacagtgacgctttccagtttccaccctaatcagccactgctggtcacagccccacagccatgggtatttctgtggtctcctcgcttcattgaagcaaagcatgagccttcctagacaagggcagctggggaggggaagggaccggaagtttgtgaagttgaacagtccatccatctgcactgagaggctggatcctgagtcccggggcagcaggatcccaggaaccttcctcctccagggcagcacaggactcagccatgtctggaccggccctgctgaggctacagtcactctggaagctctgcgcttcatcaggaggcaggactgtggcgggaggggtccttgaagatgggtgtggggagcagtgggtcaggaagtgggagccagaggtttgactcactttgctttatttttcaggctacaatacaggtcagagacaatggcttataaaggtttagtgtggtctcaggatgtgacaggcagtccagcctgacctttctgcacactccagacaaacttcccagacaagctcctttgtgcctctacgtggagagggtgtggaaagttatcacattaaaagatggaggatttgctctgtt

SEQ ID NO: 441955 - DNA, 2519 bp, Homo sapiens
agagtcaggggagagaggaggccacaagaaccagaaaactgccctaaaagaacgttcagaaggaatcaggccggcagtccttggaaagaaaaatctagaaattcaataaaacttcatgagtgtgccaggagaatgtacgggtaatctgattcggaacagaaacatttcacctctgagttggaagacctcgtaagttaatggtcacagtgagttggatattgtatttctttttcagtgttctcaaaagtgtctgttatggggaaggttgctgatgtccccttgatttttctgaggactccttagagtattggagtctgcacaaaaccccgcagagtagaaagattcctgaggacctccagaagtactcgttaacaagtcatattgctgattaaaaacagtgtagtgagagctcagtaaatgtttattgaatagataaatccatggttgtagtcatgatcattgacataatatgctccctttaggaaggtggatatctaaaaatgtgtgaatcaggtggaatgttttgtcacatgctcactgctttctactctagattaccgcttaaaccccatgttaagaaaagcctgtaaagctgacattcctaaattctgtcacggtatcctgactaaggccaaggatgattcagaattagaaggacaagtcatctcttgcctgaagctgagatatgctgaccagcgcctgtcttcagactgtgaagaccagatccgaatcattatccaggagtccgccctggactaccgcctggatcctcagctccagctgcactgctcagacgagatctccagtctatgtgctgaagaagcagcagcccaagagcagacaggtcaggtggaggagtgcctcaaggtcaacctgctcaagatcaaaacagaattgtgtaaaaaggaagtgctaaacatgctgaaggaaagcaaagcagacatctttgttgacccggtacttcatactgcttgtgccctggacattaaacaccactgcgcagccatcacccctggccgcgggcgtcaaatgtcctgtctcatggaagcactggaggataagcgggtgaggttacagcccgagtgcaaaaagcgcctcaatgaccggattgagatgtggagttacgcagcaaaggtggccccagcagatggcttctctgatcttgccatgcaagtaatgacgtctccatctaagaactacattctctctgtgatcagtgggagcatctgtatattgttcctgattggcctgatgtgtggacggatcaccaagcgagtgacacgagagctcaaggacaggtagagccaccttgaccaccaaaggaactacctatccagtgcccagtttgtacagccctcttgtatagcatccccactcacctcgctcttctcagaagtgacaccaaccccgtgttagagcattagcagatgtccactgcgttgtcccatccagcctccactcgtgtccatggtgtcctcctcctcctcaccgtgcagcagcagcagctggtcgctggggttactgcctttgtttggcaaacttgggtttacctgcctgtagacaagtctctctcataccaacagaacttccggtacttccagaaccaactcacctgacctgcaactcaaaggcttttttaagaaaaccaccaaaaaaaaaaatttttttaaagaaaaaaatgtatatagtaacgcatctcctccaggcttgatttgggcaatggggttatgtctttcatatgactgtgtaaaacaaagacaggacttggaggggaagcacaccacccagtgtgccatgactgaggtgtctcgttcatctctcagaagcaccttggggcctcgccagggccgtggtcttcaccgaggcgtgggtgggcagccgttccccaggctgtgtggggtcctgctttcttctgctgagacagtgacgctttccagtttccaccctaatcagccactgctggtcacagccccacagccatgggtatttctgtggtctcctcgcttcattgaagcaaagcatgagccttcctagacaagggcagctggggaggggaagggaccggaagtttgtgaagttgaacagtccatccatctgcactgagaggctggatcctgagtcccggggcagcaggatcccaggaaccttcctcctccagggcagcacaggactcagccatgtctggaccggccctgctgaggctacagtcactctggaagctctgcgcttcatcaggaggcaggactgtggcgggaggggtccttgaagatgggtgtggggagcagtgggtcaggaagtgggagccagaggtttgactcactttgctttatttttcaggctacaatacaggtcagagacaatggcttataaaggtttagtgtggtctcaggatgtgacaggcagtccagcctgacctttctgcacactccagacaaacttcccagacaagctcctttgtgcctctacgtggagagggtgtggaaagttatcacattaaaagatggaggatttgctctgtt

SEQ ID NO: 441956 - DNA, 2677 bp, Homo sapiens
  misc_feature (66)..(66): n is a, c, g, or t
  misc_feature (71)..(71): n is a, c, g, or t
tacaatcgagcggtaccggactgagatgatggaccagagctagactacaccctcatgagggtctgnaagcngatgataaagaggttctgtccggaagcagattctaaaaccatgttgcagtgcttgaagcaaaataaaaacagtgaattgatggatcccaaatgcaaacagatgataaccaagcgccagatcacccagaacacagattaccgcttaaaccccatgttaagaaaagcctgtaaagctgacattcctaaattctgtcacggtatcctgactaaggccaaggatgattcagaattagaaggacaagtcatctcttgcctgaagctgagatatgctgaccagcgcctgtcttcagactgtgaagaccagatccgaatcattatccaggagtccgccctggactaccgcctggatcctcagctccagctgcactgctcagacgagatctccagtctatgtgctgaagaagcagcagcccaagagcagacaggtcaggtggaggagtgcctcaaggtcaacctgctcaagatcaaaacagaattgtgtaaaaaggaagtgctaaacatgctgaaggaaagcaaagcagacatctttgttgacccggtacttcatactgcttgtgccctggacattaaacaccactgcgcagccatcacccctggccgcgggcgtcaaatgtcctgtctcatggaagcactggaggataagcgggtgaggttacagcccgagtgcaaaaagcgcctcaatgaccggattgagatgtggagttacgcagcaaaggtggccccagcagatggcttctctgatcttgccatgcaagtaatgacgtctccatctaagaactacattctctctgtgatcagtgggagcatctgtatattgttcctgattggcctgatgtgtggacggatcaccaagcgagtgacacgagagctcaaggacaggtagagccaccttgaccaccaaaggaactacctatccagtgcccagtttgtacagccctcttgtatagcatccccactcacctcgctcttctcagaagtgacaccaaccccgtgttagagcattagcagatgtccactgcgttgtcccatccagcctccactcgtgtccatggtgtcctcctcctcctcaccgtgcagcagcagcagctggtcgctggggttactgcctttgtttggcaaacttgggtttacctgcctgtagacaagtctctctcataccaacagaacttccggtacttccagaaccaactcacctgacctgcaactcaaaggcttttttaagaaaaccaccaaaaaaaaaaatttttttaaagaaaaaaatgtatatagtaacgcatctcctccaggcttgatttgggcaatggggttatgtctttcatatgactgtgtaaaacaaagacaggacttggaggggaagcacaccacccagtgtgccatgactgaggtgtctcgttcatctctcagaagcaccttggggcctcgccagggccgtggtcttcaccgaggcgtgggtgggcagccgttccccaggctgtgtggggtcctgctttcttctgctgagacagtgacgctttccagtttccaccctaatcagccactgctggtcacagccccacagccatgggtatttctgtggtctcctcgcttcattgaagcaaagcatgagccttcctagacaagggcagctggggaggggaagggaccggaagtttgtgaagttgaacagtccatccatctgcactgagaggctggatcctgagtcccggggcagcaggatcccaggaaccttcctcctccagggcagcacaggactcagccatgtctggaccggccctgctgaggctacagtcactctggaagctctgcgcttcatcaggaggcaggactgtggcgggaggggtccttgaagatgggtgtggggagcagtgggtcaggaagtgggagccagaggtttgactcactttgctttatttttcaggctacaatacaggtcagagacaatggcttataaaggtttagtgtggtctcaggatgtgacaggcagtccagcctgacctttctgcacactccagacaaacttcccagacaagctcctttgtgcctctacgtggagagggtgtggaaagttatcacattaaaagatggaggatttgctctgttttttttctttctgtccatttgctgcgtgtacccactctagtaggcattggctaaatgttgtattttggcgattcatcaacctttgcagaatatgggctttatagaagcaatattcttggccatcccgcctcattcctccagtgtggacgctcggcgtgtgcacaacacacatcacacacaacagcacacacaatggggaagcaaagccgaagataggtaacataacataaaatgtgcaggtcagaaactaaacaagagtcaagacagagccctcctcagtctaacttaatgttgtaattttgtttcatctccagcccaatcaaccgtttatagagttcaaagtattgtccctttcccccatcccaaaattaccctatgcaaacagtcccaccttagtcaagtatggtggtgatgctgaggggtgatagcttaaaatggaatgttacctatcgtcctagatttcactcaatggaggatatacactccccttccctgttacaagcata

SEQ ID NO: 441957 - DNA, 1650 bp, Homo sapiens
cgttcgagtctcagctacccctggattgggactcacgcattctgatgtgatagctaaggacatatctctgttgttccaggttgctccggtacttcatactgcttgtgccctggacattaaacaccactgcgcagccatcacccctggccgcgggcgtcaaatgtcctgtctcatggaagcactggaggataagcgggtgaggttacagcccgagtgcaaaaagcgcctcaatgaccggattgagatgtggagttacgcagcaaaggtggccccagcagatggcttctctgatcttgccatgcaagtaatgacgtctccatctaagaactacattctctctgtgatcagtgggagcatctgtatattgttcctgattggcctgatgtgtggacggatcaccaagcgagtgacacgagagctcaaggacaggtagagccaccttgaccaccaaaggaactacctatccagtgcccagtttgtacagccctcttgtatagcatccccactcacctcgctcttctcagaagtgacaccaaccccgtgttagagcattagcagatgtccactgcgttgtcccatccagcctccactcgtgtccatggtgtcctcctcctcctcaccgtgcagcagcagcagctggtcgctggggttactgcctttgtttggcaaacttgggtttacctgcctgtagacaagtctctctcataccaacagaacttccggtacttccagaaccaactcacctgacctgcaactcaaaggcttttttaagaaaaccaccaaaaaaaaaaatttttttaaagaaaaaaatgtatatagtaacgcatctcctccaggcttgatttgggcaatggggttatgtctttcatatgactgtgtaaaacaaagacaggacttggaggggaagcacaccacccagtgtgccatgactgaggtgtctcgttcatctctcagaagcaccttggggcctcgccagggccgtggtcttcaccgaggcgtgggtgggcagccgttccccaggctgtgtggggtcctgctttcttctgctgagacagtgacgctttccagtttccaccctaatcagccactgctggtcacagccccacagccatgggtatttctgtggtctcctcgcttcattgaagcaaagcatgagccttcctagacaagggcagctggggaggggaagggaccggaagtttgtgaagttgaacagtccatccatctgcactgagaggctggatcctgagtcccggggcagcaggatcccaggaaccttcctcctccagggcagcacaggactcagccatgtctggaccggccctgctgaggctacagtcactctggaagctctgcgcttcatcaggaggcaggactgtggcgggaggggtccttgaagatgggtgtggggagcagtgggtcaggaagtgggagccagaggtttgactcactttgctttatttttcaggctacaatacaggtcagagacaatggcttataaaggtttagtgtggtctcaggatgtgacaggcagtccagcctgacctttctgcacactccagacaaacttcccagacaagctcctttgtgcctctacgtggagagggtgtggaaagttatcacattaaaagatggaggatttgctctgtt

SEQ ID NO: 441958 - DNA, 1423 bp, Homo sapiens
aatgtattgattatgagtttggagttacccaagcaaaggtggccccagcagatggcttctctgatcttgccatgcaagtaatgacgtctccatctaagaactacattctctctgtgatcagtgggagcatctgtatattgttcctgattggcctgatgtgtggacggatcaccaagcgagtgacacgagagctcaaggacaggtagagccaccttgaccaccaaaggaactacctatccagtgcccagtttgtacagccctcttgtatagcatccccactcacctcgctcttctcagaagtgacaccaaccccgtgttagagcattagcagatgtccactgcgttgtcccatccagcctccactcgtgtccatggtgtcctcctcctcctcaccgtgcagcagcagcagctggtcgctggggttactgcctttgtttggcaaacttgggtttacctgcctgtagacaagtctctctcataccaacagaacttccggtacttccagaaccaactcacctgacctgcaactcaaaggcttttttaagaaaaccaccaaaaaaaaaaatttttttaaagaaaaaaatgtatatagtaacgcatctcctccaggcttgatttgggcaatggggttatgtctttcatatgactgtgtaaaacaaagacaggacttggaggggaagcacaccacccagtgtgccatgactgaggtgtctcgttcatctctcagaagcaccttggggcctcgccagggccgtggtcttcaccgaggcgtgggtgggcagccgttccccaggctgtgtggggtcctgctttcttctgctgagacagtgacgctttccagtttccaccctaatcagccactgctggtcacagccccacagccatgggtatttctgtggtctcctcgcttcattgaagcaaagcatgagccttcctagacaagggcagctggggaggggaagggaccggaagtttgtgaagttgaacagtccatccatctgcactgagaggctggatcctgagtcccggggcagcaggatcccaggaaccttcctcctccagggcagcacaggactcagccatgtctggaccggccctgctgaggctacagtcactctggaagctctgcgcttcatcaggaggcaggactgtggcgggaggggtccttgaagatgggtgtggggagcagtgggtcaggaagtgggagccagaggtttgactcactttgctttatttttcaggctacaatacaggtcagagacaatggcttataaaggtttagtgtggtctcaggatgtgacaggcagtccagcctgacctttctgcacactccagacaaacttcccagacaagctcctttgtgcctctacgtggagagggtgtggaaagttatcacattaaaagatggaggatttgctctgtt

SEQ ID NO: 441959 - DNA, 1831 bp, Homo sapiens
  misc_feature (66)..(66): n is a, c, g, or t
  misc_feature (71)..(71): n is a, c, g, or t
tacaatcgagcggtaccggactgagatgatggaccagagctagactacaccctcatgagggtctgnaagcngatgataaagaggttctgtccggaagcagattctaaaaccatgttgcagtgcttgaagcaaaataaaaacagtgaattgatggatcccaaatgcaaacagatgataaccaagcgccagatcacccagaacacagattaccgcttaaaccccatgttaagaaaagcctgtaaagctgacattcctaaattctgtcacggtatcctgactaaggccaaggatgattcagaattagaaggacaagtcatctcttgcctgaagctgagatatgctgaccagcgcctgtcttcagactgtgaagaccagatccgaatcattatccaggagtccgccctggactaccgcctggatcctcagctccagctgcactgctcagacgagatctccagtctatgtgctgaagaagcagcagcccaagagcagacaggtcaggtggaggagtgcctcaaggtcaacctgctcaagatcaaaacagaattgtgtaaaaaggaagtgctaaacatgctgaaggaaagcaaagcagacatctttgttgacccggtacttcatactgcttgtgccctggacattaaacaccactgcgcagccatcacccctggccgcgggcgtcaaatgtcctgtctcatggaagcactggaggataagcgggtgaggttacagcccgagtgcaaaaagcgcctcaatgaccggattgagatgtggagttacgcagcaaaggtggccccagcagatggcttctctgatcttgccatgcaagtaatgacgtctccatctaagaactacattctctctgtgatcagtgggagcatctgtatattgttcctgattggcctgatgtgtggacggatcaccaagcgagtgacacgagagctcaaggacaggtagagccaccttgaccaccaaaggaactacctatccagtgcccagtttgtacagccctcttgtatagcatccccactcacctcgctcttctcagaagtgacaccaaccccgtgttagagcattagcagatgtccactgcgttgtcccagtgtgccatgactgaggtgtctcgttcatctctcagaagcaccttggggcctcgccagggccgtggtcttcaccgaggcgtgggtgggcagccgttccccaggctgtgtggggtcctgctttcttctgctgagacagtgacgctttccagtttccaccctaatcagccactgctggtcacagccccacagccatgggtatttctgtggtctcctcgcttcattgaagcaaagcatgagccttcctagacaagggcagctggggaggggaagggaccggaagtttgtgaagttgaacagtccatccatctgcactgagaggctggatcctgagtcccggggcagcaggatcccaggaaccttcctcctccagggcagcacaggactcagccatgtctggaccggccctgctgaggctacagtcactctggaagctctgcgcttcatcaggaggcaggactgtggcgggaggggtccttgaagatgggtgtggggagcagtgggtcaggaagtgggagccagaggtttgactcactttgctttatttttcaggctacaatacaggtcagagacaatggcttataaaggtttagtgtggtctcaggatgtgacaggcagtccagcctgacctttctgcacactccagacaaacttcccagacaagctcctttgtgcctctacgtggagagggtgtggaaagttatcacattaaaagatggaggatttgctctgtt

SEQ ID NO: 441960 - DNA, 1500 bp, Homo sapiens
  misc_feature (66)..(66): n is a, c, g, or t
  misc_feature (71)..(71): n is a, c, g, or t
tacaatcgagcggtaccggactgagatgatggaccagagctagactacaccctcatgagggtctgnaagcngatgataaagaggttctgtccggaagcagattctaaaaccatgttgcagtgcttgaagcaaaataaaaacagtgaattgatggatcccaaatgcaaacagatgataaccaagcgccagatcacccagaacacagattaccgcttaaaccccatgttaagaaaagcctgtaaagctgacattcctaaattctgtcacggtatcctgactaaggccaaggatgattcagaattagaaggacaagtcatctcttgcctgaagctgagatatgctgaccagcgcctgtcttcagactgtgaagaccagatccgaatcattatccaggagtccgccctggactaccgcctggatcctcagctccagctgcactgctcagacgagatctccagtctatgtgctgaagaagcagcagcccaagagcagacaggggttactgcctttgtttggcaaacttgggtttacctgcctgtagacaagtctctctcataccaacagaacttccggtacttccagaaccaactcacctgacctgcaactcaaaggcttttttaagaaaaccaccaaaaaaaaaaatttttttaaagaaaaaaatgtatatagtaacgcatctcctccaggcttgatttgggcaatggggttatgtctttcatatgactgtgtaaaacaaagacaggacttggaggggaagcacaccacccagtgtgccatgactgaggtgtctcgttcatctctcagaagcaccttggggcctcgccagggccgtggtcttcaccgaggcgtgggtgggcagccgttccccaggctgtgtggggtcctgctttcttctgctgagacagtgacgctttccagtttccaccctaatcagccactgctggtcacagccccacagccatgggtatttctgtggtctcctcgcttcattgaagcaaagcatgagccttcctagacaagggcagctggggaggggaagggaccggaagtttgtgaagttgaacagtccatccatctgcactgagaggctggatcctgagtcccggggcagcaggatcccaggaaccttcctcctccagggcagcacaggactcagccatgtctggaccggccctgctgaggctacagtcactctggaagctctgcgcttcatcaggaggcaggactgtggcgggaggggtccttgaagatgggtgtggggagcagtgggtcaggaagtgggagccagaggtttgactcactttgctttatttttcaggctacaatacaggtcagagacaatggcttataaaggtttagtgtggtctcaggatgtgacaggcagtccagcctgacctttctgcacactccagacaaacttcccagacaagctcctttgtgcctctacgtggagagggtgtggaaagttatcacattaaaagatggaggatttgctctgtt

SEQ ID NO: 441961 - DNA, 1059 bp, Homo sapiens
  misc_feature (66)..(66): n is a, c, g, or t
  misc_feature (71)..(71): n is a, c, g, or t
tacaatcgagcggtaccggactgagatgatggaccagagctagactacaccctcatgagggtctgnaagcngatgataaagaggttctgtccggaagcagattctaaaaccatgttgcagtgcttgaagcaaaataaaaacagtgaattgatggatcccaaatgcaaacagatgataaccaagcgccagatcacccagaacacagattaccgcttaaaccccatgttaagaaaagcctgtaaagctgacattcctaaattctgtcacggtatcctgactaaggccaaggatgattcagaattagaaggacaagtcatctcttgcctgaagctgagatatgctgaccagcgcctgtcttcagactgtgaagaccagatccgaatcattatccaggagtccgccctggactaccgcctggatcctcagctccagctgcactgctcagacgaggtgggatttgcgtgcaaaactggttacgcacagagctgctcagagaagtttccactggagaaaagttgtttactttctctcccttcagccgtgaatgatctggtgaattgaaggccatcttctaggctctccatggtctgcattcctgttctttgtaacactgaattcaacttggcattagtcctgacactctaaagcgttgttccatatttctctgttgaacaagggtgttctttcattatagctctctgtaaatttgttcttcccttcttcttattctggatggtaaacccaagacctgccagaaagataaaagtgctttcagctgggcacggtggctcacgcctgtaatcccaacactttgggaggccaaggagggtggatcatctgaggtcaggagttcaagaccagcctggctaacatggagaaatctgtctctactaaaaatacaaaaaattagccaggcgtggtggcgtgcaccagtaatctcagctactcaggaggctgaggcaggagaatcacttgaacccgggaggcggaggttgcagtgagctgagatcatgccactgcaccccagcctgggcgacagaggaagactctgtctcaaaa

SEQ ID NO: 441962 - DNA, 347 bp, Homo sapiens
gggctaaggggccagatcaaaagcaggcattttgttttttcttgttctttttgtttttttcttgttcttgtggttgttgttgtttgttttttttttcatgtcctgcttttgtagaaaagcttcgttttctgatcagcccatgtatcctccctttgtcacatgcagcgcctgtcttcagactgtgaagaccagatccgaatcattatccaggagtccgccctggactaccgcctggatcctcagctccagctgcactgctcagacgaggtgggatttgcgtgcaaaactggttacgcacagagctgctcagagaagtttccactggagaaaagttgtttactttctct

SEQ ID NO: 441963 - DNA, 2403 bp, Homo sapiens
  misc_feature (66)..(66): n is a, c, g, or t
  misc_feature (71)..(71): n is a, c, g, or t
tacaatcgagcggtaccggactgagatgatggaccagagctagactacaccctcatgagggtctgnaagcngatgataaagaggttctgtccggaagcagattctaaaaccatgttgcagtgcttgaagcaaaataaaaacagtgaattgatggatcccaaatgcaaacagatgataaccaagcgccagatcacccagaacacagattaccgcttaaaccccatgttaagaaaagcctgtaaagctgacattcctaaattctgtcacggtatcctgactaaggccaaggatgattcagaattagaaggacaagtcatctcttgcctgaagctgagatatgctgaccagcgcctgtcttcagactgtgaagaccagatccgaatcattatccaggagtccgccctggactaccgcctggatcctcagctccagctgcactgctcagacgagatctccagtctatgtgctgaagaagcagcagcccaagagcagacaggtcaggtggaggagtgcctcaaggtcaacctgctcaagatcaaaacagaattgtgtaaaaaggaagtgctaaacatgctgaaggaaagcaaagcagacatctttgttgacccggtacttcatactgcttgtgccctggacattaaacaccactgcgcagccatcacccctggccgcgggcgtcaaatgtcctgtctcatggaagcactggaggataagcgggtgaggttacagcccgagtgcaaaaagcgcctcaatgaccggattgagatgtggagttacgcagcaaaggtggccccagcagatggcttctctgatcttgccatgcaagtaatgacgtctccatctaagaactacattctctctgtgatcagtgggagcatctgtatattgttcctgattggcctgatgtgtggacggatcaccaagcgagtgacacgagagctcaaggacaggtagagccaccttgaccaccaaaggaactacctatccagtgcccagtttgtacagccctcttgtatagcatccccactcacctcgctcttctcagaagtgacaccaaccccgtgttagagcattagcagatgtccactgcgttgtcccatccagcctccactcgtgtccatggtgtcctcctcctcctcaccgtgcagcagcagcagctggtcgctggggttactgcctttgtttggcaaacttgggtttacctgcctgtagacaagtctctctcataccaacagaacttccggtacttccagaaccaactcacctgacctgcaactcaaaggcttttttaagaaaaccaccaaaaaaaaaaatttttttaaagaaaaaaatgtatatagtaacgcatctcctccaggcttgatttgggcaatggggttatgtctttcatatgactgtgtaaaacaaagacaggacttggaggggaagcacaccacccagtgtgccatgactgaggtgtctcgttcatctctcagaagcaccttggggcctcgccagggccgtggtcttcaccgaggcgtgggtgggcagccgttccccaggctgtgtggggtcctgctttcttctgctgagacagtgacgctttccagtttccaccctaatcagccactgctggtcacagccccacagccatgggtatttctgtggtctcctcgcttcattgaagcaaagcatgagccttcctagacaagggcagctggggaggggaagggaccggaagtttgtgaagttgaacagtccatccatctgcactgagaggctggatcctgagtcccggggcagcaggatcccaggaaccttcctcctccagggcagcacaggactcagccatgtctggaccggccctgctgaggctacagtcactctggaagctctgcgcttcatcaggaggcaggactgtggcgggaggggtccttgaagatgggtgtggggagcagtgggtcaggaagtgggagccagaggtttgactcactttgctttatttttcaggctacaatacaggtcagagacaatggcttataaaggtttagtgtggtctcaggatgtgacaggcagtccagcctgacctttctgcacactccagacaaacttcccagacaagctcctttgtgcctctacgtggagagggtgtggaaagttatcacattaaaagatggaggatttgctctgttaaaaaaaacaacaaacaaaacaaaaacaaagaaaaaggggggggcgcgcaaaaggaaccccacaggggggcaaaggtatcccgggacccgagtttcggggtaccaagggtgggccccaaagtggggcgccgaacttaaacgccaaggcctgggccagtcgttaacaccagcgctgccactggggcacaccgggaaggcggggagacctgggggaagggaacccaatccggag

SEQ ID NO: 441964 - DNA, 2052 bp, Homo sapiens
  misc_feature (66)..(66): n is a, c, g, or t
  misc_feature (71)..(71): n is a, c, g, or t
tacaatcgagcggtaccggactgagatgatggaccagagctagactacaccctcatgagggtctgnaagcngatgataaagaggttctgtccggaagcagattctaaaaccatgttgcagtgcttgaagcaaaataaaaacagtgaattgatggatcccaaatgcaaacagatgataaccaagcgccagatcacccagaacacagattaccgcttaaaccccatgttaagaaaagcctgtaaagctgacattcctaaattctgtcacggtatcctgactaaggccaaggatgattcagaattagaaggacaagtcatctcttgcctgaagctgagatatgctgaccagcgcctgtcttcagactgtgaagaccagatccgaatcattatccaggagtccgccctggactaccgcctggatcctcagctccagctgcactgctcagacgagatctccagtctatgtgctgaagaagcagcagcccaagagcagacaggtcaggtggaggagtgcctcaaggtcaacctgctcaagatcaaaacagaattgtgtaaaaaggaagtgctaaacatgctgaaggaaagcaaagcagacatctttgttgacccggtacttcatactgcttgtgccctggacattaaacaccactgcgcagccatcacccctggccgcgggcgtcaaatgtcctgtctcatggaagcactggaggataagcgggtgaggttacagcccgagtgcaaaaagcgcctcaatgaccggattgagatgtggagttacgcagcaaaggtggccccagcagatggcttctctgatcttgccatgcaagtaatgacgtctccatctaagaactacattctctctgtgatcagtgggagcatctgtatattgttcctgattggcctgatgtgtggacggatcaccaagcgagtgacacgagagctcaaggacaggtagagccaccttgaccaccaaaggaactacctatccagtgcccagtttgtacagccctcttgtatagcatccccactcacctcgctcttctcagaagtgacaccaaccccgtgttagagcattagcagatgtccactgcgttgtcccatccagcctccactcgtgtccatggtgtcctcctcctcctcaccgtgcagcagcagcagctggtcgctggggttactgcctttgtttggcaaacttgggtttacctgcctgtagacaagtctctctcataccaacagaacttccggtacttccagaaccaactcacctgacctgcaactcaaaggcttttttaagaaaaccaccaaaaaaaaaaatttttttaaagaaaaaaatgtatatagtaacgcatctcctccaggcttgatttgggcaatggggttatgtctttcatatgactgtgtaaaacaaagacaggacttggaggggaagcacaccacccagtgtgccatgactgaggtgtctcgttcatctctcagaagcaccttggggcctcgccagggccgtggtcttcaccgaggcgtgggtgggcagccgttccccaggctgtgtggggtcctgctttcttctgctgagacagtgacgctttccagtttccaccctaatcagccactgctggtcacagccccacagccatgggtatttctgtggtctcctcgcttcattgaagcaaagcatgagccttcctcctccagggcagcacaggactcagccatgtctggaccggccctgctgaggctacagtcactctggaagctctgcgcttcatcaggaggcaggactgtggcgggaggggtccttgaagatgggtgtggggagcagtgggtcaggaagtgggagccagaggtttgactcactttgctttatttttcaggctacaatacaggtcagagacaatggcttataaaggtttagtgtggtctcaggatgtgacaggcagtccagcctgacctttctgcacactccagacaaacttcccagacaagctcctttgtgcctctacgtggagagggtgtggaaagttatcacattaaaagatggaggatttgctctgtt

SEQ ID NO: 441965 - DNA, 1499 bp, Homo sapiens
gagttttctttgtttttccattggggggttttcttaaaaaagcctttgaggttacagcccgagtgcaaaaagcgcctcaatgaccggattgagatgtggagttacgcagcaaaggtggccccagcagatggcttctctgatcttgccatgcaagtaatgacgtctccatctaagaactacattctctctgtgatcagtgggagcatctgtatattgttcctgattggcctgatgtgtggacggatcaccaagcgagtgacacgagagctcaaggacaggtagagccaccttgaccaccaaaggaactacctatccagtgcccagtttgtacagccctcttgtatagcatccccactcacctcgctcttctcagaagtgacaccaaccccgtgttagagcattagcagatgtccactgcgttgtcccatccagcctccactcgtgtccatggtgtcctcctcctcctcaccgtgcagcagcagcagctggtcgctggggttactgcctttgtttggcaaacttgggtttacctgcctgtagacaagtctctctcataccaacagaacttccggtacttccagaaccaactcacctgacctgcaactcaaaggcttttttaagaaaaccaccaaaaaaaaaaatttttttaaagaaaaaaatgtatatagtaacgcatctcctccaggcttgatttgggcaatggggttatgtctttcatatgactgtgtaaaacaaagacaggacttggaggggaagcacaccacccagtgtgccatgactgaggtgtctcgttcatctctcagaagcaccttggggcctcgccagggccgtggtcttcaccgaggcgtgggtgggcagccgttccccaggctgtgtggggtcctgctttcttctgctgagacagtgacgctttccagtttccaccctaatcagccactgctggtcacagccccacagccatgggtatttctgtggtctcctcgcttcattgaagcaaagcatgagccttcctagacaagggcagctggggaggggaagggaccggaagtttgtgaagttgaacagtccatccatctgcactgagaggctggatcctgagtcccggggcagcaggatcccaggaaccttcctcctccagggcagcacaggactcagccatgtctggaccggccctgctgaggctacagtcactctggaagctctgcgcttcatcaggaggcaggactgtggcgggaggggtccttgaagatgggtgtggggagcagtgggtcaggaagtgggagccagaggtttgactcactttgctttatttttcaggctacaatacaggtcagagacaatggcttataaaggtttagtgtggtctcaggatgtgacaggcagtccagcctgacctttctgcacactccagacaaacttcccagacaagctcctttgtgcctctacgtggagagggtgtggaaagttatcacattaaaagatggaggatttgctctgtt

SEQ ID NO: 441966 - DNA, 1790 bp, Homo sapiens
  misc_feature (66)..(66): n is a, c, g, or t
  misc_feature (71)..(71): n is a, c, g, or t
tacaatcgagcggtaccggactgagatgatggaccagagctagactacaccctcatgagggtctgnaagcngatgataaagaggttctgtccggaagcagattctaaaaccatgttgcagtgcttgaagcaaaataaaaacagtgaattgatggatcccaaatgcaaacagatgataaccaagcgccagatcacccagaacacagattaccgcttaaaccccatgttaagaaaagcctgtaaagctgacattcctaaattctgtcacggtatcctgactaaggccaaggatgattcagaattagaaggacaagtcatctcttgcctgaagctgagatatgctgaccagcgcctgtcttcagactgtgaagaccagatccgaatcattatccaggagtccgccctggactaccgcctggatcctcagctccagctgcactgctcagacgagatctccagtctatgtgctgaagaagcagcagcccaagagcagacaggtcaggtggaggagtgcctcaaggtcaacctgctcaagatcaaaacagaattgtgtaaaaaggaagtgctaaacatgctgaaggaaagcaaagcagacatctttgttgacccggtacttcatactgcttgtgccctggacattaaacaccactgcgcagccatcacccctggccgcgggcgtcaaatgtcctgtctcatggaagcactggaggataagcgggtgaggttacagcccgagtgcaaaaagcgcctcaatgaccggattgagatgtggagttacgcagcaaaggggttactgcctttgtttggcaaacttgggtttacctgcctgtagacaagtctctctcataccaacagaacttccggtacttccagaaccaactcacctgacctgcaactcaaaggcttttttaagaaaaccaccaaaaaaaaaaatttttttaaagaaaaaaatgtatatagtaacgcatctcctccaggcttgatttgggcaatggggttatgtctttcatatgactgtgtaaaacaaagacaggacttggaggggaagcacaccacccagtgtgccatgactgaggtgtctcgttcatctctcagaagcaccttggggcctcgccagggccgtggtcttcaccgaggcgtgggtgggcagccgttccccaggctgtgtggggtcctgctttcttctgctgagacagtgacgctttccagtttccaccctaatcagccactgctggtcacagccccacagccatgggtatttctgtggtctcctcgcttcattgaagcaaagcatgagccttcctagacaagggcagctggggaggggaagggaccggaagtttgtgaagttgaacagtccatccatctgcactgagaggctggatcctgagtcccggggcagcaggatcccaggaaccttcctcctccagggcagcacaggactcagccatgtctggaccggccctgctgaggctacagtcactctggaagctctgcgcttcatcaggaggcaggactgtggcgggaggggtccttgaagatgggtgtggggagcagtgggtcaggaagtgggagccagaggtttgactcactttgctttatttttcaggctacaatacaggtcagagacaatggcttataaaggtttagtgtggtctcaggatgtgacaggcagtccagcctgacctttctgcacactccagacaaacttcccagacaagctcctttgtgcctctacgtggagagggtgtggaaagttatcacattaaaagatggaggatttgctctgtt

SEQ ID NO: 441967 - DNA, 1132 bp, Homo sapiens
  misc_feature (66)..(66): n is a, c, g, or t
  misc_feature (71)..(71): n is a, c, g, or t
tacaatcgagcggtaccggactgagatgatggaccagagctagactacaccctcatgagggtctgnaagcngatgataaagaggttctgtccggaagcagattctaaaaccatgttgcagtgcttgaagcaaaataaaaacagtgaattgatggatcccaaatgcaaacagatgataaccaagcgccagatcacccagaacacagattaccgcttaaaccccatgttaagaaaagcctgtaaagctgacattcctaaattctgtcacggtatcctgactaaggccaaggatgattcagaattagaaggacaagtcatctcttgcctgaagctgagatatgctgaccagcgcctgtcttcagactgtgaagaccagatccgaatcattatccaggagtccgccctggactaccgcctggatcctcagctccagctgcactgctcagacgagatctccagtctatgtgctgaagaagcagcagcccaagagcagacaggtcaggtggaggagtgcctcaaggtcaacctgctcaagatcaaaacagaattgtgtaaaaaggaagtgctaaacatgctgaaggaaagcaaagcagacatctttgttgacccggtacttcatactgcttgtgccctggacattaaacaccactgcgcagccatcacccctggccgcgggcgtcaaatgtcctgtctcatggaagcactggaggataagcgggtgaggttacagcccgagtgcaaaaagcgcctcaatgaccggattgagatgtggagttacgcagcaaaggtggccccagcagatggcttctctgatcttgccatgcaagtaatgacgtctccatctaagaactacattctctctgtgatcagtgggagcatctgtatattgttcctgattggcctgatgtgtggacggatcaccaagcgagtgacacgagagctcaaggacaggctacaatacaggtcagagacaatggcttataaaggtttagtgtggtctcaggatgtgacaggcagtccagcctgacctttctgcacactccagacaaacttcccagacaagctcctttgtgcctctacgtggagagggtgtggaaagttatcacattaaaagatggaggatttgctctgtt

SEQ ID NO: 441968 - DNA, 366 bp, Homo sapiens
  misc_feature (66)..(66): n is a, c, g, or t
  misc_feature (71)..(71): n is a, c, g, or t
tacaatcgagcggtaccggactgagatgatggaccagagctagactacaccctcatgagggtctgnaagcngatgataaagaggttctgtccggaagcagattctaaaaccatgttgcagtgcttgaagcaaaataaaaacagtgaattgatggatcccaaatgcaaacagatgataaccaagcgccagatcacccagaacacaggtaagatcttggcttggctctcctggccccgtggagtatctgaaaaggaattcagtggctgtagagtgacctgctcaaactcccagggctttgttgcctgggaattttaagggaggagtctgagtgtaagcagggccttcctcctttgaggagcatccaga

SEQ ID NO: 441969 - DNA, 1357 bp, Homo sapiens
  misc_feature (30)..(30): n is a, c, g, or t
  misc_feature (34)..(34): n is a, c, g, or t
  misc_feature (40)..(40): n is a, c, g, or t
  misc_feature (72)..(73): n is a, c, g, or t
gcctcctactccctccacaccccctcaccncccnccccgnccgaaactacggctaggtacgaggctgggtgnngccaacaacctttccaagggagtggttgtgtgatcgccatcttagggaaaagatgttctcgtccgtggcgcacctggcgcgggcgaaccccttcaacacgccacatctgcagctggtgcacgatggtctcggggacctccgcagcagctccccagggcccacgggccagccccgccgccctcgcaacctggcagccgccgccgtggaagagtacagttgtgaatttggctccgcgaagtattatgcactgtgtggctttggtggggtcttaagttgtggtctgacacacactgctgtggttcccctggatttagtgaaatgccgtatgcaggtggacccccaaaagtacaagggcatatttaacggattctcagttacacttaaagaggatggtgttcgtggtttggctaaaggatgggctccgactttccttggctactccatgcagggactctgcaagtttggcttttatgaagtctttaaagtcttgtatagcaatatgcttggagaggagaatacttatctctggcgcacatcactatatttggctgcctctgccagtgctgaattctttgctgacattgccctggctcctatggaagctgctaaggttcgaattcaaacccagccaggttatgccaacactttgagggatgcagctcccaaaatgtataaggaagaaggcctaaaagcattctacaagggggttgctcctctctggatgagacagataccatacaccatgatgaagttcgcctgctttgaacgtactgttgaagcactgtacaagtttgtggttcctaagccccgcagtgaatgttcaaagccagagcagctggttgtaacatttgtagcaggttacatagctggagtcttttgtgcaattgtttctcaccctgctgattctgtggtatctgtgttgaataaagaaaaaggtagcagtgcttctctggtcctcagacgaactgggtttacggtgtttggcagggagtggtggccggaataaccttggtgtggacccctgatgtgctaaaggggtaactcatgtaagccgggagggggtactaagaagttctgcgcttcttacggagatgcgagattgtacgaaaaacgtgtgttacacgagtttgtaacaccaatgagagtgatgctgtcacatgctgaagaaagagagttattatggaggggaagagcatgtacttatggtagtagatcggacatctgtaggtccttacaaacagtctgtggggtgtgcattctttcttctgcgtacttcacttatga

SEQ ID NO: 441970 - DNA, 1033 bp, Homo sapiens
  misc_feature (935)..(935): n is a, c, g, or t
  misc_feature (972)..(972): n is a, c, g, or t
  misc_feature (974)..(975): n is a, c, g, or t
tggctagtacgagccgggtgtgtaatcggcacgaggcaacctttccaagggagtggttgtgtgatcgccatcttagggaaaagatgttctcgtccgtggcgcacctggcgcgggcgaaccccttcaacacgccacatctgcagctggtgcacgatggtctcggggacctccgcagcagctccccagggcccacgggccagccccgccgccctcgcaacctggcagccgccgccgtggaagagtacagttgtgaatttggctccgcgaagtattatgcactgtgtggctttggtggggtcttaagttgtggtctgacacacactgctgtggttcccctggatttagtgaaatgccgtatgcaggtggacccccaaaagtacaagggcatatttaacggattctcagttacacttaaagaggatggtgttcgtggtttggctaaaggatgggctccgactttccttggctactccatgcagggactctgcaagtttggcttttatgaagtctttaaagtcttgtatagcaatatgcttggagaggagaatacttatctctggcgcacatcactatatttggctgcctctgccagtgctgaattctttgctgacattgccctggctcctatggaagctgctaaggttcgaattcaaacccagccaggttatgccaacactttgagggatgcagctcccaaaatgtataaggaagaaggcctaaaagcattctacaagggggttgctcctctctggatgagacagataccatacaccatgatgaagttcgcctgctttgaacgtactgttgaagcactgtacaagtttgtggttcctaagccccgcagtgaatgttcaaagccagagcagctggttgtaacatttgtagcaggttacataggtggtgtacattggcggtaaagggagtttgggaatgtncacgggattgggttgggaaaaaggggggttggaagangnnagggagggggggaagtggcaggaagttaaggggtgagaccaggaagggagagggtgga

SEQ ID NO: 441971 - DNA, 716 bp, Homo sapiens
cggacgcgtgggtccggacgcgtgggtcgacccacgcgtacactttgagggatgcagctcccaaaatgtataaggaagaaggcctaaaagcattctacaagggggttgctcctctctggatgagacagataccatacaccatgatgaagttcgcctgctttgaacgtactgttgaagcactgtacaagtttgtggttcctaagccccgcagtgaatgttcaaagccagagcagctggttgtaacatttgtagcaggttacatagctggagtcttttgtgcaattgtttctcaccctgctgattctgtggtatctgtgttgaataaagaaaaaggtagcagtgcttctctggtcctcaagagacttggatttaaaggtgtatggaagggactgtttgcccgtatcatcatgattggtaccctgactgcactacagtggtttatctatgactccgtgaaggtctacttcagacttcctcgccctcctccacccgagatgccagagtctctgaagaagaagcttgggttaactcagtagttagatcaaagcaaatgtggactgaatctgcttgttgatcagtgttgaagaaagtgcaaaaggaacttttatatatttgacagtgtaggaaattgtctattcctgatataattactgtagtactcttgcttaaggcaagagtttcagatttactgttgaaataaacccaactcttcatga

SEQ ID NO: 441972 - DNA, 997 bp, Homo sapiens
  misc_feature (855)..(855): n is a, c, g, or t
  misc_feature (870)..(871): n is a, c, g, or t
  misc_feature (890)..(890): n is a, c, g, or t
  misc_feature (895)..(895): n is a, c, g, or t
tggttgtgtgatcgccatcttagggaaaagatgttctcgtccgtggcgcacctggcgcgggcgaaccccttcaacacgccacatctgcagctggtgcacgatggtctcggggacctccgcagcagctccccagggcccacgggccagccccgccgccctcgcaacctggcagccgccgccgtggaagagtacagttgtgaatttggctccgcgaagtattatgcactgtgtggctttggtggggtcttaagttgtggtctgacacacactgctgtggttcccctggatttagtgaaatgccgtatgcaggtggacccccaaaagtacaagggcatatttaacggattctcagttacacttaaagaggatggtgttcgtggtttggctaaaggatgggctccgactttccttggctactccatgcagggactctgcaagtttggcttttatgaagtctttaaagtcttgtatagcaatatgcttggagaggagaatacttatctctggcgcacatcactatatttggctgcctctgccagtgctgaattctttgctgacattgccctggctcctatggaagctgctaaggttcgaattcaaacccagccaggttatgccaacactttgagggatgcagctcccaaaatgtataaggaagaaggcctaaaagcattctacaagggggttgctcctctctggatgagacagataccatacaccatgatgaagttcgcctgctttgaacgtactgttgaagcactgtacaagtttgtggttcctaagccccgcagtgaatgttcaaagccagagcagctggttgtaacatttgtagcaggttacataggtgcggtaatncggggcttggtcacnngtccccgcgatcggggtgnggaanaaagggggtcgcccaacgtagggggggggggcgcaagaccggaggtacggaaaccccccagaagagagttggtattttgtcctgttacgtcaatgccttatc

SEQ ID NO: 441973 - DNA, 1039 bp, Homo sapiens
  misc_feature (30)..(30): n is a, c, g, or t
  misc_feature (34)..(34): n is a, c, g, or t
  misc_feature (40)..(40): n is a, c, g, or t
  misc_feature (72)..(73): n is a, c, g, or t
  misc_feature (875)..(875): n is a, c, g, or t
  misc_feature (882)..(882): n is a, c, g, or t
  misc_feature (928)..(928): n is a, c, g, or t
  misc_feature (950)..(950): n is a, c, g, or t
  misc_feature (954)..(954): n is a, c, g, or t
  misc_feature (959)..(960): n is a, c, g, or t
  misc_feature (964)..(964): n is a, c, g, or t
  misc_feature (966)..(967): n is a, c, g, or t
  misc_feature (972)..(972): n is a, c, g, or t
  misc_feature (1037)..(1039): n is a, c, g, or t
gcctcctactccctccacaccccctcaccncccnccccgnccgaaactacggctaggtacgaggctgggtgnngccaagggagtggttgtgtgatcgccatcttagggaaaagatgttctcgtccgtggcgcacctggcgcgggcgaaccccttcaacacgccacatctgcagctggtgcacgatggtctcggggacctccgcagcagctccccagggcccacgggccagccccgccgccctcgcaacctggcagccgccgccgtggaagagtacagttgtgaatttggctccgcgaagtattatgcactgtgtggctttggtggggtcttaagttgtggtctgacacacactgctgtggttcccctggatttagtgaaatgccgtatgcaggtggacccccaaaagtacaagggcatatttaacggattctcagttacacttaaagaggatggtgttcgtggtttggctaaaggatgggctccgactttccttggctactccatgcagggactctgcaagtttggcttttatgaagtctttaaagtcttgtatagcaatatgcttggagaggagaatacttatctctggcgcacatcactatatttggctgcctctgccagtgctgaattctttgctgacattgccctggctcctatggaagctgctaaggttcgaattcaaacccagccaggttatgccaacactttgagggatgcagctcccaaaatgtataaggaagaaggcctaaaagcattctacaagggggttgctcctctctggatgagacagataccatacaccatgatgaagttcgcctgctttgaacgtactgttgaagcactgtacaagtttgtggttcctaacccgaggatntaagcancagtggtgtacattggcggacagcgggctgggaggctcaccgggtnggttggtgaaaaaggggggtcngccnaaagnnaggngnnggggngcaaggcaggaagaatggagaaccccagaagttaatgtgtggagtgtgtgttcgtgtgttggttnnn

SEQ ID NO: 441974 - DNA, 240 bp, Homo sapiens
  misc_feature (18)..(18): n is a, c, g, or t
  misc_feature (21)..(21): n is a, c, g, or t
aaaaaaaaaaaaaaaaanatncttttcctcccccaccaaaaagggttaaaggaatatttttttgggggtacccccaaaaagctgaatctgcttgttgatcagtgttgaagaaagtgcaaaaggaacttttatatatttgacagtgtaggaaattgtctattcctgatataattactgtagtactcttgcttaaggcaagagtttcagatttactgttgaaataaacccaactcttcatga

SEQ ID NO: 441975 - DNA, 1011 bp, Homo sapiens
  misc_feature (880)..(880): n is a, c, g, or t
  misc_feature (920)..(921): n is a, c, g, or t
  misc_feature (924)..(924): n is a, c, g, or t
  misc_feature (931)..(931): n is a, c, g, or t
  misc_feature (933)..(933): n is a, c, g, or t
  misc_feature (944)..(944): n is a, c, g, or t
cggcgccttataggggttacgttacgtggtgcacttggctcttatcaattgggaaaagatgttctcgtccgtggcgcacctggcgcgggcgaaccccttcaacacgccacatctgcagctggtgcacgatggtctcggggacctccgcagcagctccccagggcccacgggccagccccgccgccctcgcaacctggcagccgccgccgtggaagagtacagttgtgaatttggctccgcgaagtattatgcactgtgtggctttggtggggtcttaagttgtggtctgacacacactgctgtggttcccctggatttagtgaaatgccgtatgcaggtggacccccaaaagtacaagggcatatttaacggattctcagttacacttaaagaggatggtgttcgtggtttggctaaaggatgggctccgactttccttggctactccatgcagggactctgcaagtttggcttttatgaagtctttaaagtcttgtatagcaatatgcttggagaggagaatacttatctctggcgcacatcactatatttggctgcctctgccagtgctgaattctttgctgacattgccctggctcctatggaagctgctaaggttcgaattcaaacccagccaggttatgccaacactttgagggatgcagctcccaaaatgtataaggaagaaggcctaaaagcattctacaagggggttgctcctctctggatgagacagataccatacaccatgatgaagttcgcctgctttgaacgtactgttgaagcactgtacaagtttgtggttcctaagccccgcagtgaatgttcaaagccagagcagctggttgtaacatttgtagcaggttacatagcctggagncctttgtgccaatggttccaccgcgatctgggtcggtgcnnaanaaacggncngctccggccanaactggtaagtctgacgccgggccgctaatatgccccgcacaggttcaaaccggagtaacgccacga

SEQ ID NO: 441976 - DNA, 843 bp, Homo sapiens
  misc_feature (802)..(803): n is a, c, g, or t
accacatagaatttctttaaattgtgggctttattttgactagtgttttaaatccaataaatgcctctattgtttgagtaaattgttcacttttagagtctggctgtaaatggctctttgctgctgctcttcacttctggccggagttcttcaagcttactagtgccccaaatagtcatttaacaagcacctatgtgttggagtgggtaaacaagtctgtgtattatgtgaagtaacaatgtcctttatctactaataagaccaaggcaaagagtacatgtagatttatttaaagtgctcttaatatcttagtatgaaaattttgtcagattagcctcttgtttatttacacaacattttaaaataatttgaatatattttaattaagatcattgaaacaaaaacaagacatcgaaaatttatttgttccaaactggattagaagtctacttacctaaaagagaaatgaatttgaaatattaggagggagaggaaggtgatgtataccatcccttctagtactggcagaaatagataagcttttcctccccccccattagttaatgtaatggatatgaaatgtacctttgctaaaacgtgttatgcatgtctcttgaagtgaatttagtttatgtgctttttttttttaacttgtgtttagtttgtttagtgttcacaaaactttatgctataagctacttaaagaactagcatatgttaggaatacagttatatctattatctagacagtagcttttaaaaagtaggaggtggaggttgctgtgaaccaagattgcgcccnngcacaacaagagtgaaactccatccatctcaaaaaaaaaa

SEQ ID NO: 441977 - DNA, 278 bp, Homo sapiens
ctaaattgcggccgcgtcgaccttcttcagagactctggcatctcgggtggaggagggcgaggagtctctgaagaagaagcttgggttaactcagtagttagatcaaagcaaatgtggactgaatctgcttgttgatcagtgttgaagaaagtgcaaaaggaacttttatatatttgacagtgtaggaaattgtctattcctgatataattactgtagtactcttgcttaaggcaagagtttcagatttactgttgaaataaacccaactcttcatga

SEQ ID NO: 441978 - DNA, 1350 bp, Homo sapiens
taaccataggctaggtacgaggctgggtggtgcgcaacaacctttccaagggagtggttgtgtgatcgccatcttagggaaaagatgttctcgtccgtggcgcacctggcgcgggcgaaccccttcaacacgccacatctgcagctggtgcacgatggtctcggggacctccgcagcagctccccagggcccacgggccagccccgccgccctcgcaacctggcagccgccgccgtggaagagtacagttgtgaatttggctccgcgaagtattatgcactgtgtggctttggtggggtcttaagttgtggtctgacacacactgctgtggttcccctggatttagtgaaatgccgtatgcaggtggacccccaaaagtacaagggcatatttaacggattctcagttacacttaaagaggatggtgttcgtggtttggctaaaggatgggctccgactttccttggctactccatgcagggactctgcaagtttggcttttatgaagtctttaaagtcttgtatagcaatatgcttggagaggagaatacttatctctggcgcacatcactatatttggctgcctctgccagtgctgaattctttgctgacattgccctggctcctatggaagctgctaaggttcgaattcaaacccagccaggttatgccaacactttgagggatgcagctcccaaaatgtataaggaagaaggcctaaaagcattctacaagggggttgctcctctctggatgagacagataccatacaccatgatgaagttcgcctgctttgaacgtactgttgaagcactgtacaagtttgtggttcctaagccccgcagtgaatgttcaaagccagagcagctggttgtaacatttgtagcaggttacatagctggagtcttttgtgcaattgtttctcaccctgctgattctgtggtatctgtgttgaataaagaaaaaggtagcagtgcttctctggtcctcaagagacttggatttaaaggtgtatggaagggactgtttgcccgtatcatcatgattggtaccctgactgcactacagtggtttatctatgactccgtgaaggtctacttcagacttcctcgccctcctccacccgagatgccagagtctctgaagaagaagcttgggttaactcagtagttagatcaaagcaaatgtggactgaatctgcttgttgatcagtgttgaagaaagtgcaaaaggaacttttatatatttgacagtgtaggaaattgtctattcctgatataattactgtagtactcttgcttaaggcaagagtttcagatttactgttgaaataaacccaactcttcatga

SEQ ID NO: 441979 - DNA, 1391 bp, Homo sapiens
  misc_feature (30)..(30): n is a, c, g, or t
  misc_feature (34)..(34): n is a, c, g, or t
  misc_feature (40)..(40): n is a, c, g, or t
  misc_feature (72)..(73): n is a, c, g, or t
gcctcctactccctccacaccccctcaccncccnccccgnccgaaactacggctaggtacgaggctgggtgnngccaacaacctttccaagggagtggttgtgtgatcgccatcttagggaaaagatgttctcgtccgtggcgcacctggcgcgggcgaaccccttcaacacgccacatctgcagctggtgcacgatggtctcggggacctccgcagcagctccccagggcccacgggccagccccgccgccctcgcaacctggcagccgccgccgtggaagagtacagttgtgaatttggctccgcgaagtattatgcactgtgtggctttggtggggtcttaagttgtggtctgacacacactgctgtggttcccctggatttagtgaaatgccgtatgcaggtggacccccaaaagtacaagggcatatttaacggattctcagttacacttaaagaggatggtgttcgtggtttggctaaaggatgggctccgactttccttggctactccatgcagggactctgcaagtttggcttttatgaagtctttaaagtcttgtatagcaatatgcttggagaggagaatacttatctctggcgcacatcactatatttggctgcctctgccagtgctgaattctttgctgacattgccctggctcctatggaagctgctaaggttcgaattcaaacccagccaggttatgccaacactttgagggatgcagctcccaaaatgtataaggaagaaggcctaaaagcattctacaagggggttgctcctctctggatgagacagataccatacaccatgatgaagttcgcctgctttgaacgtactgttgaagcactgtacaagtttgtggttcctaagccccgcagtgaatgttcaaagccagagcagctggttgtaacatttgtagcaggttacatagctggagtcttttgtgcaattgtttctcaccctgctgattctgtggtatctgtgttgaataaagaaaaaggtagcagtgcttctctggtcctcaagagacttggatttaaaggtgtatggaagggactgtttgcccgtatcatcatgattggtaccctgactgcactacagtggtttatctatgactccgtgaaggtctacttcagacttcctcgccctcctccacccgagatgccagagtctctgaagaagaagcttgggttaactcagtagttagatcaaagcaaatgtggactgaatctgcttgttgatcagtgttgaagaaagtgcaaaaggaacttttatatatttgacagtgtaggaaattgtctattcctgatataattactgtagtactcttgcttaaggcaagagtttcagatttactgttgaaataaacccaactcttcatga

SEQ ID NO: 441980 - DNA, 1347 bp, Homo sapiens
  misc_feature (10)..(10): n is a, c, g, or t
  misc_feature (14)..(14): n is a, c, g, or t
  misc_feature (16)..(16): n is a, c, g, or t
  misc_feature (18)..(18): n is a, c, g, or t
aggctaggtngagncngnggtaatcggcagaggccaacctttccaagggagtggttgtgtgatcgccatcttagggaaaagatgttctcgtccgtggcgcacctggcgcgggcgaaccccttcaacacgccacatctgcagctggtgcacgatggtctcggggacctccgcagcagctccccagggcccacgggccagccccgccgccctcgcaacctggcagccgccgccgtggaagagtacagttgtgaatttggctccgcgaagtattatgcactgtgtggctttggtggggtcttaagttgtggtctgacacacactgctgtggttcccctggatttagtgaaatgccgtatgcaggtggacccccaaaagtacaagggcatatttaacggattctcagttacacttaaagaggatggtgttcgtggtttggctaaaggatgggctccgactttccttggctactccatgcagggactctgcaagtttggcttttatgaagtctttaaagtcttgtatagcaatatgcttggagaggagaatacttatctctggcgcacatcactatatttggctgcctctgccagtgctgaattctttgctgacattgccctggctcctatggaagctgctaaggttcgaattcaaacccagccaggttatgccaacactttgagggatgcagctcccaaaatgtataaggaagaaggcctaaaagcattctacaagggggttgctcctctctggatgagacagataccatacaccatgatgaagttcgcctgctttgaacgtactgttgaagcactgtacaagtttgtggttcctaagccccgcagtgaatgttcaaagccagagcagctggttgtaacatttgtagcaggttacatagctggagtcttttgtgcaattgtttctcaccctgctgattctgtggtatctgtgttgaataaagaaaaaggtagcagtgcttctctggtcctcaagagacttggatttaaaggtgtatggaagggactgtttgcccgtatcatcatgattggtaccctgactgcactacagtggtttatctatgactccgtgaaggtctacttcagacttcctcgccctcctccacccgagatgccagagtctctgaagaagaagcttgggttaactcagtagttagatcaaagcaaatgtggactgaatctgcttgttgatcagtgttgaagaaagtgcaaaaggaacttttatatatttgacagtgtaggaaattgtctattcctgatataattactgtagtactcttgcttaaggcaagagtttcagatttactgttgaaataaacccaactcttcatga

SEQ ID NO: 441981 - DNA, 1387 bp, Homo sapiens
  misc_feature (15)..(15): n is a, c, g, or t
  misc_feature (25)..(25): n is a, c, g, or t
taggctagtgcgagncccgtatttnatcggcacgaggcaacctttccaagggagtggttgtgtgatcgccatcttagggaaaagatgttctcgtccgtggcgcacctggcgcgggcgaaccccttcaacacgccacatctgcagctggtgcacgatggtctcggggacctccgcagcagctccccagggcccacgggccagccccgccgccctcgcaacctggcagccgccgccgtggaagagtacagttgtgaatttggctccgcgaagtattatgcactgtgtggctttggtggggtcttaagttgtggtctgacacacactgctgtggttcccctggatttagtgaaatgccgtatgcaggtggacccccaaaagtacaagggcatatttaacggattctcagttacacttaaagaggatggtgttcgtggtttggctaaaggatgggctccgactttccttggctactccatgcagggactctgcaagtttggcttttatgaagtctttaaagtcttgtatagcaatatgcttggagaggagaatacttatctctggcgcacatcactatatttggctgcctctgccagtgctgaattctttgctgacattgccctggctcctatggaagctgctaaggttcgaattcaaacccagccaggttatgccaacactttgagggatgcagctcccaaaatgtataaggaagaaggcctaaaagcattctacaagggggttgctcctctctggatgagacagataccatacaccatgatgaagttcgcctgctttgaacgtactgttgaagcactgtacaagtttgtggttcctaagccccgcagtgaatgttcaaagccagagcagctggttgtaacatttgtagcaggttacatagctggagtcttttgtgcaattgtttctcaccctgctgattctgtggtatctgtgttgaataaagaaaaaggtagcagtgcttctctggtcctcaagagacttggatttaaaggtgtatggaagggactgtttgcccgtatcatcatgattggtaccctgactgcactacagtggtttatctatgactccgtgaaggtctacttcagacttcctcgccctcctccacccgagatgccagagtctctgaagaagaagcttgggttaactcagtagttagatcaaagcaaatgtggactgaatctgcttgttgatcagtgttgaagaaagtgcaaaaggaacttttatatatttgacagtgtaggaaattgtctattcctgatataattactgtagtactcttgcttaaggcaagagtttcagatttactgttgaaataaacccaactcttcatgaaacaaaaaaaaagggggcccccaagcaccccgagggc

SEQ ID NO: 441982 - DNA, 1987 bp, Homo sapiens
  misc_feature (15)..(15): n is a, c, g, or t
  misc_feature (25)..(25): n is a, c, g, or t
taggctagtgcgagncccgtatttnatcggcacgaggcaacctttccaagggagtggttgtgtgatcgccatcttagggaaaagatgttctcgtccgtggcgcacctggcgcgggcgaaccccttcaacacgccacatctgcagctggtgcacgatggtctcggggacctccgcagcagctccccagggcccacgggccagccccgccgccctcgcaacctggcagccgccgccgtggaagagtacagttgtgaatttggctccgcgaagtattatgcactgtgtggctttggtggggtcttaagttgtggtctgacacacactgctgtggttcccctggatttagtgaaatgccgtatgcaggtggacccccaaaagtacaagggcatatttaacggattctcagttacacttaaagaggatggtgttcgtggtttggctaaaggatgggctccgactttccttggctactccatgcagggactctgcaagtttggcttttatgaagtctttaaagtcttgtatagcaatatgcttggagaggagaatacttatctctggcgcacatcactatatttggctgcctctgccagtgctgaattctttgctgacattgccctggctcctatggaagctgctaaggttcgaattcaaacccagccaggttatgccaacactttgagggatgcagctcccaaaatgtataaggaagaaggcctaaaagcattctacaagggggttgctcctctctggatgagacagataccatacaccatgatgaagttcgcctgctttgaacgtactgttgaagcactgtacaagtttgtggttcctaagccccgcagtgaatgttcaaagccagagcagctggttgtaacatttgtagcaggttacatagctggagtcttttgtgcaattgtttctcaccctgctgattctgtggtatctgtgttgaataaagaaaaaggtagcagtgcttctctggtcctcaagagacttggatttaaaggtgtatggaagggactgtttgcccgtatcatcatgattggtaccctgactgcactacagtggtttatctatgactccgtgaaggtctacttcagacttcctcgccctcctccacccgagatgccagagtctctgaagaagaagcttgggttaactcagtagttagatcaaagcaaatgtggactgaatctgcttgttgatcagtgttgaagaaagtgcaaaaggaacttttatatatttgacagtgtaggaaattgtctattcctgatataattactgtagtactcttgcttaaggcaagagtttcagatttactgttgaaataaacccaactcttcatgaatttgcctgtgacttatttttaaaacttttttaaaaaagatttagctttaaaatagttggaaagaatgaagtatataagttaaggaaaaaatacaaaactgaccatgaccattgttggttgaatattccagttgctattcagaaattgtcatatgtctcaaaaaaaaaaaaaatatatatatatatatatatatgaagctgatagttgaattatgttgattcagggacaagatagcattgcatagtaacttccagtaggatcaaatattttgagagtggttaaaacgccaaggaatcctgattttatgaaattatgccttctgataggtgcaacaaaattgaacagaagagtaacagcttaactaaacctccattgtgtgaaagttttatgaaatgttttgactttttttttttttttccctagagaacagggttctttgctttgtcgcccaggctggagtacagcctttgaactcctgggctcaagcgatcctcctgcctcagcctcccagttagctgacacaattgggatgtgccactacttgctcctgttttttcatagacgggtcctgctgttgctcaggctggtctcggattcctggcctcaagcaactttcctgccccagctcctaaagcg

SEQ ID NO: 441983 - DNA, 1384 bp, Homo sapiens
  misc_feature (15)..(15): n is a, c, g, or t
  misc_feature (25)..(25): n is a, c, g, or t
taggctagtgcgagncccgtatttnatcggcacgaggcaacctttccaagggagtggttgtgtgatcgccatcttagggaaaagatgttctcgtccgtggcgcacctggcgcgggcgaaccccttcaacacgccacatctgcagctggtgcacgatggtctcggggacctccgcagcagctccccagggcccacgggccagccccgccgccctcgcaacctggcagccgccgccgtggaagagtacagttgtgaatttggctccgcgaagtattatgcactgtgtggctttggtggggtcttaagttgtggtctgacacacactgctgtggttcccctggatttagtgaaatgccgtatgcaggtggacccccaaaagtacaagggcatatttaacggattctcagttacacttaaagaggatggtgttcgtggtttggctaaaggatgggctccgactttccttggctactccatgcagggactctgcaagtttggcttttatgaagtctttaaagtcttgtatagcaatatgcttggagaggagaatacttatctctggcgcacatcactatatttggctgcctctgccagtgctgaattctttgctgacattgccctggctcctatggaagctgctaaggttcgaattcaaacccagccaggttatgccaacactttgagggatgcagctcccaaaatgtataaggaagaaggcctaaaagcattctacaagggggttgctcctctctggatgagacagataccatacaccatgatgaagttcgcctgctttgaacgtactgttgaagcactgtacaagtttgtggttcctaagccccgcagtgaatgttcaaagccagagcagctggttgtaacatttgtagcaggttacatagctggagtcttttgtgcaattgtttctcaccctgctgattctgtggtatctgtgttgaataaagaaaaaggtagcagtgcttctctggtcctcaagagacttggatttaaaggtgtatggaagggactgtttgcccgtatcatcatgattggtaccctgactgcactacagtggtttatctatgactccgtgaaggtctacttcagacttcctcgccctcctccacccgagatgccagagtctctgaagaagaagcttgggttaactcagtagttagatcaaagcaaatgtggactgaatctgcttgttgatcagtgttgaagaaagtgcaaaaggaacttttatatatttgacagtgtaggaaattgtctattcctgatataattactgtagtactcttgcttaaggcaagagtttcagatttactgttgaaataaacccaactcttcatgacacacaacacacaccaacacaccacaacaccccg

SEQ ID NO: 441984 - DNA, 1626 bp, Homo sapiens
  misc_feature (15)..(15): n is a, c, g, or t
  misc_feature (25)..(25): n is a, c, g, or t
  misc_feature (1353)..(1353): n is a, c, g, or t
  misc_feature (1360)..(1360): n is a, c, g, or t
  misc_feature (1363)..(1364): n is a, c, g, or t
taggctagtgcgagncccgtatttnatcggcacgaggcaacctttccaagggagtggttgtgtgatcgccatcttagggaaaagatgttctcgtccgtggcgcacctggcgcgggcgaaccccttcaacacgccacatctgcagctggtgcacgatggtctcggggacctccgcagcagctccccagggcccacgggccagccccgccgccctcgcaacctggcagccgccgccgtggaagagtacagttgtgaatttggctccgcgaagtattatgcactgtgtggctttggtggggtcttaagttgtggtctgacacacactgctgtggttcccctggatttagtgaaatgccgtatgcaggtggacccccaaaagtacaagggcatatttaacggattctcagttacacttaaagaggatggtgttcgtggtttggctaaaggatgggctccgactttccttggctactccatgcagggactctgcaagtttggcttttatgaagtctttaaagtcttgtatagcaatatgcttggagaggagaatacttatctctggcgcacatcactatatttggctgcctctgccagtgctgaattctttgctgacattgccctggctcctatggaagctgctaaggttcgaattcaaacccagccaggttatgccaacactttgagggatgcagctcccaaaatgtataaggaagaaggcctaaaagcattctacaagggggttgctcctctctggatgagacagataccatacaccatgatgaagttcgcctgctttgaacgtactgttgaagcactgtacaagtttgtggttcctaagccccgcagtgaatgttcaaagccagagcagctggttgtaacatttgtagcaggttacatagctggagtcttttgtgcaattgtttctcaccctgctgattctgtggtatctgtgttgaataaagaaaaaggtagcagtgcttctctggtcctcaagagacttggatttaaaggtgtatggaagggactgtttgcccgtatcatcatgattggtaccctgactgcactacagtggtttatctatgactccgtgaaggtctacttcagacttcctcgccctcctccacccgagatgccagagtctctgaagaagaagcttgggttaactcagtagttagatcaaagcaaatgtggactgaatctgcttgttgatcagtgttgaagaaagtgcaaaaggaacttttatatatttgacagtgtaggaaattgtctattcctgatataattactgtagtactcttgcttaaggcaagagtttcagatttactgttgaaataaacccaactcttcatgaacnacacacncannaaacaaacaagcaacaaaaaagaccaaaacgaccaaaccaagaacaagacgaacggacgaagacaggccgaacgaacaagcaagcagcgccgtgagaccaacaagaaaacaagcacgagtatgggcagacgcaacgcacctccacgaaaacgaaagggcaaagacggggcggcaccacacaacaagaggggggaggaaagcagccccgggtagaagcaggactacacgggagataaacgaacgcgcgggataacacagaagt

SEQ ID NO: 441985 - DNA, 1367 bp, Homo sapiens
  misc_feature (15)..(15): n is a, c, g, or t
  misc_feature (25)..(25): n is a, c, g, or t
taggctagtgcgagncccgtatttnatcggcacgaggcaacctttccaagggagtggttgtgtgatcgccatcttagggaaaagatgttctcgtccgtggcgcacctggcgcgggcgaaccccttcaacacgccacatctgcagctggtgcacgatggtctcggggacctccgcagcagctccccagggcccacgggccagccccgccgccctcgcaacctggcagccgccgccgtggaagagtacagttgtgaatttggctccgcgaagtattatgcactgtgtggctttggtggggtcttaagttgtggtctgacacacactgctgtggttcccctggatttagtgaaatgccgtatgcaggtggacccccaaaagtacaagggcatatttaacggattctcagttacacttaaagaggatggtgttcgtggtttggctaaaggatgggctccgactttccttggctactccatgcagggactctgcaagtttggcttttatgaagtctttaaagtcttgtatagcaatatgcttggagaggagaatacttatctctggcgcacatcactatatttggctgcctctgccagtgctgaattctttgctgacattgccctggctcctatggaagctgctaaggttcgaattcaaacccagccaggttatgccaacactttgagggatgcagctcccaaaatgtataaggaagaaggcctaaaagcattctacaagggggttgctcctctctggatgagacagataccatacaccatgatgaagttcgcctgctttgaacgtactgttgaagcactgtacaagtttgtggttcctaagccccgcagtgaatgttcaaagccagagcagctggttgtaacatttgtagcaggttacatagctggagtcttttgtgcaattgtttctcaccctgctgattctgtggtatctgtgttgaataaagaaaaaggtagcagtgcttctctggtcctcaagagacttggatttaaaggtgtatggaagggactgtttgcccgtatcatcatgattggtaccctgactgcactacagtggtttatctatgactccgtgaaggtctacttcagacttcctcgccctcctccacccgagatgccagagtctctgaagaagaagcttgggttaactcagtagttagatcaaagcaaatgtggactgaatctgcttgttgatcagtgttgaagaaagtgcaaaaggaacttttatatatttgacagtgtaggaaattgtctattcctgatataattactgtagtactcttgcttaggagagttcgattccggtgattaaccatcttctggaaaaaaaaaccgggcctttgggcggaaagg

SEQ ID NO: 441986 - DNA, 1301 bp, Homo sapiens
  misc_feature (15)..(15): n is a, c, g, or t
  misc_feature (25)..(25): n is a, c, g, or t
taggctagtgcgagncccgtatttnatcggcacgaggcaacctttccaagggagtggttgtgtgatcgccatcttagggaaaagatgttctcgtccgtggcgcacctggcgcgggcgaaccccttcaacacgccacatctgcagctggtgcacgatggtctcggggacctccgcagcagctccccagggcccacgggccagccccgccgccctcgcaacctggcagccgccgccgtggaagagtacagttgtgaatttggctccgcgaagtattatgcactgtgtggctttggtggggtcttaagttgtggtctgacacacactgctgtggttcccctggatttagtgaaatgccgtatgcaggtggacccccaaaagtacaagggcatatttaacggattctcagttacacttaaagaggatggtgttcgtggtttggctaaaggatgggctccgactttccttggctactccatgcagggactctgcaagtttggcttttatgaagtctttaaagtcttgtatagcaatatgcttggagaggagaatacttatctctggcgcacatcactatatttggctgcctctgccagtgctgaattctttgctgacattgccctggctcctatggaagctgctaaggttcgaattcaaacccagccaggttatgccaacactttgagggatgcagctcccaaaatgtataaggaagaaggcctaaaagcattctacaagggggttgctcctctctggatgagacagataccatacaccatgatgaagttcgcctgctttgaacgtactgttgaagcactgtacaagtttgtggttcctaagccccgcagtgaatgttcaaagccagagcagctggttgtaacatttgtagcaggttacatagctggagtcttttgtgcaattgtttctcaccctgctgattctgtggtatctgtgttgaataaagtgtatggaagggactgtttgcccgtatcatcatgattggtaccctgactgcactacagtggtttatctatgactccgtgaaggtctacttcagacttcctcgccctcctccacccgagatgccagagtctctgaagaagaagcttgggttaactcagtagttagatcaaagcaaatgtggactgaatctgcttgttgatcagtgttgaagaaagtgcaaaaggaacttttatatatttgacagtgtaggaaattgtctattcctgatataattactgtagtactcttgcttaaggcaagagtttcagatttactgttgaaataaacccaactcttcatga

SEQ ID NO: 441987 - DNA, 987 bp, Homo sapiens
  misc_feature (15)..(15): n is a, c, g, or t
  misc_feature (25)..(25): n is a, c, g, or t
  misc_feature (961)..(962): n is a, c, g, or t
  misc_feature (966)..(966): n is a, c, g, or t
taggctagtgcgagncccgtatttnatcggcacgaggcaacctttccaagggagtggttgtgtgatcgccatcttagggaaaagatgttctcgtccgtggcgcacctggcgcgggcgaaccccttcaacacgccacatctgcagctggtgcacgatggtctcggggacctccgcagcagctccccagggcccacgggccagccccgccgccctcgcaacctggcagccgccgccgtggaagagtacagttgtgaatttggctccgcgaagtattatgcactgtgtggctttggtggggtcttaagttgtggtctgacacacactgctgtggttcccctggatttagtgaaatgccgtatgcaggtggacccccaaaagtacaagggcatatttaacggattctcagttacacttaaagaggatggtgttcgtggtttggctaaaggatgggctccgactttccttggctactccatgcagggactctgcaagtttggcttttatgaagtctttaaagtcttgtatagcaatatgcttggagaggagaatacttatctctggcgcacatcactatatttggctgcctctgccagtgctgaattctttgctgacattgccctggctcctatggaagctgctaaggttcgaattcaaacccagccaggttatgccaacactttgagggatgcagctcccaaaatgtataaggaagaaggcctaaaagcattctacaagggggttgctcctctctggatgagacagataccatacaccatgatgaagttcgcctgctttgaacgtactgttgaagcactgtacaagtttgtggttcctaagccccgcagtgaatgttcaaagccagagcagctggttgtaacatttgtagcaggttacatagctggagtcttttgtgcaattgtttctcaccctgctgattctgtggtatctgtgttgaataaanntgancgggatcctctagatcactct

SEQ ID NO: 441988 - DNA, 1034 bp, Homo sapiens
  misc_feature (15)..(15): n is a, c, g, or t
  misc_feature (25)..(25): n is a, c, g, or t
  misc_feature (936)..(936): n is a, c, g, or t
  misc_feature (973)..(973): n is a, c, g, or t
  misc_feature (975)..(976): n is a, c, g, or t
taggctagtgcgagncccgtatttnatcggcacgaggcaacctttccaagggagtggttgtgtgatcgccatcttagggaaaagatgttctcgtccgtggcgcacctggcgcgggcgaaccccttcaacacgccacatctgcagctggtgcacgatggtctcggggacctccgcagcagctccccagggcccacgggccagccccgccgccctcgcaacctggcagccgccgccgtggaagagtacagttgtgaatttggctccgcgaagtattatgcactgtgtggctttggtggggtcttaagttgtggtctgacacacactgctgtggttcccctggatttagtgaaatgccgtatgcaggtggacccccaaaagtacaagggcatatttaacggattctcagttacacttaaagaggatggtgttcgtggtttggctaaaggatgggctccgactttccttggctactccatgcagggactctgcaagtttggcttttatgaagtctttaaagtcttgtatagcaatatgcttggagaggagaatacttatctctggcgcacatcactatatttggctgcctctgccagtgctgaattctttgctgacattgccctggctcctatggaagctgctaaggttcgaattcaaacccagccaggttatgccaacactttgagggatgcagctcccaaaatgtataaggaagaaggcctaaaagcattctacaagggggttgctcctctctggatgagacagataccatacaccatgatgaagttcgcctgctttgaacgtactgttgaagcactgtacaagtttgtggttcctaagccccgcagtgaatgttcaaagccagagcagctggttgtaacatttgtagcaggttacataggtggtgtacattggcggtaaagggagtttgggaatgtncacgggattgggttgggaaaaaggggggttggaagangnnagggagggggggaagtggcaggaagttaaggggtgagaccaggaagggagagggtgga

SEQ ID NO: 441989 - DNA, 1037 bp, Homo sapiens
  misc_feature (15)..(15): n is a, c, g, or t
  misc_feature (25)..(25): n is a, c, g, or t
  misc_feature (906)..(906): n is a, c, g, or t
  misc_feature (946)..(947): n is a, c, g, or t
  misc_feature (950)..(950): n is a, c, g, or t
  misc_feature (957)..(957): n is a, c, g, or t
  misc_feature (959)..(959): n is a, c, g, or t
  misc_feature (970)..(970): n is a, c, g, or t
taggctagtgcgagncccgtatttnatcggcacgaggcaacctttccaagggagtggttgtgtgatcgccatcttagggaaaagatgttctcgtccgtggcgcacctggcgcgggcgaaccccttcaacacgccacatctgcagctggtgcacgatggtctcggggacctccgcagcagctccccagggcccacgggccagccccgccgccctcgcaacctggcagccgccgccgtggaagagtacagttgtgaatttggctccgcgaagtattatgcactgtgtggctttggtggggtcttaagttgtggtctgacacacactgctgtggttcccctggatttagtgaaatgccgtatgcaggtggacccccaaaagtacaagggcatatttaacggattctcagttacacttaaagaggatggtgttcgtggtttggctaaaggatgggctccgactttccttggctactccatgcagggactctgcaagtttggcttttatgaagtctttaaagtcttgtatagcaatatgcttggagaggagaatacttatctctggcgcacatcactatatttggctgcctctgccagtgctgaattctttgctgacattgccctggctcctatggaagctgctaaggttcgaattcaaacccagccaggttatgccaacactttgagggatgcagctcccaaaatgtataaggaagaaggcctaaaagcattctacaagggggttgctcctctctggatgagacagataccatacaccatgatgaagttcgcctgctttgaacgtactgttgaagcactgtacaagtttgtggttcctaagccccgcagtgaatgttcaaagccagagcagctggttgtaacatttgtagcaggttacatagcctggagncctttgtgccaatggttccaccgcgatctgggtcggtgcnnaanaaacggncngctccggccanaactggtaagtctgacgccgggccgctaatatgccccgcacaggttcaaaccggagtaacgccacga

SEQ ID NO: 441990 - DNA, 959 bp, Homo sapiens
  misc_feature (15)..(15): n is a, c, g, or t
  misc_feature (25)..(25): n is a, c, g, or t
taggctagtgcgagncccgtatttnatcggcacgaggcaacctttccaagggagtggttgtgtgatcgccatcttagggaaaagatgttctcgtccgtggcgcacctggcgcgggcgaaccccttcaacacgccacatctgcagctggtgcacgatggtctcggggacctccgcagcagctccccagggcccacgggccagccccgccgccctcgcaacctggcagccgccgccgtggaagagtacagttgtgaatttggctccgcgaagtattatgcactgtgtggctttggtggggtcttaagttgtggtctgacacacactgctgtggttcccctggatttagtgaaatgccgtatgcaggtggacccccaaaagtacaagggcatatttaacggattctcagttacacttaaagaggatggtgttcgtggtttggctaaaggatgggctccgactttccttggctactccatgcagggactctgcaagtttggcttttatgaagtctttaaagtcttgtatagcaatatgcttggagaggagaatacttatctctggcgcacatcactatatttggctgcctctgccagtgctgaattctttgctgacattgccctggctcctatggaagctgctaaggttcgaattcaaacccagccaggttatgccaacactttgagggatgcagctcccaaaatgtataaggaagaaggcctaaaagcattctacaagggggttgctcctctctggatgagacagataccatacaccatgatgaagttcgcctgctttgaacgtactgttgaagcactgtacaagtttgtggttcctaagccccgcagtgaatgttcaaagccagagcagctggttgtaacatttgtagcaggttacatagcagctggagtcttttgtgcattgtttctcacccccagatgacgaagtaataaagcgttgag

SEQ ID NO: 441991 - DNA, 1565 bp, Homo sapiens
  misc_feature (2)..(2): n is a, c, g, or t
anagggccgcctactactactactactactatgctgcgagaagacgacagaatgggagggagtgagtgtggccgggccttctcctgtggcgggtgtggggagcggagcccagagctcctgtggggccgctgctttggcggtgggcccagccgggagcagcctctttcgaaggccgccgtgacctcttcaagggcgtggagacgggaaggaaaaggccccggttggggttccagggcgccggtaacgttaaccggcgccttgcctgtcctctaaccgtcgctccctcctcccctagaaagatgttctcgtccgtggcgcacctggcgcgggcgaaccccttcaacacgccacatctgcagctggtgcacgatggtctcggggacctccgcagcagctccccagggcccacgggccagccccgccgccctcgcaacctggcagccgccgccgtggaagagtacagttgtgaatttggctccgcgaagtattatgcactgtgtggctttggtggggtcttaagttgtggtctgacacacactgctgtggttcccctggatttagtgaaatgccgtatgcaggtggacccccaaaagtacaagggcatatttaacggattctcagttacacttaaagaggatggtgttcgtggtttggctaaaggatgggctccgactttccttggctactccatgcagggactctgcaagtttggcttttatgaagtctttaaagtcttgtatagcaatatgcttggagaggagaatacttatctctggcgcacatcactatatttggctgcctctgccagtgctgaattctttgctgacattgccctggctcctatggaagctgctaaggttcgaattcaaacccagccaggttatgccaacactttgagggatgcagctcccaaaatgtataaggaagaaggcctaaaagcattctacaagggggttgctcctctctggatgagacagataccatacaccatgatgaagttcgcctgctttgaacgtactgttgaagcactgtacaagtttgtggttcctaagccccgcagtgaatgttcaaagccagagcagctggttgtaacatttgtagcaggttacatagctggagtcttttgtgcaattgtttctcaccctgctgattctgtggtatctgtgttgaataaagaaaaaggtagcagtgcttctctggtcctcaagagacttggatttaaaggtgtatggaagggactgtttgcccgtatcatcatgattggtaccctgactgcactacagtggtttatctatgactccgtgaaggtctacttcagacttcctcgccctcctccacccgagatgccagagtctctgaagaagaagcttgggttaactcagtagttagatcaaagcaaatgtggactgaatctgcttgttgatcagtgttgaagaaagtgcaaaaggaacttttatatatttgacagtgtaggaaattgtctattcctgatataattactgtagtactcttgcttaaggcaagagtttcagatttactgttgaaataaacccaactcttcatga

SEQ ID NO: 441992 - DNA, 1339 bp, Homo sapiens
gggggcggcaaactaatggctaggtacgaggcctgggtgggagtggttgtgtgatcgccatcttagggaaaagatgttctcgtccgtggcgcacctggcgcgggcgaaccccttcaacacgccacatctgcagctggtgcacgatggtctcggggacctccgcagcagctccccagggcccacgggccagccccgccgccctcgcaacctggcagccgccgccgtggaagagtacagttgtgaatttggctccgcgaagtattatgcactgtgtggctttggtggggtcttaagttgtggtctgacacacactgctgtggttcccctggatttagtgaaatgccgtatgcaggtggacccccaaaagtacaagggcatatttaacggattctcagttacacttaaagaggatggtgttcgtggtttggctaaaggatgggctccgactttccttggctactccatgcagggactctgcaagtttggcttttatgaagtctttaaagtcttgtatagcaatatgcttggagaggagaatacttatctctggcgcacatcactatatttggctgcctctgccagtgctgaattctttgctgacattgccctggctcctatggaagctgctaaggttcgaattcaaacccagccaggttatgccaacactttgagggatgcagctcccaaaatgtataaggaagaaggcctaaaagcattctacaagggggttgctcctctctggatgagacagataccatacaccatgatgaagttcgcctgctttgaacgtactgttgaagcactgtacaagtttgtggttcctaagccccgcagtgaatgttcaaagccagagcagctggttgtaacatttgtagcaggttacatagctggagtcttttgtgcaattgtttctcaccctgctgattctgtggtatctgtgttgaataaagaaaaaggtagcagtgcttctctggtcctcaagagacttggatttaaaggtgtatggaagggactgtttgcccgtatcatcatgattggtaccctgactgcactacagtggtttatctatgactccgtgaaggtctacttcagacttcctcgccctcctccacccgagatgccagagtctctgaagaagaagcttgggttaactcagtagttagatcaaagcaaatgtggactgaatctgcttgttgatcagtgttgaagaaagtgcaaaaggaacttttatatatttgacagtgtaggaaattgtctattcctgatataattactgtagtactcttgcttaaggcaagagtttcagatttactgttgaaataaacccaactcttcatga

SEQ ID NO: 441993 - DNA, 1302 bp, Homo sapiens
  misc_feature (15)..(15): n is a, c, g, or t
  misc_feature (25)..(25): n is a, c, g, or t
taggctagtgcgagncccgtatttnatcggcacgaggcaacctttccaagggagtggttgtgtgatcgccatcttagggaaaagatgttctcgtccgtggcgcacctggcgcgggcgaaccccttcaacacgccacatctgcagctggtgcacgatggtctcggggacctccgcagcagctccccagggcccacgggccagccccgccgccctcgcaacctggcagccgccgccgtggaagagtacagttgtgaatttggctccgcgaagtattatgcactgtgtggctttggtggggtcttaagttgtggtctgacacacactgctgtggttcccctggatttagtgaaatgccgtatgcaggtggacccccaaaagtacaagggcatatttaacggattctcagttacacttaaagaggatggtgttcgtggtttggctaaaggatgggctccgactttccttggctactccatgcagggactctgcaagtttggcttttatgaagtctttaaagtcttgtatagcaatatgcttggagaggagaatacttatctctggcgcacatcactatatttggctgcctctgccagtgctgaattctttgctgacattgccctggctcctatggaagctgctaaggttcgaattcaaacccagccaggttatgccaacactttgagggatgcagctcccaaaatgtataaggaagaaggcctaaaagccatgatgaagttcgcctgctttgaacgtactgttgaagcactgtacaagtttgtggttcctaagccccgcagtgaatgttcaaagccagagcagctggttgtaacatttgtagcaggttacatagctggagtcttttgtgcaattgtttctcaccctgctgattctgtggtatctgtgttgaataaagaaaaaggtagcagtgcttctctggtcctcaagagacttggatttaaaggtgtatggaagggactgtttgcccgtatcatcatgattggtaccctgactgcactacagtggtttatctatgactccgtgaaggtctacttcagacttcctcgccctcctccacccgagatgccagagtctctgaagaagaagcttgggttaactcagtagttagatcaaagcaaatgtggactgaatctgcttgttgatcagtgttgaagaaagtgcaaaaggaacttttatatatttgacagtgtaggaaattgtctattcctgatataattactgtagtactcttgcttaaggcaagagtttcagatttactgttgaaataaacccaactcttcatga

SEQ ID NO: 441994 - DNA, 1154 bp, Homo sapiens
  misc_feature (15)..(15): n is a, c, g, or t
  misc_feature (25)..(25): n is a, c, g, or t
taggctagtgcgagncccgtatttnatcggcacgaggcaacctttccaagggagtggttgtgtgatcgccatcttagggaaaagatgttctcgtccgtggcgcacctggcgcgggcgaaccccttcaacacgccacatctgcagctggtgcacgatggtctcggggagtggacccccaaaagtacaagggcatatttaacggattctcagttacacttaaagaggatggtgttcgtggtttggctaaaggatgggctccgactttccttggctactccatgcagggactctgcaagtttggcttttatgaagtctttaaagtcttgtatagcaatatgcttggagaggagaatacttatctctggcgcacatcactatatttggctgcctctgccagtgctgaattctttgctgacattgccctggctcctatggaagctgctaaggttcgaattcaaacccagccaggttatgccaacactttgagggatgcagctcccaaaatgtataaggaagaaggcctaaaagcattctacaagggggttgctcctctctggatgagacagataccatacaccatgatgaagttcgcctgctttgaacgtactgttgaagcactgtacaagtttgtggttcctaagccccgcagtgaatgttcaaagccagagcagctggttgtaacatttgtagcaggttacatagctggagtcttttgtgcaattgtttctcaccctgctgattctgtggtatctgtgttgaataaagaaaaaggtagcagtgcttctctggtcctcaagagacttggatttaaaggtgtatggaagggactgtttgcccgtatcatcatgattggtaccctgactgcactacagtggtttatctatgactccgtgaaggtctacttcagacttcctcgccctcctccacccgagatgccagagtctctgaagaagaagcttgggttaactcagtagttagatcaaagcaaatgtggactgaatctgcttgttgatcagtgttgaagaaagtgcaaaaggaacttttatatatttgacagtgtaggaaattgtctattcctgatataattactgtagtactcttgcttaaggcaagagtttcagatttactgttgaaataaacccaactcttcatga

SEQ ID NO: 441995 - DNA, 1268 bp, Homo sapiens
tggctagtacgagccgggtgtgtaatcggcacgaggcaacctttccaagggagtggttgtgtgatcgccatcttagggaaaagatgttctcgtccgtggcgcacctggcgcgggcgaaccccttcaacacgccacatctgcagctggtgcacgatggtctcggggacctccgcagcagctccccagggcccacgggccagccccgccgccctcgcaacctggcagccgccgccgtggaagagtacagttgtgaatttggctccgcgaagtattatgcactgtgtggctttggtggggtcttaagttgtggtctgacacacactgctgtggttcccctggatttagtgaaatgccgtatgcaggtggacccccaaaagtacaagggcatatttaacggattctcagttacacttaaagaggatggtgttcgtggtttggctaaaggatgggctccgactttccttggctactccatgcagggactctgcaagtttggcttttatgaagtctttaaagtcttgtatagcaatatgcttggagaggagaatacttatctctggcgcacatcactatatttggctgcctctgccaacactttgagggatgcagctcccaaaatgtataaggaagaaggcctaaaagcattctacaagggggttgctcctctctggatgagacagataccatacaccatgatgaagttcgcctgctttgaacgtactgttgaagcactgtacaagtttgtggttcctaagccccgcagtgaatgttcaaagccagagcagctggttgtaacatttgtagcaggttacatagctggagtcttttgtgcaattgtttctcaccctgctgattctgtggtatctgtgttgaataaagaaaaaggtagcagtgcttctctggtcctcaagagacttggatttaaaggtgtatggaagggactgtttgcccgtatcatcatgattggtaccctgactgcactacagtggtttatctatgactccgtgaaggtctacttcagacttcctcgccctcctccacccgagatgccagagtctctgaagaagaagcttgggttaactcagtagttagatcaaagcaaatgtggactgaatctgcttgttgatcagtgttgaagaaagtgcaaaaggaacttttatatatttgacagtgtaggaaattgtctattcctgatataattactgtagtactcttgcttaaggcaagagtttcagatttactgttgaaataaacccaactcttcatga

SEQ ID NO: 441996 - DNA, 1060 bp, Homo sapiens
  misc_feature (30)..(30): n is a, c, g, or t
  misc_feature (34)..(34): n is a, c, g, or t
  misc_feature (40)..(40): n is a, c, g, or t
  misc_feature (72)..(73): n is a, c, g, or t
  misc_feature (980)..(980): n is a, c, g, or t
  misc_feature (992)..(992): n is a, c, g, or t
  misc_feature (1014)..(1014): n is a, c, g, or t
  misc_feature (1016)..(1016): n is a, c, g, or t
  misc_feature (1021)..(1021): n is a, c, g, or t
  misc_feature (1025)..(1025): n is a, c, g, or t
gcctcctactccctccacaccccctcaccncccnccccgnccgaaactacggctaggtacgaggctgggtgnngccaagggagtggttgtgtgatcgccatcttagggaaaagatgttctcgtccgtggcgcacctggcgcgggcgaaccccttcaacacgccacatctgcagctggtgcacgatggtctcggggacctccgcagcagctccccagggcccacgggccagccccgccgccctcgcaacctggcagccgccgccgtggaagagtacagttgtgaatttggctccgcgaagtattatgcactgtgtggctttggtggggtcttaagttgtggtctgacacacactgctgtggttcccctggatttagtgaaatgccgtatgcaggtggacccccaaaagtacaagggcatatttaacggattctcagttacacttaaagaggatggtgttcgtggtttggctaaaggatgggctccgactttccttggctactccatgcagggactctgcaagtttggcttttatgaagtctttaaagtcttgtatagcaatatgcttggagaggagaatacttatctctggcgcacatcactatatttggctgcctctgccagtgctgaattctttgctgacattgccctggctcctatggaagctgctaaggttcgaattcaaacccagccaggttatgccaacactttgagggatgcagctcccaaaatgtataaggaagaaggcctaaaagcattctacaagggggttgctcctctctggatgagacagataccatacaccatgatgaagttcgcctgctttgaacgtactgttgaagcactgtacaagtttgtggttcctaagccccgcagtgaatgttcaaagccagagcagctggttgtaacatttgtagcaggttacataggtaccttggtgccggtcactagcggggcttgggcatggttccccccggggtcngggtccggtganaacaagggcggttctggccccnancggtngtgngggggccccaggcgcggggggtttcggggggaccc

SEQ ID NO: 441997 - DNA, 1161 bp, Homo sapiens
  misc_feature (15)..(15): n is a, c, g, or t
  misc_feature (25)..(25): n is a, c, g, or t
taggctagtgcgagncccgtatttnatcggcacgaggcaacctttccaagggagtggttgtgtgatcgccatcttagggagtgagtgtggccgggccttctcctgtggcgggtgtggggagcggagcccagagctcctgtggggccgctgctttggcggtgggcccagccgggagcagcctctttcgaaggccgccgtgacctcttcaagggcgtggagacgggaaggaaaaggccccggttggggttccagggcgccggtaacgttaaccggcgccttgcctgtcctctaaccgtcgctccctcctcccctagaaagatgttctcgtccgtggcgcacctggcgcgggcgaaccccttcaacacgccacatctgcagctggtgcacgatggtctcggggacctccgcagcagctccccagggcccacgggccagccccgccgccctcgcaacctggcagccgccgccgtggaaggtgagatcagaccctgcccaatacagtcgtgtggtctacttgtgggccgcccagcctttgaggcctggacccggcttggaggacagggaaggacgagtccagcccgctgcaccgtaggacggcgcccagttgcttgccctggggtatcggccttttccaccataggcgggtgtcagatccttggccttccctcaagggcgtggaagcgctgaggccctgtgtcccttcgtgacctccgtgtgcccgagggaagagaggccgtgactagctctttctccgccgtgagctcgcttggtcagcaaactaagtactgggtaaactctcctcccgaaactactgaccacccacagttctactaactatattacctgtcctttgatttgcccttagttttcttaaaaatagtcctttcctaagttttatatttgtcgacgccaggtcagtcatttttgcacttaattgtatatgagataactagatgtcctgttttcgtgcgactggaggaggcagcttgcagccctacataggcaatagaaaggagataattggtgggcgtccctttggtgtgattatctcttgggattcttggtggttgggcccagctttaacttagttgtgtgtgttttaaatcctagtgattactgataaacacggttacctgtaacatctttcctgtcaagctttcc

SEQ ID NO: 441998 - DNA, 659 bp, Homo sapiens
atattaaaatgcatggtgtgtcttctcttactacaagtacagttgtgaatttggctccgcgaagtattatgcactgtgtggctttggtggggtcttaagttgtggtctgacacacactgctgtggttcccctggatttagtgaaatgccgtatgcaggtttgtattgagatgacaacattgaaagtatctctcatgtgacttaactctaaataaaatcttaaatgagaatttgaagacatcacaactgctagaaacttcagtaggaaaccacatagaatttctttaaattgtgggctttattttgactagtgttttaaatccaataaatgcctctattgtttgagtaaattgttcacttttagagtctggctgtaaatggctctttgctgctgctcttcacttctggccggagttcttcaagcttactagtgccccaaatagtcatttaacaagcacctatgtgttggagtgggtaaacaagtctgtgtattatgtgaagtaacaatgtcctttatctactaataagaccaaggcaaagagtacatgtagatttatttaaagtgctcttaatatcttagtatgaaaattttgtcagattagcctcttgtttatttacacaacattttaaaataatttgaatatattttaattaagatca

SEQ ID NO: 441999 - DNA, 1461 bp, Homo sapiens
ctccaccaatgggcgacgcgtacttgcagtggcgcgctgtgtgcgtcacgccgacgacgcgcgaagggcacacatcttaggacccggaggacgtccggcctctgtgagccgcaacctttccaagggagtggttgtgtgatcgccatcttagggaaaagatgttctcgtccgtggcgcacctggcgcgggcgaaccccttcaacacgccacatctgcagctggtgcacgatggtctcggggacctccgcagcagctccccagggcccacgggccagccccgccgccctcgcaacctggcagccgccgccgtggaagagtacagttgtgaatttggctccgcgaagtattatgcactgtgtggctttggtggggtcttaagttgtggtctgacacacactgctgtggttcccctggatttagtgaaatgccgtatgcaggtggacccccaaaagtacaagggcatatttaacggattctcagttacacttaaagaggatggtgttcgtggtttggctaaaggatgggctccgactttccttggctactccatgcagggactctgcaagtttggcttttatgaagtctttaaagtcttgtatagcaatatgcttggagaggagaatacttatctctggcgcacatcactatatttggctgcctctgccagtgctgaattctttgctgacattgccctggctcctatggaagctgctaaggttcgaattcaaacccagccaggttatgccaacactttgagggatgcagctcccaaaatgtataaggaagaaggcctaaaagcattctacaagggggttgctcctctctggatgagacagataccatacaccatgatgaagttcgcctgctttgaacgtactgttgaagcactgtacaagtttgtggttcctaagccccgcagtgaatgttcaaagccagagcagctggttgtaacatttgtagcaggttacatagctggagtcttttgtgcaattgtttctcaccctgctgattctgtggtatctgtgttgaataaagaaaaaggtagcagtgcttctctggtcctcaagagacttggatttaaaggtgtatggaagggactgtttgcccgtatcatcatgattggtaccctgactgcactacagtggtttatctatgactccgtgaaggtctacttcagacttcctcgccctcctccacccgagatgccagagtctctgaagaagaagcttgggttaactcagtagttagatcaaagcaaatgtggactgaatctgcttgttgatcagtgttgaagaaagtgcaaaaggaacttttatatatttgacagtgtaggaaattgtctattcctgatataattactgtagtactcttgcttaaggcaagagtttcagatttactgttgaaataaacccaactcttcatgaaacaaaaaaaaagggggcccccaagcaccccgagggc

SEQ ID NO: 442000 - DNA, 1076 bp, Homo sapiens
  misc_feature (15)..(15): n is a, c, g, or t
  misc_feature (25)..(25): n is a, c, g, or t
  misc_feature (913)..(913): n is a, c, g, or t
  misc_feature (978)..(978): n is a, c, g, or t
  misc_feature (994)..(994): n is a, c, g, or t
  misc_feature (998)..(998): n is a, c, g, or t
  misc_feature (1006)..(1006): n is a, c, g, or t
  misc_feature (1008)..(1008): n is a, c, g, or t
taggctagtgcgagncccgtatttnatcggcacgaggcaacctttccaagggagtggttgtgtgatcgccatcttagggaaaagatgttctcgtccgtggcgcacctggcgcgggcgaaccccttcaacacgccacatctgcagctggtgcacgatggtctcggggacctccgcagcagctccccagggcccacgggccagccccgccgccctcgcaacctggcagccgccgccgtggaagagtacagttgtgaatttggctccgcgaagtattatgcactgtgtggctttggtggggtcttaagttgtggtctgacacacactgctgtggttcccctggatttagtgaaatgccgtatgcaggtggacccccaaaagtacaagggcatatttaacggattctcagttacacttaaagaggatggtgttcgtggtttggctaaaggatgggctccgactttccttggctactccatgcagggactctgcaagtttggcttttatgaagtctttaaagtcttgtatagcaatatgcttggagaggagaatacttatctctggcgcacatcactatatttggctgcctctgccagtgctgaattctttgctgacattgccctggctcctatggaagctgctaaggttcgaattcaaacccagccaggttatgccaacactttgagggatgcagctcccaaaatgtataaggaagaaggcctaaaagcattctacaagggggttgctcctctctggatgagacagataccatacaccatgatgaagttcgcctgctttgaacgtactgttgaagcactgtacaagtttgtggttcctaagccccgcagtgaatgttcaaagccagagcagctggttgtaacatttgtagcaggttacatagggtgccggtcatgcngggctttgggcatgttccccgctgtctggtgtcggtgataagaagggggggctcggcccagaggntaggggggggggcccncaanggcccggncngggttagcgggggaaaccccccagagaagggcaacggggggaagttggcttcgtgcgctcgcacagtg

SEQ ID NO: 442001 - DNA, 812 bp, Homo sapiens
  misc_feature (10)..(10): n is a, c, g, or t
  misc_feature (14)..(14): n is a, c, g, or t
  misc_feature (16)..(16): n is a, c, g, or t
  misc_feature (18)..(18): n is a, c, g, or t
  misc_feature (743)..(743): n is a, c, g, or t
  misc_feature (763)..(763): n is a, c, g, or t
  misc_feature (769)..(769): n is a, c, g, or t
aggctaggtngagncngnggtaatcggcagaggccaacctttccaagggagtggttgtgtgatcgccatcttagggaaaagatgttctcgtccgtggcgcacctggcgcgggcgaaccccttcaacacgccacatctgcagctggtgcacgatggtctcggggacctccgcagcagctccccagggcccacgggccagccccgccgccctcgcaacctggcagccgccgccgtggaagagtacagttgtgaatttggctccgcgaagtattatgcactgtgtggctttggtggggtcttaagttgtggtctgacacacactgctgtggttcccctggatttagtgaaatgccgtatgcaggtggacccccaaaagtacaagggcatatttaacggattctcagttacacttaaagaggatggtgttcgtggtttggctaaaggatgggctccgactttccttggctactccatgcagggactctgcaagtttggcttttatgaagtctttaaagtcttgtatagcaatatgcttggagaggagaatacttatctctggcgcacatcactatatttggctgcctctgccagtgctgaattctttgctgacattgccctggctcctatggaagctgctaaggttcgaattcaaacccagccaggttatgccaacactttgagggatgcagctcccaaaatgtataaggaagaaggcctaaaagcgcttctacaaggggtggcccnctggtggaacgtcctacccngtgatngccgcttgactctgtgaccgttcagtgggtccacccagagtcc

SEQ ID NO: 442002 - DNA, 977 bp, Homo sapiens
tggttgtgtgatcgccatcttagggaaaagatgttctcgtccgtggcgcacctggcgcgggcgaaccccttcaacacgccacatctgcagctggtgcacgatggtctcggggacctccgcagcagctccccagggcccacgggccagccccgccgccctcgcaacctggcagccgccgccgtggaagagtacagttgtgaatttggctccgcgaagtattatgcactgtgtggctttggtggggtcttaagttgtggtctgacacacactgctgtggttcccctggatttagtgaaatgccgtatgcaggtggacccccaaaagtacaagggcatatttaacggattctcagttacacttaaagaggatggtgttcgtggtttggctaaaggatgggctccgactttccttggctactccatgcagggactctgcaagtttggcttttatgaagtctttaaagtcttgtatagcaatatgcttggagaggagaatacttatctctggcgcacatcactatatttggctgcctctgccagtgctgaattctttgctgacattgccctggctcctatggaagctgctaaggttcgaattcaaacccagccaggttatgccaacactttgagggatgcagctcccaaaatgtataaggaagaaggcctaaaagcattctacaagggggttgctcctctctggatgagacagataccatacaccatgatgaagttcgcctgctttgaacgtactgttgaagcactgtacaagtttgtggttcctaagccccgcagtgaatgttcaaagccagagcagctggttgtaacatttgtagcaggttacataggacggggccttgggcaatggttcacccggggttctgggttctgggtggcacagaaagggggggtctgggcccaaagcggttaaggttagagaggtgcccacacaaaggccggggcagggtaacacgggtaacc

SEQ ID NO: 442003 - DNA, 769 bp, Homo sapiens
  misc_feature (17)..(17): n is a, c, g, or t
  misc_feature (19)..(20): n is a, c, g, or t
atccttaattaaattantnncccccccgcaacctttccaagggagtggttgtgtgatcgccatcttagggaaaagatgttctcgtccgtggcgcacctggcgcgggcgaaccccttcaacacgccacatctgcagctggtgcacgatggtctcggggacctccgcagcagctccccagggcccacgggccagccccgccgccctcgcaacctggcagccgccgccgtggaagagtacagttgtgaatttggctccgcgaagtattatgcactgtgtggctttggtggggtcttaagttgtggtctgacacacactgctgtggttcccctggatttagtgaaatgccgtatgcaggtggacccccaaaagtacaagggcatatttaacggattctcagttacacttaaagaggatggtgttcgtggtttggctaaaggatgggctccgactttccttggctactccatgcagggactctgcaagtttggcttttatgaagtctttaaagtcttgtatagcaatatgcttggagaggagaatacttatctctggcgcacatcactatatttggctgcctctgccagtgctgaattctttgctgacattgccctggctcctatggaagctgctaaggttcgaattcaaacccagccaggttatgccaacactttgagggatgcagctcccaaaatgtataaggaagaaggcctaaaagccgtaagtaaacacttaaaaatttatactatgaaagtacttattttaagtgaac

SEQ ID NO: 442004 - DNA, 1350 bp, Homo sapiens
  misc_feature (15)..(15): n is a, c, g, or t
  misc_feature (25)..(25): n is a, c, g, or t
taggctagtgcgagncccgtatttnatcggcacgaggcaacctttccaagggagtggttgtgtgatcgccatcttagggaaaagatgttctcgtccgtggcgcacctggcgcgggcgaaccccttcaacacgccacatctgcagctggtgcacgatggtctcggggacctccgcagcagctccccagggcccacgggccagccccgccgccctcgcaacctggcagccgccgccgtggaagagtacagttgtgaatttggctccgcgaagtattatgcactgtgtggctttggtggggtcttaagttgtggtctgacacacactgctgtggttcccctggatttagtgaaatgccgtatgcaggtggacccccaaaagtacaagggcatatttaacggattctcagttacacttaaagaggatggtgttcgtggtttggctaaaggatgggctccgactttccttggctactccatgcagggactctgcaagtttggcttttatgaagtctttaaagtcttgtatagcaatatgcttggagaggagaatacttatctctggcgcacatcactatatttggctgcctctgccagtgctgaattctttgctgacattgccctggctcctatggaagctgctaaggttcgaattcaaacccagccaggttatgccaacactttgagggatgcagctcccaaaatgtataaggaagaaggcctaaaagcattctacaagggggttgctcctctctggatgagacagataccatacaccatgatgaagttcgcctgctttgaacgtactgttgaagcactgtacaagtttgtggttcctaagccccgcagtgaatgttcaaagccagagcagctggttgtaacatttgtagcaggttacatagctggagtcttttgtgcaattgtttctcaccctgctgattctgtggtatctgtgttgaataaagaaaaaggtagcagtgcttctctggtcctcaagagacttggatttaaaggtgtatggaagggactgtttgcccgtatcatcatgattggtaccctgactgcactacagtggtttatctatgactccgtgaaggtctacttcagacttcctcgccctcctccacccgagatgccagagtctctgaagaagaagcttgggttaactcagtagttagatcaaagcaaatgtggactgaatctgcttgttgatcagtgttgaagaaagtgcaaaaggaacttttatatatttgacagtgtaggaaattgtctattcctgatataattactgtagtactcttgcttaaggcaagagtttcagatttactgttgaaataaacccaactcttcatga

SEQ ID NO: 442005 - DNA, 1349 bp, Homo sapiens
tggctagtacgagccgggtgtgtaatcggcacgaggcaacctttccaagggagtggttgtgtgatcgccatcttagggaaaagatgttctcgtccgtggcgcacctggcgcgggcgaaccccttcaacacgccacatctgcagctggtgcacgatggtctcggggacctccgcagcagctccccagggcccacgggccagccccgccgccctcgcaacctggcagccgccgccgtggaagagtacagttgtgaatttggctccgcgaagtattatgcactgtgtggctttggtggggtcttaagttgtggtctgacacacactgctgtggttcccctggatttagtgaaatgccgtatgcaggtggacccccaaaagtacaagggcatatttaacggattctcagttacacttaaagaggatggtgttcgtggtttggctaaaggatgggctccgactttccttggctactccatgcagggactctgcaagtttggcttttatgaagtctttaaagtcttgtatagcaatatgcttggagaggagaatacttatctctggcgcacatcactatatttggctgcctctgccagtgctgaattctttgctgacattgccctggctcctatggaagctgctaaggttcgaattcaaacccagccaggttatgccaacactttgagggatgcagctcccaaaatgtataaggaagaaggcctaaaagcattctacaagggggttgctcctctctggatgagacagataccatacaccatgatgaagttcgcctgctttgaacgtactgttgaagcactgtacaagtttgtggttcctaagccccgcagtgaatgttcaaagccagagcagctggttgtaacatttgtagcaggttacatagctggagtcttttgtgcaattgtttctcaccctgctgattctgtggtatctgtgttgaataaagaaaaaggtagcagtgcttctctggtcctcaagagacttggatttaaaggtgtatggaagggactgtttgcccgtatcatcatgattggtaccctgactgcactacagtggtttatctatgactccgtgaaggtctacttcagacttcctcgccctcctccacccgagatgccagagtctctgaagaagaagcttgggttaactcagtagttagatcaaagcaaatgtggactgaatctgcttgttgatcagtgttgaagaaagtgcaaaaggaacttttatatatttgacagtgtaggaaattgtctattcctgatataattactgtagtactcttgcttaaggcaagagtttcagatttactgttgaaataaacccaactcttcatga

SEQ ID NO: 442006 - DNA, 1352 bp, Homo sapiens
cggacgcgtgggtccggacgcgtgggtcgacccacgcgtcaacctttccaagggagtggttgtgtgatcgccatcttagggaaaagatgttctcgtccgtggcgcacctggcgcgggcgaaccccttcaacacgccacatctgcagctggtgcacgatggtctcggggacctccgcagcagctccccagggcccacgggccagccccgccgccctcgcaacctggcagccgccgccgtggaagagtacagttgtgaatttggctccgcgaagtattatgcactgtgtggctttggtggggtcttaagttgtggtctgacacacactgctgtggttcccctggatttagtgaaatgccgtatgcaggtggacccccaaaagtacaagggcatatttaacggattctcagttacacttaaagaggatggtgttcgtggtttggctaaaggatgggctccgactttccttggctactccatgcagggactctgcaagtttggcttttatgaagtctttaaagtcttgtatagcaatatgcttggagaggagaatacttatctctggcgcacatcactatatttggctgcctctgccagtgctgaattctttgctgacattgccctggctcctatggaagctgctaaggttcgaattcaaacccagccaggttatgccaacactttgagggatgcagctcccaaaatgtataaggaagaaggcctaaaagcattctacaagggggttgctcctctctggatgagacagataccatacaccatgatgaagttcgcctgctttgaacgtactgttgaagcactgtacaagtttgtggttcctaagccccgcagtgaatgttcaaagccagagcagctggttgtaacatttgtagcaggttacatagctggagtcttttgtgcaattgtttctcaccctgctgattctgtggtatctgtgttgaataaagaaaaaggtagcagtgcttctctggtcctcaagagacttggatttaaaggtgtatggaagggactgtttgcccgtatcatcatgattggtaccctgactgcactacagtggtttatctatgactccgtgaaggtctacttcagacttcctcgccctcctccacccgagatgccagagtctctgaagaagaagcttgggttaactcagtagttagatcaaagcaaatgtggactgaatctgcttgttgatcagtgttgaagaaagtgcaaaaggaacttttatatatttgacagtgtaggaaattgtctattcctgatataattactgtagtactcttgcttaaggcaagagtttcagatttactgttgaaataaacccaactcttcatga

SEQ ID NO: 442007 - DNA, 1634 bp, Homo sapiens
  misc_feature (15)..(15): n is a, c, g, or t
  misc_feature (25)..(25): n is a, c, g, or t
  misc_feature (1396)..(1396): n is a, c, g, or t
  misc_feature (1399)..(1399): n is a, c, g, or t
taggctagtgcgagncccgtatttnatcggcacgaggcaacctttccaagggagtggttgtgtgatcgccatcttagggaaaagatgttctcgtccgtggcgcacctggcgcgggcgaaccccttcaacacgccacatctgcagctggtgcacgatggtctcggggacctccgcagcagctccccagggcccacgggccagccccgccgccctcgcaacctggcagccgccgccgtggaagagtacagttgtgaatttggctccgcgaagtattatgcactgtgtggctttggtggggtcttaagttgtggtctgacacacactgctgtggttcccctggatttagtgaaatgccgtatgcaggtggacccccaaaagtacaagggcatatttaacggattctcagttacacttaaagaggatggtgttcgtggtttggctaaaggatgggctccgactttccttggctactccatgcagggactctgcaagtttggcttttatgaagtctttaaagtcttgtatagcaatatgcttggagaggagaatacttatctctggcgcacatcactatatttggctgcctctgccagtgctgaattctttgctgacattgccctggctcctatggaagctgctaaggttcgaattcaaacccagccaggttatgccaacactttgagggatgcagctcccaaaatgtataaggaagaaggcctaaaagcattctacaagggggttgctcctctctggatgagacagataccatacaccatgatgaagttcgcctgctttgaacgtactgttgaagcactgtacaagtttgtggttcctaagccccgcagtgaatgttcaaagccagagcagctggttgtaacatttgtagcaggttacatagctggagtcttttgtgcaattgtttctcaccctgctgattctgtggtatctgtgttgaataaagaaaaaggtagcagtgcttctctggtcctcaagagacttggatttaaaggtgtatggaagggactgtttgcccgtatcatcatgattggtaccctgactgcactacagtggtttatctatgactccgtgaaggtctacttcagacttcctcgccctcctccacccgagatgccagagtctctgaagaagaagcttgggttaactcagtagttagatcaaagcaaatgtggactgaatctgcttgttgatcagtgttgaagaaagtgcaaaaggaacttttatatatttgacagtgtaggaaattgtctattcctgatataattactgtagtactcttgcttaaggcaagagtttcagatttactgttgaaataaacccaactcttcatgaaaaaaaaaaaaaaaaaaaaaaaaaaaaaaaaaaaaaaaaaaaaaanaanaaaaaaaaaaaaaaaagaaaaaaaaaaaaaaaaagaagcaagaagccggaccgaacaaaaaaaaaccaaagtgagaaagaaagaaaaagagggagggggggcggggtggacgaatcataagaagagacgccggcgaggagcgcaggatgtgatacaccaacacgagggcgagaagggaagcgacgaccgagaaggggagcaaaatcaaaggaagtcggcggcgcttcgtggaaaa

SEQ ID NO: 442008 - DNA, 1416 bp, Homo sapiens
  misc_feature (15)..(15): n is a, c, g, or t
  misc_feature (25)..(25): n is a, c, g, or t
  misc_feature (1372)..(1372): n is a, c, g, or t
  misc_feature (1381)..(1381): n is a, c, g, or t
  misc_feature (1406)..(1406): n is a, c, g, or t
taggctagtgcgagncccgtatttnatcggcacgaggcaacctttccaagggagtggttgtgtgatcgccatcttagggaaaagatgttctcgtccgtggcgcacctggcgcgggcgaaccccttcaacacgccacatctgcagctggtgcacgatggtctcggggacctccgcagcagctccccagggcccacgggccagccccgccgccctcgcaacctggcagccgccgccgtggaagagtacagttgtgaatttggctccgcgaagtattatgcactgtgtggctttggtggggtcttaagttgtggtctgacacacactgctgtggttcccctggatttagtgaaatgccgtatgcaggtggacccccaaaagtacaagggcatatttaacggattctcagttacacttaaagaggatggtgttcgtggtttggctaaaggatgggctccgactttccttggctactccatgcagggactctgcaagtttggcttttatgaagtctttaaagtcttgtatagcaatatgcttggagaggagaatacttatctctggcgcacatcactatatttggctgcctctgccagtgctgaattctttgctgacattgccctggctcctatggaagctgctaaggttcgaattcaaacccagccaggttatgccaacactttgagggatgcagctcccaaaatgtataaggaagaaggcctaaaagcattctacaagggggttgctcctctctggatgagacagataccatacaccatgatgaagttcgcctgctttgaacgtactgttgaagcactgtacaagtttgtggttcctaagccccgcagtgaatgttcaaagccagagcagctggttgtaacatttgtagcaggttacatagctggagtcttttgtgcaattgtttctcaccctgctgattctgtggtatctgtgttgaataaagaaaaaggtagcagtgcttctctggtcctcaagagacttggatttaaaggtgtatggaagggactgtttgcccgtatcatcatgattggtaccctgactgcactacagtggtttatctatgactccgtgaaggtctacttcagacttcctcgccctcctccacccgagatgccagagtctctgaagaagaagcttgggttaactcagtagttagatcaaagcaaatgtggactgaatctgcttgttgatcagtgttgaagaaagtgcaaaaggaacttttatatatttgacagtgtaggaaattgtctattcctgatataattactgtagtactcttgcttaaggcaagagtttcagatttactgttgaaataaacccaactcttcatgaaaaacaaaaaaaaaaaaaaatngggggtttntgtggggggggaaaagaggttttgnaatggccatg

SEQ ID NO: 442009 - DNA, 1586 bp, Homo sapiens
  misc_feature (15)..(15): n is a, c, g, or t
  misc_feature (25)..(25): n is a, c, g, or t
taggctagtgcgagncccgtatttnatcggcacgaggcaacctttccaagggagtggttgtgtgatcgccatcttagggaaaagatgttctcgtccgtggcgcacctggcgcgggcgaaccccttcaacacgccacatctgcagctggtgcacgatggtctcggggacctccgcagcagctccccagggcccacgggccagccccgccgccctcgcaacctggcagccgccgccgtggaagagtacagttgtgaatttggctccgcgaagtattatgcactgtgtggctttggtggggtcttaagttgtggtctgacacacactgctgtggttcccctggatttagtgaaatgccgtatgcaggtggacccccaaaagtacaagggcatatttaacggattctcagttacacttaaagaggatggtgttcgtggtttggctaaaggatgggctccgactttccttggctactccatgcagggactctgcaagtttggcttttatgaagtctttaaagtcttgtatagcaatatgcttggagaggagaatacttatctctggcgcacatcactatatttggctgcctctgccagtgctgaattctttgctgacattgccctggctcctatggaagctgctaaggttcgaattcaaacccagccaggttatgccaacactttgagggatgcagctcccaaaatgtataaggaagaaggcctaaaagcattctacaagggggttgctcctctctggatgagacagataccatacaccatgatgaagttcgcctgctttgaacgtactgttgaagcactgtacaagtttgtggttcctaagccccgcagtgaatgttcaaagccagagcagctggttgtaacatttgtagcaggttacatagctggagtcttttgtgcaattgtttctcaccctgctgattctgtggtatctgtgttgaataaagaaaaaggtagcagtgcttctctggtcctcaagagacttggatttaaaggtgtatggaagggactgtttgcccgtatcatcatgattggtaccctgactgcactacagtggtttatctatgactccgtgaaggtctacttcagacttcctcgccctcctccacccgagatgccagagtctctgaagaagaagcttgggttaactcagtagttagatcaaagcaaatgtggactgaatctgcttgttgatcagtgttgaagaaagtgcaaaaggaacttttatatatttgacagtgtaggaaattgtctattcctgatataattactgtagtactcttgcttaaggcaagagtttcagatttactgttgaaataaacccaactcttcatgaatttgcctgtgacttatttttaaaacttttttaaaaaagatttagctttaaaatagttggaaagaatgaagtatataagttaaggaaaaaatacaaaactgaccatgaccattgttggttgaatattccagttgctattcagaaattgtcatatgtctcaagttttatcacacaaagttcctgtatttctagggaagcagactttaaatttctaaaaacttgatttaattatagtt

SEQ ID NO: 442010 - DNA, 1492 bp, Homo sapiens
  misc_feature (15)..(15): n is a, c, g, or t
  misc_feature (25)..(25): n is a, c, g, or t
  misc_feature (1371)..(1371): n is a, c, g, or t
  misc_feature (1374)..(1374): n is a, c, g, or t
taggctagtgcgagncccgtatttnatcggcacgaggcaacctttccaagggagtggttgtgtgatcgccatcttagggaaaagatgttctcgtccgtggcgcacctggcgcgggcgaaccccttcaacacgccacatctgcagctggtgcacgatggtctcggggacctccgcagcagctccccagggcccacgggccagccccgccgccctcgcaacctggcagccgccgccgtggaagagtacagttgtgaatttggctccgcgaagtattatgcactgtgtggctttggtggggtcttaagttgtggtctgacacacactgctgtggttcccctggatttagtgaaatgccgtatgcaggtggacccccaaaagtacaagggcatatttaacggattctcagttacacttaaagaggatggtgttcgtggtttggctaaaggatgggctccgactttccttggctactccatgcagggactctgcaagtttggcttttatgaagtctttaaagtcttgtatagcaatatgcttggagaggagaatacttatctctggcgcacatcactatatttggctgcctctgccagtgctgaattctttgctgacattgccctggctcctatggaagctgctaaggttcgaattcaaacccagccaggttatgccaacactttgagggatgcagctcccaaaatgtataaggaagaaggcctaaaagcattctacaagggggttgctcctctctggatgagacagataccatacaccatgatgaagttcgcctgctttgaacgtactgttgaagcactgtacaagtttgtggttcctaagccccgcagtgaatgttcaaagccagagcagctggttgtaacatttgtagcaggttacatagctggagtcttttgtgcaattgtttctcaccctgctgattctgtggtatctgtgttgaataaagaaaaaggtagcagtgcttctctggtcctcaagagacttggatttaaaggtgtatggaagggactgtttgcccgtatcatcatgattggtaccctgactgcactacagtggtttatctatgactccgtgaaggtctacttcagacttcctcgccctcctccacccgagatgccagagtctctgaagaagaagcttgggttaactcagtagttagatcaaagcaaatgtggactgaatctgcttgttgatcagtgttgaagaaagtgcaaaaggaacttttatatatttgacagtgtaggaaattgtctattcctgatataattactgtagtactcttgcttaaggcaagagtttcagatttactgttgaaataaacccaactcttcatgaaaaaaaaaaaaaaaaaaaaanaanaaactgacctacaacctggatgagaaaaaaagactacatatcacacgaaggggcttaagatggcccgggcagaaccaacagaaaaaaaagcccgggtcccgccctctcccaatttggg

SEQ ID NO: 442011 - DNA, 1412 bp, Homo sapiens
  misc_feature (15)..(15): n is a, c, g, or t
  misc_feature (25)..(25): n is a, c, g, or t
taggctagtgcgagncccgtatttnatcggcacgaggcaacctttccaagggagtggttgtgtgatcgccatcttagggaaaagatgttctcgtccgtggcgcacctggcgcgggcgaaccccttcaacacgccacatctgcagctggtgcacgatggtctcggggacctccgcagcagctccccagggcccacgggccagccccgccgccctcgcaacctggcagccgccgccgtggaagagtacagttgtgaatttggctccgcgaagtattatgcactgtgtggctttggtggggtcttaagttgtggtctgacacacactgctgtggttcccctggatttagtgaaatgccgtatgcaggtggacccccaaaagtacaagggcatatttaacggattctcagttacacttaaagaggatggtgttcgtggtttggctaaaggatgggctccgactttccttggctactccatgcagggactctgcaagtttggcttttatgaagtctttaaagtcttgtatagcaatatgcttggagaggagaatacttatctctggcgcacatcactatatttggctgcctctgccagtgctgaattctttgctgacattgccctggctcctatggaagctgctaaggttcgaattcaaacccagccaggttatgccaacactttgagggatgcagctcccaaaatgtataaggaagaaggcctaaaagcattctacaagggggttgctcctctctggatgagacagataccatacaccatgatgaagttcgcctgctttgaacgtactgttgaagcactgtacaagtttgtggttcctaagccccgcagtgaatgttcaaagccagagcagctggttgtaacatttgtagcaggttacatagctggagtcttttgtgcaattgtttctcaccctgctgattctgtggtatctgtgttgaataaagaaaaaggtagcagtgcttctctggtcctcaagagacttggatttaaaggtgtatggaagggactgtttgcccgtatcatcatgattggtaccctgactgcactacagtggtttatctatgactccgtgaaggtctacttcagacttcctcgccctcctccacccgagatgccagagtctctgaagaagaagcttgggttaactcagtagttagatcaaagcaaatgtggactgaatctgcttgttgatcagtgttgaagaaagtgcaaaaggaacttttatatatttgacagtgtaggaaattgtctattcctgatatacctgggtcatcttggctagggcaggagttcccattactggtggaataacccatcttctggaaaacaacaaaggggggggcaaattcctcagggcgagtaagaccactttgaaggcccagaaggtaaaaaaag

SEQ ID NO: 442012 - DNA, 1316 bp, Homo sapiens
  misc_feature (15)..(15): n is a, c, g, or t
  misc_feature (25)..(25): n is a, c, g, or t
taggctagtgcgagncccgtatttnatcggcacgaggcaacctttccaagggagtggttgtgtgatcgccatcttagggaaaagatgttctcgtccgtggcgcacctggcgcgggcgaaccccttcaacacgccacatctgcagctggtgcacgatggtctcggggacctccgcagcagctccccagggcccacgggccagccccgccgccctcgcaacctggcagccgccgccgtggaagagtacagttgtgaatttggctccgcgaagtattatgcactgtgtggctttggtggggtcttaagttgtggtctgacacacactgctgtggttcccctggatttagtgaaatgccgtatgcaggtggacccccaaaagtacaagggcatatttaacggattctcagttacacttaaagaggatggtgttcgtggtttggctaaaggatgggctccgactttccttggctactccatgcagggactctgcaagtttggcttttatgaagtctttaaagtcttgtatagcaatatgcttggagaggagaatacttatctctggcgcacatcactatatttggctgcctctgccagtgctgaattctttgctgacattgccctggctcctatggaagctgctaaggttcgaattcaaacccagccaggttatgccaacactttgagggatgcagctcccaaaatgtataaggaagaaggcctaaaagcattctacaagggggttgctcctctctggatgagacagataccatacaccatgatgaagttcgcctgctttgaacgtactgttgaagcactgtacaagtttgtggttcctaagccccgcagtgaatgttcaaagccagagcagctggttgtaacatttgtagcaggttacatagctggagtcttttgtgcaattgtttctcaccctgctgattctgtggtatctgtgttgaataaagaaaaaggtagcagtgcttctctggtcctcagacgaactgggtttacggtgtttggcagggagtggtggccggaataaccttggtgtggacccctgatgtgctaaaggggtaactcatgtaagccgggagggggtactaagaagttctgcgcttcttacggagatgcgagattgtacgaaaaacgtgtgttacacgagtttgtaacaccaatgagagtgatgctgtcacatgctgaagaaagagagttattatggaggggaagagcatgtacttatggtagtagatcggacatctgtaggtccttacaaacagtctgtggggtgtgcattctttcttctgcgtacttcacttatga

SEQ ID NO: 442013 - DNA, 1031 bp, Homo sapiens
  misc_feature (15)..(15): n is a, c, g, or t
  misc_feature (25)..(25): n is a, c, g, or t
  misc_feature (951)..(951): n is a, c, g, or t
  misc_feature (963)..(963): n is a, c, g, or t
  misc_feature (985)..(985): n is a, c, g, or t
  misc_feature (987)..(987): n is a, c, g, or t
  misc_feature (992)..(992): n is a, c, g, or t
  misc_feature (996)..(996): n is a, c, g, or t
taggctagtgcgagncccgtatttnatcggcacgaggcaacctttccaagggagtggttgtgtgatcgccatcttagggaaaagatgttctcgtccgtggcgcacctggcgcgggcgaaccccttcaacacgccacatctgcagctggtgcacgatggtctcggggacctccgcagcagctccccagggcccacgggccagccccgccgccctcgcaacctggcagccgccgccgtggaagagtacagttgtgaatttggctccgcgaagtattatgcactgtgtggctttggtggggtcttaagttgtggtctgacacacactgctgtggttcccctggatttagtgaaatgccgtatgcaggtggacccccaaaagtacaagggcatatttaacggattctcagttacacttaaagaggatggtgttcgtggtttggctaaaggatgggctccgactttccttggctactccatgcagggactctgcaagtttggcttttatgaagtctttaaagtcttgtatagcaatatgcttggagaggagaatacttatctctggcgcacatcactatatttggctgcctctgccagtgctgaattctttgctgacattgccctggctcctatggaagctgctaaggttcgaattcaaacccagccaggttatgccaacactttgagggatgcagctcccaaaatgtataaggaagaaggcctaaaagcattctacaagggggttgctcctctctggatgagacagataccatacaccatgatgaagttcgcctgctttgaacgtactgttgaagcactgtacaagtttgtggttcctaagccccgcagtgaatgttcaaagccagagcagctggttgtaacatttgtagcaggttacataggtaccttggtgccggtcactagcggggcttgggcatggttccccccggggtcngggtccggtganaacaagggcggttctggccccnancggtngtgngggggccccaggcgcggggggtttcggggggaccc

SEQ ID NO: 442014 - DNA, 1051 bp, Homo sapiens
  misc_feature (15)..(15): n is a, c, g, or t
  misc_feature (25)..(25): n is a, c, g, or t
  misc_feature (909)..(909): n is a, c, g, or t
  misc_feature (924)..(925): n is a, c, g, or t
  misc_feature (944)..(944): n is a, c, g, or t
  misc_feature (949)..(949): n is a, c, g, or t
taggctagtgcgagncccgtatttnatcggcacgaggcaacctttccaagggagtggttgtgtgatcgccatcttagggaaaagatgttctcgtccgtggcgcacctggcgcgggcgaaccccttcaacacgccacatctgcagctggtgcacgatggtctcggggacctccgcagcagctccccagggcccacgggccagccccgccgccctcgcaacctggcagccgccgccgtggaagagtacagttgtgaatttggctccgcgaagtattatgcactgtgtggctttggtggggtcttaagttgtggtctgacacacactgctgtggttcccctggatttagtgaaatgccgtatgcaggtggacccccaaaagtacaagggcatatttaacggattctcagttacacttaaagaggatggtgttcgtggtttggctaaaggatgggctccgactttccttggctactccatgcagggactctgcaagtttggcttttatgaagtctttaaagtcttgtatagcaatatgcttggagaggagaatacttatctctggcgcacatcactatatttggctgcctctgccagtgctgaattctttgctgacattgccctggctcctatggaagctgctaaggttcgaattcaaacccagccaggttatgccaacactttgagggatgcagctcccaaaatgtataaggaagaaggcctaaaagcattctacaagggggttgctcctctctggatgagacagataccatacaccatgatgaagttcgcctgctttgaacgtactgttgaagcactgtacaagtttgtggttcctaagccccgcagtgaatgttcaaagccagagcagctggttgtaacatttgtagcaggttacataggtgcggtaatncggggcttggtcacnngtccccgcgatcggggtgnggaanaaagggggtcgcccaacgtagggggggggggcgcaagaccggaggtacggaaaccccccagaagagagttggtattttgtcctgttacgtcaatgccttatc

SEQ ID NO: 442015 - DNA, 1379 bp, Homo sapiens
  misc_feature (30)..(30): n is a, c, g, or t
  misc_feature (34)..(34): n is a, c, g, or t
  misc_feature (40)..(40): n is a, c, g, or t
  misc_feature (72)..(73): n is a, c, g, or t
gcctcctactccctccacaccccctcaccncccnccccgnccgaaactacggctaggtacgaggctgggtgnngccaagggagtggttgtgtgatcgccatcttagggaaaagatgttctcgtccgtggcgcacctggcgcgggcgaaccccttcaacacgccacatctgcagctggtgcacgatggtctcggggacctccgcagcagctccccagggcccacgggccagccccgccgccctcgcaacctggcagccgccgccgtggaagagtacagttgtgaatttggctccgcgaagtattatgcactgtgtggctttggtggggtcttaagttgtggtctgacacacactgctgtggttcccctggatttagtgaaatgccgtatgcaggtggacccccaaaagtacaagggcatatttaacggattctcagttacacttaaagaggatggtgttcgtggtttggctaaaggatgggctccgactttccttggctactccatgcagggactctgcaagtttggcttttatgaagtctttaaagtcttgtatagcaatatgcttggagaggagaatacttatctctggcgcacatcactatatttggctgcctctgccagtgctgaattctttgctgacattgccctggctcctatggaagctgctaaggttcgaattcaaacccagccaggttatgccaacactttgagggatgcagctcccaaaatgtataaggaagaaggcctaaaagcattctacaagggggttgctcctctctggatgagacagataccatacaccatgatgaagttcgcctgctttgaacgtactgttgaagcactgtacaagtttgtggttcctaagccccgcagtgaatgttcaaagccagagcagctggttgtaacatttgtagcaggttacatagctggagtcttttgtgcaattgtttctcaccctgctgattctgtggtatctgtgttgaataaagaaaaaggtagcagtgcttctctggtcctcaagagacttggatttaaaggtgtatggaagggactgtttgcccgtatcatcatgattggtaccctgactgcactacagtggtttatctatgactccgtgaaggtctacttcagacttcctcgccctcctccacccgagatgccagagtctctgaagaagaagcttgggttaactcagtagttagatcaaagcaaatgtggactgaatctgcttgttgatcagtgttgaagaaagtgcaaaaggaacttttatatatttgacagtgtaggaaattgtctattcctgatataattactgtagtactcttgcttaaggcaagagtttcagatttactgttgaaataaacccaactcttcatga

SEQ ID NO: 442016 - DNA, 1296 bp, Homo sapiens
tggttgtgtgatcgccatcttagggaaaagatgttctcgtccgtggcgcacctggcgcgggcgaaccccttcaacacgccacatctgcagctggtgcacgatggtctcggggacctccgcagcagctccccagggcccacgggccagccccgccgccctcgcaacctggcagccgccgccgtggaagagtacagttgtgaatttggctccgcgaagtattatgcactgtgtggctttggtggggtcttaagttgtggtctgacacacactgctgtggttcccctggatttagtgaaatgccgtatgcaggtggacccccaaaagtacaagggcatatttaacggattctcagttacacttaaagaggatggtgttcgtggtttggctaaaggatgggctccgactttccttggctactccatgcagggactctgcaagtttggcttttatgaagtctttaaagtcttgtatagcaatatgcttggagaggagaatacttatctctggcgcacatcactatatttggctgcctctgccagtgctgaattctttgctgacattgccctggctcctatggaagctgctaaggttcgaattcaaacccagccaggttatgccaacactttgagggatgcagctcccaaaatgtataaggaagaaggcctaaaagcattctacaagggggttgctcctctctggatgagacagataccatacaccatgatgaagttcgcctgctttgaacgtactgttgaagcactgtacaagtttgtggttcctaagccccgcagtgaatgttcaaagccagagcagctggttgtaacatttgtagcaggttacatagctggagtcttttgtgcaattgtttctcaccctgctgattctgtggtatctgtgttgaataaagaaaaaggtagcagtgcttctctggtcctcaagagacttggatttaaaggtgtatggaagggactgtttgcccgtatcatcatgattggtaccctgactgcactacagtggtttatctatgactccgtgaaggtctacttcagacttcctcgccctcctccacccgagatgccagagtctctgaagaagaagcttgggttaactcagtagttagatcaaagcaaatgtggactgaatctgcttgttgatcagtgttgaagaaagtgcaaaaggaacttttatatatttgacagtgtaggaaattgtctattcctgatataattactgtagtactcttgcttaaggcaagagtttcagatttactgttgaaataaacccaactcttcatga

SEQ ID NO: 442017 - DNA, 1457 bp, Homo sapiens
  misc_feature (15)..(15): n is a, c, g, or t
  misc_feature (25)..(25): n is a, c, g, or t
taggctagtgcgagncccgtatttnatcggcacgaggcaacctttccaagggagtggttgtgtgatcgccatcttagggaaaagatgttctcgtccgtggcgcacctggcgcgggcgaaccccttcaacacgccacatctgcagctggtgcacgatggtctcggggacctccgcagcagctccccagggcccacgggccagccccgccgccctcgcaacctggcagccgccgccgtggaagagcagtatagctgtgactatggatctggcagattctttatcctttgtggacttggaggaattattagctgtggcacaacacatacagcattggttcctctagatctggttaaatgcagaatgcaggtttgttttgcatgctggactagagcatattgaagcatgactgactgttaagttataagatatagtcatctaacaagctgtgtggaaacctaactgtccaggaggtggacccccaaaagtacaagggcatatttaacggattctcagttacacttaaagaggatggtgttcgtggtttggctaaaggatgggctccgactttccttggctactccatgcagggactctgcaagtttggcttttatgaagtctttaaagtcttgtatagcaatatgcttggagaggagaatacttatctctggcgcacatcactatatttggctgcctctgccagtgctgaattctttgctgacattgccctggctcctatggaagctgctaaggttcgaattcaaacccagccaggttatgccaacactttgagggatgcagctcccaaaatgtataaggaagaaggcctaaaagcattctacaagggggttgctcctctctggatgagacagataccatacaccatgatgaagttcgcctgctttgaacgtactgttgaagcactgtacaagtttgtggttcctaagccccgcagtgaatgttcaaagccagagcagctggttgtaacatttgtagcaggttacatagctggagtcttttgtgcaattgtttctcaccctgctgattctgtggtatctgtgttgaataaagaaaaaggtagcagtgcttctctggtcctcaagagacttggatttaaaggtgtatggaagggactgtttgcccgtatcatcatgattggtaccctgactgcactacagtggtttatctatgactccgtgaaggtctacttcagacttcctcgccctcctccacccgagatgccagagtctctgaagaagaagcttgggttaactcagtagttagatcaaagcaaatgtggactgaatctgcttgttgatcagtgttgaagaaagtgcaaaaggaacttttatatatttgacagtgtaggaaattgtctattcctgatataattactgtagtactcttgcttaaggcaagagtttcagatttactgttgaaataaacccaactcttcatga

SEQ ID NO: 442018 - DNA, 755 bp, Homo sapiens
cggacgcgtgggtccggacgcgtgggtcgacccacgcgtctgctaaggttcgaattcaaacccagccaggttatgccaacactttgagggatgcagctcccaaaatgtataaggaagaaggcctaaaagcattctacaagggggttgctcctctctggatgagacagataccatacaccatgatgaagttcgcctgctttgaacgtactgttgaagcactgtacaagtttgtggttcctaagccccgcagtgaatgttcaaagccagagcagctggttgtaacatttgtagcaggttacatagctggagtcttttgtgcaattgtttctcaccctgctgattctgtggtatctgtgttgaataaagaaaaaggtagcagtgcttctctggtcctcaagagacttggatttaaaggtgtatggaagggactgtttgcccgtatcatcatgattggtaccctgactgcactacagtggtttatctatgactccgtgaaggtctacttcagacttcctcgccctcctccacccgagatgccagagtctctgaagaagaagcttgggttaactcagtagttagatcaaagcaaatgtggactgaatctgcttgttgatcagtgttgaagaaagtgcaaaaggaacttttatatatttgacagtgtaggaaattgtctattcctgatataattactgtagtactcttgcttaaggcaagagtttcagatttactgttgaaataaacccaactcttcatga

SEQ ID NO: 442019 - DNA, 1393 bp, Homo sapiens
tggctagtacgagccgggtgtgtaatcggcacgaggcaacctttccaagggagtggttgtgtgatcgccatcttagggaaaagatgttctcgtccgtggcgcacctggcgcgggcgaaccccttcaacacgccacatctgcagctggtgcacgatggtctcggggacctccgcagcagctccccagggcccacgggccagccccgccgccctcgcaacctggcagccgccgccgtggaagagtacagttgtgaatttggctccgcgaagtattatgcactgtgtggctttggtggggtcttaagttgtggtctgacacacactgctgtggttcccctggatttagtgaaatgccgtatgcaggtggacccccaaaagtacaagggcatatttaacggattctcagttacacttaaagaggatggtgttcgtggtttggctaaaggatgggctccgactttccttggctactccatgcagggactctgcaagtttggcttttatgaagtctttaaagtcttgtatagcaatatgcttggagaggtctctgaagaagaagcttgggttaactcagtagttagatcaaagcaaatgtggactgaatctgcttgttgatcagtgttgaagaaagtgcaaaaggaacttttatatatttgacagtgtaggaaattgtctattcctgatataattactgtagtactcttgcttaaggcaagagtttcagatttactgttgaaataaacccaactcttcatgaatttgcctgtgacttatttttaaaacttttttaaaaaagatttagctttaaaatagttggaaagaatgaagtatataagttaaggaaaaaatacaaaactgaccatgaccattgttggttgaatattccagttgctattcagaaattgtcatatgtctcaaaaaaaaaaaaaatatatatatatatatatatatgaagctgatagttgaattatgttgattcagggacaagatagcattgcatagtaacttccagtaggatcaaatattttgagagtggttaaaacgccaaggaatcctgattttatgaaattatgccttctgataggtgcaacaaaattgaacagaagagtaacagcttaactaaacctccattgtgtgaaagttttatgaaatgttttgactttttttttttttttccctagagaacagggttctttgctttgtcgcccaggctggagtacagcctttgaactcctgggctcaagcgatcctcctgcctcagcctcccagttagctgacacaattgggatgtgccactacttgctcctgttttttcatagacgggtcctgctgttgctcaggctggtctcggattcctggcctcaagcaactttcctgccccagctcctaaagcg

SEQ ID NO: 442020 - DNA, 1583 bp, Homo sapiens
tggctagtacgagccgggtgtgtaatcggcacgaggcaacctttccaagggagtggttgtgtgatcgccatcttagggagtgagtgtggccgggccttctcctgtggcgggtgtggggagcggagcccagagctcctgtggggccgctgctttggcggtgggcccagccgggagcagcctctttcgaaggccgccgtgacctcttcaagggcgtggagacgggaaggaaaaggccccggttggggttccagggcgccggtaacgttaaccggcgccttgcctgtcctctaaccgtcgctccctcctcccctagaaagatgttctcgtccgtggcgcacctggcgcgggcgaaccccttcaacacgccacatctgcagctggtgcacgatggtctcggggacctccgcagcagctccccagggcccacgggccagccccgccgccctcgcaacctggcagccgccgccgtggaagagtacagttgtgaatttggctccgcgaagtattatgcactgtgtggctttggtggggtcttaagttgtggtctgacacacactgctgtggttcccctggatttagtgaaatgccgtatgcaggtggacccccaaaagtacaagggcatatttaacggattctcagttacacttaaagaggatggtgttcgtggtttggctaaaggatgggctccgactttccttggctactccatgcagggactctgcaagtttggcttttatgaagtctttaaagtcttgtatagcaatatgcttggagaggagaatacttatctctggcgcacatcactatatttggctgcctctgccagtgctgaattctttgctgacattgccctggctcctatggaagctgctaaggttcgaattcaaacccagccaggttatgccaacactttgagggatgcagctcccaaaatgtataaggaagaaggcctaaaagcattctacaagggggttgctcctctctggatgagacagataccatacaccatgatgaagttcgcctgctttgaacgtactgttgaagcactgtacaagtttgtggttcctaagccccgcagtgaatgttcaaagccagagcagctggttgtaacatttgtagcaggttacatagctggagtcttttgtgcaattgtttctcaccctgctgattctgtggtatctgtgttgaataaagaaaaaggtagcagtgcttctctggtcctcaagagacttggatttaaaggtgtatggaagggactgtttgcccgtatcatcatgattggtaccctgactgcactacagtggtttatctatgactccgtgaaggtctacttcagacttcctcgccctcctccacccgagatgccagagtctctgaagaagaagcttgggttaactcagtagttagatcaaagcaaatgtggactgaatctgcttgttgatcagtgttgaagaaagtgcaaaaggaacttttatatatttgacagtgtaggaaattgtctattcctgatataattactgtagtactcttgcttaaggcaagagtttcagatttactgttgaaataaacccaactcttcatga

SEQ ID NO: 442021 - DNA, 1123 bp, Homo sapiens
tcccaatttattagtgttgtacatattgaagaaaacctttttgttccttcagatttagaaagaaacagtttaaccatttatttcttggtattctgctgctgtgaataggtttacttattcttttaacatatattgtgtgactacgcaagtataggtcctgttgtattgcattaatctttaccagtaactaaacatcacaaggttaatattggtttggctgaaagaattatgcagtaaagttatttataagggaacatgatgactttattcaatatttttcttctttgaaacatctcattactaacttttaagattatttcataatcccttatacatgagccaatgaaatattttgagctctacttaagaagcatgaagtctatattataaatctaaacaacaaaagcacttgtaacttgtttagtaaattccatgccttattttccatttttgacaccgtaaagtgcattttctgtcgactgtgagcaaatttcccttttgcctttaatgaaaatagtgcattaagtagccaattgctgcagaattataaagcaaattagctaacagtgggtcacattggactaccactcaaagaaacaagatgcataacagatgatggaaggtacatgtggtgtggcttagggagagcgcacctgtgccagatgcatgccactttcagtagctgccaaatgtgcctttaattaagaacatctctaatttttttcttcagatcaagtcagcatttggggtcgggatttgggcagggaactctggggtgcaaatatctggtgaaaccaccagagaatttgtttgtcaaagtgacatgtataattttagttgagacgtgtttgtgtatatatgtgtatttgcctttgtttagtagcacggttatttgctaaaataattgtcaaaaaattgctctgtcggtcggtctttgatgtaagaacaaagtgtggtctatacatctaatatggcctttgtacctaaccatgttcataggtaatctttgtactctgtgtgcagcagtatttggtttgcatttaaagtgaaaataacggctgttatttttctggcattactaagataaactgaaaaataataaagaaaaatgccttacatagcc

SEQ ID NO: 442022 - DNA, 954 bp, Homo sapiens
gtgataaccccttttcaacctatctagtctataaagaggaaaaattcagatttggagttctaatcctatttctcccaaagggaactattcttctaccccatggttctaggagaccacttcactgtgcaacagttttacatgcattgtggatggaggatatttttattctgaactgttacatttaggtaaaaatattttctgcagtggtaactgattagaaaaatgccaattggatgcccttaggtggaggtgagaaaatggcatccttgccttcttctcaatatgaaacattaactagttgacaaatttatccttgtagaaatgaaaatctatttaatcagggaccagaaatggctgaggagataaatgcatcattacaaaattctgcttttgaatcctggacattacaagggggtaaatgcagcatgactttttgttaaccacattccaaaatgtggaacatttcttttagaaatgaaaatatttcaaggctgatgtattttaagactacacattatcaggaaacatacattgagaaacatctctaatttttttcttcagatcaagtcagcatttggggtcgggatttgggcagggaactctggggtgcaaatatctggtgaaaccaccagagaatttgtttgtcaaagtgacatgtataattttagttgagacgtgtttgtgtatatatgtgtatttgcctttgtttagtagcacggttatttgctaaaataattgtcaaaaaattgctctgtcggtcggtctttgatgtaagaacaaagtgtggtctatacatctaatatggcctttgtacctaaccatgttcataggtaatctttgtactctgtgtgcagcagtatttggtttgcatttaaagtgaaaataacggctgttatttttctggcattactaagataaactgaaaaataataaagaaaaatgccttacatagcc

SEQ ID NO: 442023 - DNA, 1193 bp, Homo sapiens
tcccaatttattagtgttgtacatattgaagaaaacctttttgttccttcagatttagaaagaaacagtttaaccatttatttcttggtattctgctgctgtgaataggtttacttattcttttaacatatattgtgtgactacgcaagtataggtcctgttgtattgcattaatctttaccagtaactaaacatcacaaggttaatattggtttggctgaaagaattatgcagtaaagttatttataagggaacatgatgactttattcaatatttttcttctttgaaacatctcattactaacttttaagattatttcataatcccttatacatgagccaatgaaatattttgagctctacttaagaagcatgaagtctatattataaatctaaacaacaaaagcacttgtaacttgtttagtaaattccatgccttattttccatttttgacaccgtaaagtgcattttctgtcgactgtgagcaaatttcccttttgcctttaatgaaaatagtgcattaagtagccaattgctgcagaattataaagcaaattagctaacagtgggtcacattggactaccactcaaagaaacaagatgcataacagatgatggaaggtacatgtggtgtggcttagggagagcgcacctgtgccagatgcatgccactttcagtagctgccaaatgtgcctttaattaagaacatctctaatttttttcttcagatcaagtcagcatttggggtcgggatttgggcagggaactctggggtgcaaatatctggtgaaaccaccagagaatttgtttgtcaaagtgacatgtataattttagttgagacgtgtttgtgtatatatgtgtatttgcctttgtttagtagcacggttatttgctaaaataattgtcaaaaaattgctctgtcggtcggtctttgatgtaagaacaaagtgtggtctatacatctaatatggcctttgtacctaaccatgttcataggtaatctttgtactctgtgtgcagcagtatttggtttgcatttaaagtgaaaataacggctgttatttttctggcattactaagataaactgaaaaataataaagaaaaatgccttacatagcccacaagtgtattatttttgcatgtatttattttagagggcagtatttttgaaatcattagtgattctcat

SEQ ID NO: 442024 - DNA, 870 bp, Homo sapiens
gtgataaccccttttcaacctatctagtctataaagaggaaaaattcagatttggagttctaatcctatttctcccaaagggaactattcttctaccccatggttctaggagaccacttcactgtgcaacagttttacatgcattgtggatggaggatatttttattctgaactgttacatttaggtaaaaatattttctgcagtggtaactgattagaaaaatgccaattggatgcccttaggtggaggtgagaaaatggcatccttgccttcttctcaatatgaaacattaactagttgacaaatttatccttgtagaaatgaaaatctatttaatcagggaccagaaatggctgaggagataaatgcatcattacaaaattctgcttttgaatcctggacattacaagggggtaaatgcagcatgactttttgttaaccacattccaaaatgtggaacatttcttttagaaatgaaaatatttcaaggctgatgtattttaagactacacattatcaggaaacatacattgagagttcgcttaattaaaggttgttgggcatcaaattatgtttagtaggttactattctctaacaactcaaggatgctttaatggatctgaatttgacaaagagcatgccacactaatactacagtcaacaacagcccagagaacaattactatgtcagctggaggctatattatgattctaaattcttaaaggttttttccctccataaatcaaaaattaccttatgtaaaccaaaaattagttggtatttatggtcatgatcttaattctcaagtttagcttaatcttgtatttcattgtttgtcttctaatatgacagcttaaattcagattt

SEQ ID NO: 442025 - DNA, 1209 bp, Homo sapiens
agcgggccatgttgttccctccgcgctggacgggagcagctggagcgggagcctggctgcgctaccgcggctgcctcctgctgtgcaggtccccgaccctctctctgtcctcattgcgcccagacgggccggcccagagctcccgggtcgtctttcgtgtggccgcgagacactcttgcactcctgtaatgagcctggcactgtgatgaaacacttttcccgtgtcgtttgagtgcatcttctcaacaaccctaggagggttcttgaagcttttgagattaacaatggcaggaaaatcatcactttttaaagtaattctccttggagatggtggagttgggaagagttcacttatgaacagatatgtaactaataagtttgatacccagctcttccatacaataggtgtggaatttttaaataaagatttggaagtggatggacattttgttaccatgcagatttgggacacggcaggtcaggagcgattccgaagcctgaggacaccattttacagaggttctgactgctgcctgcttacttttagtgtcgatgattcacaaagcttccagaacttaagtaactggaagaaagaattcatatattatgcagatgtgaaagagcctgagagctttccttttgtgattctgggtaacaagattgacataagcgaacggcaggtgtctacagaagaagcccaagcttggtgcagggacaacggcgactatccttattttgaaacaagtgcaaaagatgccacaaatgtggcagcagcctttgaggaagcggttcgaagagttcttgctaccgaggataggtcagatcatttgattcagacagacacagtcaatcttcaccgaaagcccaagcctagctcatcttgctgttgattgttagattgttgatgcattctaaccaactcacacatatacacaaaatcaacatggggatggagaagagaattagcgtttgcagcagtgtatcatctactaataaaattaaactaatgttgctgcttcattagttggtgggagaagggacacatccactcttggaggaatatatttactcaataatggcaccttacatttataaattgtaacagttgtctaataacgtttctttaatttaaatatgtaagttgcagagctaataaatgaaatgaccaagactttaattataataaaaataagaaacttgactattcta

SEQ ID NO: 442026 - DNA, 1377 bp, Homo sapiens
agcgggccatgttgttccctccgcgctggacgggagcagctggagcgggagcctggctgcgctaccgcggctgcctcctgctgtgcaggtccccgaccctctctctgtcctcattgcgcccagacgggccggcccagagctcccgggtcgtctttcgtgtggccgcgagacactcttgcactcctgtaatgagcctggcactgtgatgaaacacttttcccgtgtcgtttgagtgcatcttctcaacaaccctaggagggttcttgaagcttttgagattaacaatggcaggaaaatcatcactttttaaagtaattctccttggagatggtggagttgggaagagttcacttatgaacagatatgtaactaataagtttgatacccagctcttccatacaataggtgtggaatttttaaataaagatttggaagtggatggacattttgttaccatgcagatttgggacacggcaggtcaggagcgattccgaagcctgaggacaccattttacagaggttctgactgctgcctgcttacttttagtgtcgatgattcacaaagcttccagaacttaagtaactggaagaaagaattcatatattatgcagatgtgaaagagcctgagagctttccttttgtgattctgggtaacaagattgacataagcgaacggcaggtgtctacagaagaagcccaagcttggtgcagggacaacggcgactatccttattttgaaacaagtgcaaaagatgccacaaatgtggcagcagcctttgaggaagcggttcgaagagttcttgctaccgaggataggtcagatcatttgattcagacagacacagtcaatcttcaccgaaagcccaagcctagctcatcttgctgttgattgttagattgttgatgcattctaaccaactcacacatatacacaaaatcaacatggggatggagaagagaattagcgtttgcagcagtgtatcatctactaataaaattaaactaatgttgctgcttcattagttggtgggagaagggacacatccactcttggaggaatatatttactcaataatggcaccttacatttataaattgtaacagttgtctaataacgtttctttaatttaaatatgtaagttgcagagctaataaatgaaatgaccaagactttaattataataaaaataagaaacttgactattctagaagttatacttggattttttcctgggaaaatggagaactactttttatatgtgtatgtttttatgcaattagcattgtattcttggttcagggaaatactttcctaaagcaataatgttagatattaaagattaaaatctaatgtatttgcaatgcattgttaattt

SEQ ID NO: 442027 - DNA, 1288 bp, Homo sapiens
agcgggccatgttgttccctccgcgctggacgggagcagctggagcgggagcctggctgcgctaccgcggctgcctcctgctgtgcaggtccccgaccctctctctgtcctcattgcgcccagacgggccggcccagagctcccgggtcgtctttcgtgtggccgcgagggttcttgaagcttttgagattaacaatggcaggaaaatcatcactttttaaagtaattctccttggagatggtggagttgggaagagttcacttatgaacagatatgtaactaataagtttgatacccagctcttccatacaataggtgtggaatttttaaataaagatttggaagtggatggacattttgttaccatgcagatttgggacacggcaggtcaggagcgattccgaagcctgaggacaccattttacagaggttctgactgctgcctgcttacttttagtgtcgatgattcacaaagcttccagaacttaagtaactggaagaaagaattcatatattatgcagatgtgaaagagcctgagagctttccttttgtgattctgggtaacaagattgacataagcgaacggcaggtgtctacagaagaagcccaagcttggtgcagggacaacggcgactatccttattttgaaacaagtgcaaaagatgccacaaatgtggcagcagcctttgaggaagcggttcgaagagttcttgctaccgaggataggtcagatcatttgattcagacagacacagtcaatcttcaccgaaagcccaagcctagctcatcttgctgttgattgttagattgttgatgcattctaaccaactcacacatatacacaaaatcaacatggggatggagaagagaattagcgtttgcagcagtgtatcatctactaataaaattaaactaatgttgctgcttcattagttggtgggagaagggacacatccactcttggaggaatatatttactcaataatggcaccttacatttataaattgtaacagttgtctaataacgtttctttaatttaaatatgtaagttgcagagctaataaatgaaatgaccaagactttaattataataaaaataagaaacttgactattctagaagttatacttggattttttcctgggaaaatggagaactactttttatatgtgtatgtttttatgcaattagcattgtattcttggttcagggaaatactttcctaaagcaataatgttagatattaaagattaaaatctaatgtatttgcaatgcattgttaattt

SEQ ID NO: 442028 - DNA, 3392 bp, Homo sapiens
gcccctcggtcccgcggcacacgcagctagccggagcccggaccaggcgcctgtgcctcctcctcgtccctcgccgcgtccgcgaagcctggagccggcgggagccccgcgctcgccatgtcgggcgagctcagcaacaggttccaaggagggaaggcgttcggcttgctcaaagcccggcaggagaggaggctggccgagatcaaccgggagtttctgtgtgaccagaagtacagtgatgaagagaaccttccagaaaagctcacagccttcaaagagaagtacatggagtttgacctgaacaatgaaggcgagattgacctgatgtctttaaagaggatgatggagaagcttggtgtccccaagacccacctggagatgaagaagatgatctcagaggtgacaggaggggtcagtgacactatatcctaccgagactttgtgaacatgatgctggggaaacggtcggctgtcctcaagttagtcatgatgtttgaaggaaaagccaacgagagcagccccaagccagttggcccccctccagagagagacattgctagcctgccctgaggaccccgcctggactccccagccttcccaccccatacctccctcccgatcttgctgcccttcttgacacactgtgatctctctctctctcatttgtttggtcattgagggtttgtttgtgttttcatcaatgtctttgtaaagcacaaattatctgccttaaaggggctctgggtcggggaatcctgagccttgggtcccctccctctcttcttccctccttccccgctccctgtgcagaagggctgatatcaaaccaaaaactagagggggcagggccagggcagggaggcttccagcctgtgttcccctcacttggaggaaccagcactctccatcctttcagaaagtctccaagccaagttcaggctcactgacctggctctgacgaggaccccaggccactctgagaagaccttggagtagggacaaggctgcagggcctctttcgggtttccttggacagtgccatggttccagtgctctggtgtcacccaggacacagccactcggggccccgctgccccagctgatccccactcattccacacctcttctcatcctcagtgatgtgaaggtgggaaggaaaggagcttggcattgggagcccttcaagaaggtaccagaaggaaccctccagtcctgctctctggccacacctgtgcaggcagctgagaggcagcgtgcagccctactgtcccttactggggcagcagagggcttcggaggcagaagtgaggcctggggtttggggggaaaggtcagctcagtgctgttccaccttttagggaggatactgaggggaccaggatgggagaatgaggagtaaaatgctcacggcaaagtcagcagcactggtaagccaagactgagaaatacaaggttgcttgtctgaccccaatctgcttgaaacctgactctgcttctctcatttgtcttcctaccctactcacataattcactcattgactcactcattcaccagatatttattgacctgctattataagctttacatcctcccatgttgtcctggcatgtgcagtatacacggtctaactcatctctccccagatctctcagaaccttgagcttgggaattgaactggggtcacctgtgtcctttcttatggactcgcaggattttagaaccctaatgcaccctggagggtagctgggccagacttctcatttcacaggtgaggagactggtgccccacagggattaagtgccttgcccaaggtcaggcttatctccagagggaggtgccctggactggggcccagatgttcagggaccctgcctacacctcatttccagtgtgggctgccttagttagttatgagaacagggaagggctgggaagagacagcctccaaggtcaacacttggagagggtttcacttgctctgaagaccctggtccaggattcgccctctcccatgccttcaagtcagcatcaggcttagggcaaagaccaggcctctgaagctgcctcttgtaattcatgcaggaagatgtcaaagtcagccccatcttggctgatcagggtgttcagccttaaccccacctgtgttctgaagtctcttaccctacctgctcaggactgagacagttattcactgaacatatttattaagcacttgctgtaggccaacagttaagaatccaataatgaaatggacagattcatggaacttagagtccaataggaaagtgagacccagacaatgacaatgagataaatgttaggaagggggaggtatggggtgacttccctgcagtcctgggggcctagatgggcccaagactgggtgagagtcttggcagagcctttgcaacaccttaagtggacaggactgggaggtcttggtggttggagccaacgtgggttccctgcggctccttagtcacctctgatagcagattgagggaggaaaacaggtaaggcatgaggaaatggccaggttgggttaacccactggtttcaaccagttcaggaatgaggttatttggccatgactggctgatcttgagctcaaggatctgcttcaaatgcacacaggcctagttgaagtttaaaccccagcaaaacattcctccctgtaaatggaaaatcctacttctacccccaccctgccctgttttttgttttttttttccccaagatcattagatgtcctcacccctcctcactgcctctcctctctgggacaggctgggacctttgaggaagataaagccttccttgactacccatcatattcagtgtccctgttcctcactcagagaggaaggcagaaccagtcaggcttatttcagtaagttccacagttctacaagactgcaggaattctccttaagggaggagagcaagcaggtgtggccccagcttctggaaatggcagaagagagggttttctcattgaatgggggtgggggctcgtgtgtcctgggaaaccccatcagtcccttcatttcttgagactcaactcctgggaggagagggtctcaagagttgtccctggaaggagggcgggggcagtctgcatctatttcaggttgtggctcttggttctaggactcttacttctctggctaagggctcagcttcttgggacttcaaccatcttctttctgaaagaccaaatctaatgtaaccagtaacgtgaggactgccaagtatggctttgtccctatgactcagaggagggtttgtcgggcaaattcaggtggatgaagtatgtgtgtgcgtgtgcatgggagtgtgcgtggactgggatatcatctctacagcctgcaaataaaccagacaaactta

SEQ ID NO: 442029 - DNA, 1470 bp, Homo sapiens
gcccctcggtcccgcggcacacgcagctagccggagcccggaccaggcgcctgtgcctcctcctcgtccctcgccgcgtccgcgaagcctggagccggcgggagccccgcgctcgccatgtcgggcgagctcagcaacaggttccaaggagggaaggcgttcggcttgctcaaagcccggcaggagaggaggctggccgagatcaaccgggagtttctgtgtgaccagaagtacagtgatgaagagaaccttccagaaaagctcacagccttcaaagagaagtacatggagtttgacctgaacaatgaaggcgagattgacctgatgtctttaaagaggatgatggagaagcttggtgtccccaagacccacctggagatgaagaagatgatctcagaggtgacaggaggggtcagtgacactatatcctaccgagactttgtgaacatgatgctggggaaacggtcggctgtcctcaagttagtcatgatgtttgaaggaaaagccaacgagagcagccccaagccagttggcccccctccagagagagacattgctagcctgccctgaggaccccgcctggactccccagccttcccaccccatacctccctcccgatcttgctgcccttcttgacacactgtgatctctctctctctcatttgtttggtcattgagggtttgtttgtgttttcatcaatgtctttgtaaagcacaaattatctgccttaaaggggctctgggtcggggaatcctgagccttgggtcccctccctctcttcttccctccttccccgctccctgtgcagaagggctgatatcaaaccaaaaactagagggggcagggccagggcagggaggcttccagcctgtgttcccctcacttggaggaaccagcactctccatcctttcagaaagtctccaagccaagttcaggctcactgacctggctctgacgaggaccccaggccactctgagaagaccttggagtagggacaaggctgcagggcctctttcgggtttccttggacagtgccatggttccagtgctctggtgtcacccaggacacagccactcggggccccgctgccccagctgatccccactcattccacacctcttctcatcctcagtgatgtgaaggtgggaaggaaaggagcttggcattgggagcccttcaagaaggtaccagaaggaaccctccagtcctgctctctggccacacctgtgcaggcagctgagaggcagcgtgcagccctactgtcccttactggggcagcagagggcttcggaggcagaagtgaggcctggggtttggggggaaaggtcagctcagtgctgttccaccttttagggaggatactgaggggaccaggatgggagaatgaggagtaaaatgctcacggcaaagtcagcagcactggtaagccaagactgagaaatacaaggttgcttgtctgacccca

SEQ ID NO: 442030 - DNA, 942 bp, Homo sapiens
gcccctcggtcccgcggcacacgcagctagccggagcccggaccaggcgcctgtgcctcctcctcgtccctcgccgcgtccgcgaagcctggagccggcgggagccccgcgctcgccatgtcgggcgagctcagcaacaggttccaaggagggaaggcgttcggcttgctcaaagcccggcaggagaggaggctggccgagatcaaccggaggatggggtgagggagcagtgccgaagagctatgagagggagccaagaggaaaggaagtcctcgacagagccaactaggaggagggcggcctcccaggctgccgaagaaggatccagcgtcagctaagtggaggcggggccgtgcccagtgcattgcaatgaggcctggagtgaggctgtggccaagccagcaagaccccataggccctgggactgccctctgcccaggtgcaggaggacacaggtcctggagtcagatagacccaggagtttctgtgtgaccagaagtacagtgatgaagagaaccttccagaaaagctcacagccttcaaagggggtgacctgcagaggccccacggtccgtttgacacactgctcccatctgaacataccaagcccactgctccgacatcctccctcactgctagaagttttcctggactccttgatcagggaagtataactcagtctgtgtgtgaggtttggggtgatggtctgtgtaccccgggaaactgtatgtccactttgtgggctagggcaggcctttttcctggtttcagaatcacaggtcccctgaatcagtggttcccacacccggttgcccatcagaactgcctgggacgctaaaaagcacacccatgcctgcccccaccctgtccttccacacccatgagccagaatcctggggcagggaatcagagctagtcactttgctactaactcagatgcag

SEQ ID NO: 442031 - DNA, 3414 bp, Homo sapiens
gcccctcggtcccgcggcacacgcagctagccggagcccggaccaggcgcctgtgcctcctcctcgtccctcgccgcgtccgcgaagcctggagccggcgggagccccgcgctcgccatgtcgggcgagctcagcaacaggttccaaggccgcctctttgtctcctccaggagggaaggcgttcggcttgctcaaagcccggcaggagaggaggctggccgagatcaaccgggagtttctgtgtgaccagaagtacagtgatgaagagaaccttccagaaaagctcacagccttcaaagagaagtacatggagtttgacctgaacaatgaaggcgagattgacctgatgtctttaaagaggatgatggagaagcttggtgtccccaagacccacctggagatgaagaagatgatctcagaggtgacaggaggggtcagtgacactatatcctaccgagactttgtgaacatgatgctggggaaacggtcggctgtcctcaagttagtcatgatgtttgaaggaaaagccaacgagagcagccccaagccagttggcccccctccagagagagacattgctagcctgccctgaggaccccgcctggactccccagccttcccaccccatacctccctcccgatcttgctgcccttcttgacacactgtgatctctctctctctcatttgtttggtcattgagggtttgtttgtgttttcatcaatgtctttgtaaagcacaaattatctgccttaaaggggctctgggtcggggaatcctgagccttgggtcccctccctctcttcttccctccttccccgctccctgtgcagaagggctgatatcaaaccaaaaactagagggggcagggccagggcagggaggcttccagcctgtgttcccctcacttggaggaaccagcactctccatcctttcagaaagtctccaagccaagttcaggctcactgacctggctctgacgaggaccccaggccactctgagaagaccttggagtagggacaaggctgcagggcctctttcgggtttccttggacagtgccatggttccagtgctctggtgtcacccaggacacagccactcggggccccgctgccccagctgatccccactcattccacacctcttctcatcctcagtgatgtgaaggtgggaaggaaaggagcttggcattgggagcccttcaagaaggtaccagaaggaaccctccagtcctgctctctggccacacctgtgcaggcagctgagaggcagcgtgcagccctactgtcccttactggggcagcagagggcttcggaggcagaagtgaggcctggggtttggggggaaaggtcagctcagtgctgttccaccttttagggaggatactgaggggaccaggatgggagaatgaggagtaaaatgctcacggcaaagtcagcagcactggtaagccaagactgagaaatacaaggttgcttgtctgaccccaatctgcttgaaacctgactctgcttctctcatttgtcttcctaccctactcacataattcactcattgactcactcattcaccagatatttattgacctgctattataagctttacatcctcccatgttgtcctggcatgtgcagtatacacggtctaactcatctctccccagatctctcagaaccttgagcttgggaattgaactggggtcacctgtgtcctttcttatggactcgcaggattttagaaccctaatgcaccctggagggtagctgggccagacttctcatttcacaggtgaggagactggtgccccacagggattaagtgccttgcccaaggtcaggcttatctccagagggaggtgccctggactggggcccagatgttcagggaccctgcctacacctcatttccagtgtgggctgccttagttagttatgagaacagggaagggctgggaagagacagcctccaaggtcaacacttggagagggtttcacttgctctgaagaccctggtccaggattcgccctctcccatgccttcaagtcagcatcaggcttagggcaaagaccaggcctctgaagctgcctcttgtaattcatgcaggaagatgtcaaagtcagccccatcttggctgatcagggtgttcagccttaaccccacctgtgttctgaagtctcttaccctacctgctcaggactgagacagttattcactgaacatatttattaagcacttgctgtaggccaacagttaagaatccaataatgaaatggacagattcatggaacttagagtccaataggaaagtgagacccagacaatgacaatgagataaatgttaggaagggggaggtatggggtgacttccctgcagtcctgggggcctagatgggcccaagactgggtgagagtcttggcagagcctttgcaacaccttaagtggacaggactgggaggtcttggtggttggagccaacgtgggttccctgcggctccttagtcacctctgatagcagattgagggaggaaaacaggtaaggcatgaggaaatggccaggttgggttaacccactggtttcaaccagttcaggaatgaggttatttggccatgactggctgatcttgagctcaaggatctgcttcaaatgcacacaggcctagttgaagtttaaaccccagcaaaacattcctccctgtaaatggaaaatcctacttctacccccaccctgccctgttttttgttttttttttccccaagatcattagatgtcctcacccctcctcactgcctctcctctctgggacaggctgggacctttgaggaagataaagccttccttgactacccatcatattcagtgtccctgttcctcactcagagaggaaggcagaaccagtcaggcttatttcagtaagttccacagttctacaagactgcaggaattctccttaagggaggagagcaagcaggtgtggccccagcttctggaaatggcagaagagagggttttctcattgaatgggggtgggggctcgtgtgtcctgggaaaccccatcagtcccttcatttcttgagactcaactcctgggaggagagggtctcaagagttgtccctggaaggagggcgggggcagtctgcatctatttcaggttgtggctcttggttctaggactcttacttctctggctaagggctcagcttcttgggacttcaaccatcttctttctgaaagaccaaatctaatgtaaccagtaacgtgaggactgccaagtatggctttgtccctatgactcagaggagggtttgtcgggcaaattcaggtggatgaagtatgtgtgtgcgtgtgcatgggagtgtgcgtggactgggatatcatctctacagcctgcaaataaaccagacaaactta

SEQ ID NO: 442032 - DNA, 3475 bp, Homo sapiens
gcccctcggtcccgcggcacacgcagctagccggagcccggaccaggcgcctgtgcctcctcctcgtccctcgccgcgtccgcgaagcctggagccggcgggagccccgcgctcgccatgtcgggcgagctcagcaacaggttccaaggagggaaggcgttcggcttgctcaaagcccggcaggagaggaggctggccgagatcaaccgggagtttctgtgtgaccagaagtacagtgatgaagagaaccttccagaaaagctcacagccttcaaagagaagtacatggagtttgacctgaacaatgaaggcgagattgacctgatgtctttaaagaggatgatggagaagcttggtgtccccaagacccacctggagatgaagaagatgatctcagaggtgacaggaggggtcagtgacactatatcctaccgagactttgtgaacatgatgctggggaaacggtcggctgtcctcaagttagtcatgatgtttgaaggaaaagccaacgagagcagccccaagccagttggcccccctccagagagagacattgctagcctgccctgaggaccccgcctggactccccagccttcccaccccatacctccctcccgatcttgctgcccttcttgacacactgtgatctctctctctctcatttgtttggtcattgagggtttgtttgtgttttcatcaatgtctttgtaaagcacaaattatctgccttaaaggggctctgggtcggggaatcctgagccttgggtcccctccctctcttcttccctccttccccgctccctgtgcagaagggctgatatcaaaccaaaaactagagggggcagggccagggcagggaggcttccagcctgtgttcccctcacttggaggaaccagcactctccatcctttcagaaagtctccaagccaagttcaggctcactgacctggctctgacgaggaccccaggccactctgagaagaccttggagtagggacaaggctgcagggcctctttcgggtttccttggacagtgccatggttccagtgctctggtgtcacccaggacacagccactcggggccccgctgccccagctgatccccactcattccacacctcttctcatcctcagtgatgtgaaggtgggaaggaaaggagcttggcattgggagcccttcaagaaggtaccagaaggaaccctccagtcctgctctctggccacacctgtgcaggcagctgagaggcagcgtgcagccctactgtcccttactggggcagcagagggcttcggaggcagaagtgaggcctggggtttggggggaaaggtcagctcagtgctgttccaccttttagggaggatactgaggggaccaggatgggagaatgaggagtaaaatgctcacggcaaagtcagcagcactggtaagccaagactgagaaatacaaggttgcttgtctgaccccaatctgcttgaaacctgactctgcttctctcatttgtcttcctaccctactcacataattcactcattgactcactcattcaccagatatttattgacctgctattataagctttacatcctcccatgttgtcctggcatgtgcagtatacacggtctaactcatctctccccagatctctcagaaccttgagcttgggaattgaactggggtcacctgtgtcctttcttatggactcgcaggattttagaaccctaatgcaccctggagggtagctgggccagacttctcatttcacaggtgaggagactggtgccccacagggattaagtgccttgcccaaggtcaggcttatctccagagggaggtgccctggactggggcccagatgttcagggaccctgcctacacctcatttccagtgtgggctgccttagttagttatgagaacagggaagggctgggaagagacagcctccaaggtcaacacttggagagggtttcacttgctctgaagaccctggtccaggattcgccctctcccatgccttcaagtcagcatcaggcttagggcaaagaccaggcctctgaagctgcctcttgtaattcatgcaggaagatgtcaaagtcagccccatcttggctgatcagggtgttcagccttaaccccacctgtgttctgaagtctcttaccctacctgctcaggactgagacagttattcactgaacatatttattaagcacttgctgtaggccaacagttaagaatccaataatgaaatggacagattcatggaacttagagtccaataggaaagtgagacccagacaatgacaatgagataaatgttaggaagggggaggtatggggtgacttccctgcagtcctgggggcctagatgggcccaagactgggtgagagtcttggcagagcctttgcaacaccttaagtggacaggactgggaggtcttggtggttggagccaacgtgggttccctgcggctccttagtcacctctgatagcagattgagggaggaaaacaggtaaggcatgaggaaatggccaggttgggttaacccactggtttcaaccagttcaggaatgaggttatttggccatgactggctgatcttgagctcaaggatctgcttcaaatgcacacaggcctagttgaagtttaaaccccagcaaaacattcctccctgtaaatggaaaatcctacttctacccccaccctgccctgttttttgttttttttttccccaagatcattagatgtcctcacccctcctcactgcctctcctctctgggacaggctgggacctttgaggaagataaagccttccttgactacccatcatattcagtgtccctgttcctcactcagagaggaaggcagaaccagtcaggcttatttcagtaagttccacagttctacaagactgcaggaattctccttaagggaggagagcaagcaggtgtggccccagcttctggaaatggcagaagagagggttttctcattgaatgggggtgggggctcgtgtgtcctgggaaaccccatcagtcccttcatttcttgagactcaactcctgggaggagagggtctcaagagttgtccctggaaggagggcgggggcagtctgcatctatttcaggttgtggctcttggttctaggactcttacttctctggctaagggctcagcttcttgggacttcaaccatcttctttctgaaagaccaaatctaatgtaaccagtaacgtgaggactgccaagtatggctttgtccctatgactcagaggagggtttgtcgggcaaattcaggtggatgaagtatgtgtgtgcgtgtgcatgggagtgtgcgtggactgggatatcatctctacagcctgcaaataaaccagacaaacttaaaaaaaaaaacacacaacaactacaacaaacacacaaatcccaacaacacacaccagcgcgcacaccaccaacaaaaaccacc

SEQ ID NO: 442033 - DNA, 4135 bp, Homo sapiens
gcccctcggtcccgcggcacacgcagctagccggagcccggaccaggcgcctgtgcctcctcctcgtccctcgccgcgtccgcgaagcctggagccggcgggagccccgcgctcgccatgtcgggcgagctcagcaacaggttccaaggagggaaggcgttcggcttgctcaaagcccggcaggagaggaggctggccgagatcaaccgggagtttctgtgtgaccagaagtacagtgatgaagagaaccttccagaaaagctcacagccttcaaagagaagtacatggagtttgacctgaacaatgaaggcgagattgacctgatgtctttaaagaggatgatggagaagcttggtgtccccaagacccacctggagatgaagaagatgatctcagaggtgacaggaggggtcagtgacactatatcctaccgagactttgtgaacatgatgctggggaaacggtcggctgtcctcaagttagtcatgatgtttgaaggaaaagccaacgagagcagccccaagccagttggcccccctccagagagagacattgctagcctgccctgaggaccccgcctggactccccagccttcccaccccatacctccctcccgatcttgctgcccttcttgacacactgtgatctctctctctctcatttgtttggtcattgagggtttgtttgtgttttcatcaatgtctttgtaaagcacaaattatctgccttaaaggggctctgggtcggggaatcctgagccttgggtcccctccctctcttcttccctccttccccgctccctgtgcagaagggctgatatcaaaccaaaaactagagggggcagggccagggcagggaggcttccagcctgtgttcccctcacttggaggaaccagcactctccatcctttcagaaagtctccaagccaagttcaggctcactgacctggctctgacgaggaccccaggccactctgagaagaccttggagtagggacaaggctgcagggcctctttcgggtttccttggacagtgccatggttccagtgctctggtgtcacccaggacacagccactcggggccccgctgccccagctgatccccactcattccacacctcttctcatcctcagtgatgtgaaggtgggaaggaaaggagcttggcattgggagcccttcaagaaggtaccagaaggaaccctccagtcctgctctctggccacacctgtgcaggcagctgagaggcagcgtgcagccctactgtcccttactggggcagcagagggcttcggaggcagaagtgaggcctggggtttggggggaaaggtcagctcagtgctgttccaccttttagggaggatactgaggggaccaggatgggagaatgaggagtaaaatgctcacggcaaagtcagcagcactggtaagccaagactgagaaatacaaggttgcttgtctgaccccaatctgcttgaaacctgactctgcttctctcatttgtcttcctaccctactcacataattcactcattgactcactcattcaccagatatttattgacctgctattataagctttacatcctcccatgttgtcctggcatgtgcagtatacacggtctaactcatctctccccagatctctcagaaccttgagcttgggaattgaactggggtcacctgtgtcctttcttatggactcgcaggattttagaaccctaatgcaccctggagggtagctgggccagacttctcatttcacaggtgaggagactggtgccccacagggattaagtgccttgcccaaggtcaggcttatctccagagggaggtgccctggactggggcccagatgttcagggaccctgcctacacctcatttccagtgtgggctgccttagttagttatgagaacagggaagggctgggaagagacagcctccaaggtcaacacttggagagggtttcacttgctctgaagaccctggtccaggattcgccctctcccatgccttcaagtcagcatcaggcttagggcaaagaccaggcctctgaagctgcctcttgtaattcatgcaggaagatgtcaaagtcagccccatcttggctgatcagggtgttcagccttaaccccacctgtgttctgaagtctcttaccctacctgctcaggactgagacagttattcactgaacatatttattaagcacttgctgtaggccaacagttaagaatccaataatgaaatggacagattcatggaacttagagtccaataggaaagtgagacccagacaatgacaatgagataaatgttaggaagggggaggtatggggtgacttccctgcagtcctgggggcctagatgggcccaagactgggtgagagtcttggcagagcctttgcaacaccttaagtggacaggactgggaggtcttggtggttggagccaacgtgggttccctgcggctccttagtcacctctgatagcagattgagggaggaaaacaggtaaggcatgaggaaatggccaggttgggttaacccactggtttcaaccagttcaggaatgaggttatttggccatgactggctgatcttgagctcaaggatctgcttcaaatgcacacaggcctagttgaagtttaaaccccagcaaaacattcctccctgtaaatggaaaatcctacttctacccccaccctgccctgttttttgttttttttttccccaagatcattagatgtcctcacccctcctcactgcctctcctctctgggacaggctgggacctttgaggaagataaagccttccttgactacccatcatattcagtgtccctgttcctcactcagagaggaaggcagaaccagtcaggcttatttcagtaagttccacagttctacaagactgcaggaattctccttaagggaggagagcaagcaggtgtggccccagcttctggaaatggcagaagagagggttttctcattgaatgggggtgggggctcgtgtgtcctgggaaaccccatcagtcccttcatttcttgagactcaactcctgggaggagagggtctcaagagttgtccctggaaggagggcgggggcagtctgcatctatttcaggttgtggctcttggttctaggactcttacttctctggctaagggctcagcttcttgggacttcaaccatcttctttctgaaagaccaaatctaatgtaaccagtaacgtgaggactgccaagtatggctttgtccctatgactcagaggagggtttgtcgggcaaattcaggtggatgaagtatgtgtgtgcgtgtgcatgggagtgtgcgtggactgggatatcatctctacagcctgcaaataaaccagacaaacttactaaaaaaaaaaaaaaaaaaaaaaaaaaaaaaaaaaaaaaaaaaaaaaaaaaaaaaaaaaaaaaaaaaaaaaaaaaaaaaaaaaagaagggggggcgcgcgccccaagaatatctatctccccgcgggggggcccccaccgcggcgcccccccgtttttgtggaaaagagggggccccccataggggggggcttttaaagggggggcgggggcgcgtcgtttataaccaacgcgcgtggggcgcggggaacaaaccgtggtggtacggtgtagggctcttctggtaggtgggagcgcccccctccttcctgctggggggggggagacaactatggtgggcgcgcccacacctcactccgcggagtagtttcaagcccgccgcgcggaggaatatcattcaaaacctcttgcgggggtgtatatggcgtggtgacacccccccgcgatatcttatctccggggcggatcaaaaaaagattttgggcgccccaccgggtactattgtgtcttctcagcgaacaacttctttttccccccgcggccgtccgtgctattaataaatcccggtctacgcaagtcgactataccactactatcggcaacgagacaacatacgacgaacagcactcactcgctaggtgcaataaattgacataagtctcagtcaccagctacagagagtaagcgctagcaacacgccacaaccaaaccagctatgtcaacaaatcaatcgagcacacgca

SEQ ID NO: 442034 - DNA, 2604 bp, Homo sapiens
cgagtgaagtaatacaggcggaccggtttattcatccggggctgggttacttgagttactggcctggtcgtacaattccagcctgtgttcccctcacttggaggaaccagcactctccatcctttcagaaagtctccaagccaagttcaggctcactgacctggctctgacgaggaccccaggccactctgagaagaccttggagtagggacaaggctgcagggcctctttcgggtttccttggacagtgccatggttccagtgctctggtgtcacccaggacacagccactcggggccccgctgccccagctgatccccactcattccacacctcttctcatcctcagtgatgtgaaggtgggaaggaaaggagcttggcattgggagcccttcaagaaggtaccagaaggaaccctccagtcctgctctctggccacacctgtgcaggcagctgagaggcagcgtgcagccctactgtcccttactggggcagcagagggcttcggaggcagaagtgaggcctggggtttggggggaaaggtcagctcagtgctgttccaccttttagggaggatactgaggggaccaggatgggagaatgaggagtaaaatgctcacggcaaagtcagcagcactggtaagccaagactgagaaatacaaggttgcttgtctgaccccaatctgcttgaaacctgactctgcttctctcatttgtcttcctaccctactcacataattcactcattgactcactcattcaccagatatttattgacctgctattataagctttacatcctcccatgttgtcctggcatgtgcagtatacacggtctaactcatctctccccagatctctcagaaccttgagcttgggaattgaactggggtcacctgtgtcctttcttatggactcgcaggattttagaaccctaatgcaccctggagggtagctgggccagacttctcatttcacaggtgaggagactggtgccccacagggattaagtgccttgcccaaggtcaggcttatctccagagggaggtgccctggactggggcccagatgttcagggaccctgcctacacctcatttccagtgtgggctgccttagttagttatgagaacagggaagggctgggaagagacagcctccaaggtcaacacttggagagggtttcacttgctctgaagaccctggtccaggattcgccctctcccatgccttcaagtcagcatcaggcttagggcaaagaccaggcctctgaagctgcctcttgtaattcatgcaggaagatgtcaaagtcagccccatcttggctgatcagggtgttcagccttaaccccacctgtgttctgaagtctcttaccctacctgctcaggactgagacagttattcactgaacatatttattaagcacttgctgtaggccaacagttaagaatccaataatgaaatggacagattcatggaacttagagtccaataggaaagtgagacccagacaatgacaatgagataaatgttaggaagggggaggtatggggtgacttccctgcagtcctgggggcctagatgggcccaagactgggtgagagtcttggcagagcctttgcaacaccttaagtggacaggactgggaggtcttggtggttggagccaacgtgggttccctgcggctccttagtcacctctgatagcagattgagggaggaaaacaggtaaggcatgaggaaatggccaggttgggttaacccactggtttcaaccagttcaggaatgaggttatttggccatgactggctgatcttgagctcaaggatctgcttcaaatgcacacaggcctagttgaagtttaaaccccagcaaaacattcctccctgtaaatggaaaatcctacttctacccccaccctgccctgttttttgttttttttttccccaagatcattagatgtcctcacccctcctcactgcctctcctctctgggacaggctgggacctttgaggaagataaagccttccttgactacccatcatattcagtgtccctgttcctcactcagagaggaaggcagaaccagtcaggcttatttcagtaagttccacagttctacaagactgcaggaattctccttaagggaggagagcaagcaggtgtggccccagcttctggaaatggcagaagagagggttttctcattgaatgggggtgggggctcgtgtgtcctgggaaaccccatcagtcccttcatttcttgagactcaactcctgggaggagagggtctcaagagttgtccctggaaggagggcgggggcagtctgcatctatttcaggttgtggctcttggttctaggactcttacttctctggctaagggctcagcttcttgggacttcaaccatcttctttctgaaagaccaaatctaatgtaaccagtaacgtgaggactgccaagtatggctttgtccctatgactcagaggagggtttgtcgggcaaattcaggtggatgaagtatgtgtgtgcgtgtgcatgggagtgtgcgtggactgggatatcatctctacagcctgcaaataaaccagacaaactta

SEQ ID NO: 442035 - DNA, 2203 bp, Homo sapiens
  misc_feature (15)..(15): n is a, c, g, or t
  misc_feature (32)..(32): n is a, c, g, or t
  misc_feature (87)..(87): n is a, c, g, or t
ccccccccccccccnggtgttttttaaaaagncccctttttggggttttccccccccctttttttaaacctttgggggggggggggncccaagcagaagggcttcggaggcagaagtgaggcctggggtttggggggaaaggtcagctcagtgctgttccaccttttagggaggatactgaggggaccaggatgggagaatgaggagtaaaatgctcacggcaaagtcagcagcactggtaagccaagactgagaaatacaaggttgcttgtctgaccccaatctgcttgaaacctgactctgcttctctcatttgtcttcctaccctactcacataattcactcattgactcactcattcaccagatatttattgacctgctattataagctttacatcctcccatgttgtcctggcatgtgcagtatacacggtctaactcatctctccccagatctctcagaaccttgagcttgggaattgaactggggtcacctgtgtcctttcttatggactcgcaggattttagaaccctaatgcaccctggagggtagctgggccagacttctcatttcacaggtgaggagactggtgccccacagggattaagtgccttgcccaaggtcaggcttatctccagagggaggtgccctggactggggcccagatgttcagggaccctgcctacacctcatttccagtgtgggctgccttagttagttatgagaacagggaagggctgggaagagacagcctccaaggtcaacacttggagagggtttcacttgctctgaagaccctggtccaggattcgccctctcccatgccttcaagtcagcatcaggcttagggcaaagaccaggcctctgaagctgcctcttgtaattcatgcaggaagatgtcaaagtcagccccatcttggctgatcagggtgttcagccttaaccccacctgtgttctgaagtctcttaccctacctgctcaggactgagacagttattcactgaacatatttattaagcacttgctgtaggccaacagttaagaatccaataatgaaatggacagattcatggaacttagagtccaataggaaagtgagacccagacaatgacaatgagataaatgttaggaagggggaggtatggggtgacttccctgcagtcctgggggcctagatgggcccaagactgggtgagagtcttggcagagcctttgcaacaccttaagtggacaggactgggaggtcttggtggttggagccaacgtgggttccctgcggctccttagtcacctctgatagcagattgagggaggaaaacaggtaaggcatgaggaaatggccaggttgggttaacccactggtttcaaccagttcaggaatgaggttatttggccatgactggctgatcttgagctcaaggatctgcttcaaatgcacacaggcctagttgaagtttaaaccccagcaaaacattcctccctgtaaatggaaaatcctacttctacccccaccctgccctgttttttgttttttttttccccaagatcattagatgtcctcacccctcctcactgcctctcctctctgggacaggctgggacctttgaggaagataaagccttccttgactacccatcatattcagtgtccctgttcctcactcagagaggaaggcagaaccagtcaggcttatttcagtaagttccacagttctacaagactgcaggaattctccttaagggaggagagcaagcaggtgtggccccagcttctggaaatggcagaagagagggttttctcattgaatgggggtgggggctcgtgtgtcctgggaaaccccatcagtcccttcatttcttgagactcaactcctgggaggagagggtctcaagagttgtccctggaaggagggcgggggcagtctgcatctatttcaggttgtggctcttggttctaggactcttacttctctggctaagggctcagcttcttgggacttcaaccatcttctttctgaaagaccaaatctaatgtaaccagtaacgtgaggactgccaagtatggctttgtccctatgactcagaggagggtttgtcgggcaaattcaggtggatgaagtatgtgtgtgcgtgtgcatgggagtgtgcgtggactgggatatcatctctacagcctgcaaataaaccagacaaactta

SEQ ID NO: 442036 - DNA, 2757 bp, Homo sapiens
gcccctcggtcccgcggcacacgcagctagccggagcccggaccaggcgcctgtgcctcctcctcgtccctcgccgcgtccgcgaagcctggagccggcgggagccccgcgctcgccatgtcgggcgagctcagcaacaggttccaaggagggaaggcgttcggcttgctcaaagcccggcaggagaggaggctggccgagatcaaccgggagtttctgtgtgaccagaagtacagtgatgaagagaaccttccagaaaagctcacagccttcaaagagaagtacatggagtttgacctgaacaatgaaggcgagattgacctgatgtctttaaagaggatgatggagaagcttggtgtccccaagacccacctggagatgaagaagatgatctcagaggtgacaggaggggtcagtgacactatatcctaccgagactttgtgaacatgatgctggggaaacggtcggctgtcctcaagttagtcatgatgtttgaaggaaaagccaacgagagcagccccaagccagttggcccccctccagagagagacattgctagcctgccctgaggaccccgcctggactccccagccttcccaccccatacctccctcccgatcttgctgcccttcttgacacactgtgatctctctctctctcatttgtttggtcattgagggtttgtttgtgttttcatcaatgtctttgtaaagcacaaattatctgccttaaaggggctctgggtcggggaatcctgagccttgggtcccctccctctcttcttccctccttccccgctccctgtgcagaagggctgatatcaaaccaaaaactagagggggcagggccagggcagggaggcttccagcctgtgttcccctcacttggaggaaccagcactctccatcctttcagaaagtctccaagccaagttcaggctcactgacctggctctgacgaggaccccaggccactctgagaagaccttggagtagggacaaggctgcagggcctctttcgggtttccttggacagtgccatggttccagtgctctggtgtcacccaggacacagccactcggggccccgctgccccagctgatccccactcattccacacctcttctcatcctcagtgatgtgaaggtgggaaggaaaggagcttggcattgggagcccttcaagaaggtaccagaaggaaccctccagtcctgctctctggccacacctgtgcaggcagctgagaggcagcgtgcagccctactgtcccttactggggcagcagagggcttcggaggcagaagtgaggcctggggtttggggggaaaggtcagctcagtgctgttccaccttttagggaggatactgaggggaccaggatgggagaatgaggagtaaaatgctcacggcaaagtcagcagcactggtaagccaagactgagaaatacaaggttgcttgtctgaccccaatctgcttgaaacctgactctgcttctctcatttgtcttcctaccctactcacataattcactcattgactcactcattcaccagatatttattgacctgctattataagctttacatcctcccatgttgtcctggcatgtgcagtatacacggtctaactcatctctccccagatctctcagaaccttgagcttgggaattgaactggggtcacctgtgtcctttcttatggactcgcaggattttagaaccctaatgcaccctggagggtagctgggccagacttctcatttcacaggtgaggagactggtgccccacagggattaagtgccttgcccaaggtcaggcttatctccagagggaggtgccctggactggggcccagatgttcagggaccctgcctacacctcatttccagtgtgggctgccttagttagttatgagaacagggaagggctgggaagagacagcctccaaggtcaacacttggagagggtttcacttgctctgaagaccctggtccaggattcgccctctcccatgccttcaagtcagcatcaggcttagggcaaagaccaggcctctgaagctgcctcttgtaattcatgcaggaagatgtcaaagtcagccccatcttggctgatcagggtgttcagccttaaccccacctgtgttctgaagtctcttaccctacctgctcaggactgagacagttattcactgaacatatttattaagcacttgctgtaggccaacagttaagaatccaataatgaaatggacagattcatggaacttagagtccaataggaaagtgagacccagacaatgacaatgagataaatgttaggaagggggaggtatggggtgacttccctgcagtcctgggggcctagatgggcccaagactgggtgagagtcttggcagagcctttgcaacaccttaagtggacaggactgggaggtcttggtggttggagccaacgtgggttccctgcggctccttagtcacctctgatagcagattgagggaggaaaacaggtaaggcatgaggaaatggccaggttgggttaacccactggtttcaaccatcttctttctgaaagaccaaatctaatgtaaccagtaacgtgaggactgccaagtatggctttgtccctatgactcagaggagggtttgtcgggcaaattcaggtggatgaagtatgtgtgtgcgtgtgcatgggagtgtgcgtggactgggatatcatctctacagcctgcaaataaaccagacaaactta

SEQ ID NO: 442037 - DNA, 1139 bp, Homo sapiens
gcccctcggtcccgcggcacacgcagctagccggagcccggaccaggcgcctgtgcctcctcctcgtccctcgccgcgtccgcgaagcctggagccggcgggagccccgcgctcgccatgtcgggcgagctcagcaacaggttccaaggagggaaggcgttcggcttgctcaaagcccggcaggagaggaggctggccgagatcaaccgggagtttctgtgtgaccagaagtacagtgatgaagagaaccttccagaaaagctcacagccttcaaagagaagtacatggagtttgacctgaacaatgaaggcgagattgacctgatgtctttaaagaggatgatggagaagcttggtgtccccaagacccacctggagatgaagaagatgatctcagaggtgacaggaggggtcagtgacactatatcctaccgagactttgtgaacatgatgctggggaaacggtcggctgtcctcaagttagtcatgatgtttgaaggaaaagccaacgagagcagccccaagccagttggcccccctccagagagagacattgctagcctgccctgaggaccccgcctggactccccagccttcccaccccatacctccctcccgatcttgctgcccttcttgacacactgtgatctctctctctctcatttgtttggtcattgagggtttgtttgtgttttcatcaatgtctttgtaaagcacaaattatctgccttaaaggggctctgggtcggggaatcctgagccttgggtcccctccctctcttcttccctccttcatttcttgagactcaactcctgggaggagagggtctcaagagttgtccctggaaggagggcgggggcagtctgcatctatttcaggttgtggctcttggttctaggactcttacttctctggctaagggctcagcttcttgggacttcaaccatcttctttctgaaagaccaaatctaatgtaaccagtaacgtgaggactgccaagtatggctttgtccctatgactcagaggagggtttgtcgggcaaattcaggtggatgaagtatgtgtgtgcgtgtgcatgggagtgtgcgtggactgggatatcatctctacagcctgcaaataaaccagacaaactta

SEQ ID NO: 442038 - DNA, 167 bp, Homo sapiens
cagtgacactatatcctaccgagactttgtgaacatgatgctggggaaacggtcggctgtcctcaagttgtgagtacctccttcctcccttgggatctctgaaggcaaaatcattctgtgcagagaggcccctggctctgggcaccccagccattccccacctagta

SEQ ID NO: 442039 - DNA, 787 bp, Homo sapiens
gagtttctgtgtgaccagaagtacagtgatgaagagaaccttccagaaaagctcacagccttcaaaggtaagctggggcgggctgccctgcatttattcctgggggaggtgggctggcccctcatccttgcacacaggacccctcagccccacaggactaggctgtggccctgttttgtccagaatgcccttcttcctggagaaggcttggagacagggaccccctgagaggtggggagaggcccctccacctgcctccctgcccctgcgggccccgtcacccctcgcctgcagcccggtcctggccctgcccctctctctcccctcactgcccacggggctcaggctggttcccgtccgccgctgcccaggccccgtcactcccgggccccgcacacaatcagctctttgtgagcaagccttgcctctccccctccccagcagagcgtctcaggagcccctgcggagaatggacgtttgtgtcaccgcagtggggcaggggggcagagtttctgcccattgaaacccggcagcacgggatgaaaagaaagcagggcctgggagccggcgcggggagaggggcagcataaaggtccctctgtttggggccctggcgcttggttcccagccagcacctcgaaaggagaggagccgggcacatagggggcagcgcagacccaccttccctgccaggggaggcacttaggcgcaggagccctgggctgtcatggaaaatatcctggaggttgcattcccctccaaagtgtttgcagtgtgagcatcctcc

SEQ ID NO: 442040 - DNA, 496 bp, Homo sapiens
ggttttctcattgaatgggggtgggggctcgtgtgtcctgggaaaccccatcagtcccttcatttcttgagactcaactcctgggaggagagggtctcaagagttgtccctggaaggagggcgggggcagtctgcatctatttcaggttgtggctcttggttctaggactcttacttctctggctaagggctcagcttcttgggacttcaaccatcttctttctgaaagaccaaatctaatgtaaccagtaacgtgaggactgccaagtatggctttgtccctatgactcagaggagggtttgtcgggcaaattcaggtggatgaagtatgtgtgtgcgtgtgcatgggagtgtgcgtggactgggatatcatctctacagcctgcaaataaaccagacaaacttaaccaacgtcttgattggtgtattttggggctggttctgggctcagcaaattgcgaactagctaatatagtaagagattaaatgagcatgt

SEQ ID NO: 442041 - DNA, 679 bp, Homo sapiens
gcccctcggtcccgcggcacacgcagctagccggagcccggaccaggcgcctgtgcctcctcctcgtccctcgccgcgtccgcgaagcctggagccggcgggagccccgcgctcgccatgtcgggcgagctcagcaacaggttccaaggagggaaggcgttcggcttgctcaaagcccggcaggagaggaggctggccgagatcaaccgggagtttctgtgtgaccagaagtacagtgatgaagagaaccttccagaaaagctcacagccttcaaagagaagtacatggagtttgacctgaacaatgaaggcgagattgacctgatgtctttaaagaggatgatggagaagcttggttctaggactcttacttctctggctaagggctcagcttcttgggacttcaaccatcttctttctgaaagaccaaatctaatgtaaccagtaacgtgaggactgccaagtatggctttgtccctatgactcagaggagggtttgtcgggcaaattcaggtggatgaagtatgtgtgtgcgtgtgcatgggagtgtgcgtggactgggatatcatctctacagcctgcaaataaaccagacaaacttattttttttatgaggccacctcttctggcttttgttttgtttccccgggggggggcccggtcccaataagcctttgtg

SEQ ID NO: 442042 - DNA, 731 bp, Homo sapiens
tggttttcttggactgcttggatgtaggcagcctgtctgttttccatccgctggctacaggactcccattcggtccccagctacagggctctggggacctcagggttccccctccaggagtttctgtgtgaccagaagtacagtgatgaagagaaccttccagaaaagctcacagccttcaaagagaagtacatggagtttgacctgaacaatgaaggcgagattgacctgatgtctttaaagaggatgatggagaagcttggtgtccccaagacccacctggagatgaagaagatgatctcagaggtgacaggagtcatgatgtttgaaggaaaagccaacgagagcagccccaagccagttggcccccctccagagagagacattgctagcctgccctgaggaccccgcctggactccccaagacataacacaacacataaagctcccatcccacgatcataggctgcccttggctgggaacgccactgtgaagttcctgctcctcatcaactcaggtgggagagggacataggaagggctgcgagcgggtagacgacacaaatgacatagagcagaagaaacaaaatgaatactgacagtgaaaggggcgcacctgggacagaggaacagcactggacaccaggcgaccacaacaaactatacgacaggaacaacagtacaagaaacaagagcagcaagggaaggaagcaagcaacacaacgaagggg

SEQ ID NO: 442043 - DNA, 3317 bp, Homo sapiens
gcccctcggtcccgcggcacacgcagctagccggagcccggaccaggcgcctgtgcctcctcctcgtccctcgccgcgtccgcgaagcctggagccggcgggagccccgcgctcgccatgtcgggcgagctcagcaacaggttccaaggagggaaggcgttcggcttgctcaaagcccggcaggagaggaggctggccgagatcaaccgggagtttctgtgtgaccagaagtacagtgatgaagagaaccttccagaaaagctcacagccttcaaagagaagtacatggagtttgacctgaacaatgaaggcgagattgacctgatgtctttaaagaggatgatggagaagcttggtgtccccaagacccacctggagatgaagaagatgatctcagaggtgacaggagtcatgatgtttgaaggaaaagccaacgagagcagccccaagccagttggcccccctccagagagagacattgctagcctgccctgaggaccccgcctggactccccagccttcccaccccatacctccctcccgatcttgctgcccttcttgacacactgtgatctctctctctctcatttgtttggtcattgagggtttgtttgtgttttcatcaatgtctttgtaaagcacaaattatctgccttaaaggggctctgggtcggggaatcctgagccttgggtcccctccctctcttcttccctccttccccgctccctgtgcagaagggctgatatcaaaccaaaaactagagggggcagggccagggcagggaggcttccagcctgtgttcccctcacttggaggaaccagcactctccatcctttcagaaagtctccaagccaagttcaggctcactgacctggctctgacgaggaccccaggccactctgagaagaccttggagtagggacaaggctgcagggcctctttcgggtttccttggacagtgccatggttccagtgctctggtgtcacccaggacacagccactcggggccccgctgccccagctgatccccactcattccacacctcttctcatcctcagtgatgtgaaggtgggaaggaaaggagcttggcattgggagcccttcaagaaggtaccagaaggaaccctccagtcctgctctctggccacacctgtgcaggcagctgagaggcagcgtgcagccctactgtcccttactggggcagcagagggcttcggaggcagaagtgaggcctggggtttggggggaaaggtcagctcagtgctgttccaccttttagggaggatactgaggggaccaggatgggagaatgaggagtaaaatgctcacggcaaagtcagcagcactggtaagccaagactgagaaatacaaggttgcttgtctgaccccaatctgcttgaaacctgactctgcttctctcatttgtcttcctaccctactcacataattcactcattgactcactcattcaccagatatttattgacctgctattataagctttacatcctcccatgttgtcctggcatgtgcagtatacacggtctaactcatctctccccagatctctcagaaccttgagcttgggaattgaactggggtcacctgtgtcctttcttatggactcgcaggattttagaaccctaatgcaccctggagggtagctgggccagacttctcatttcacaggtgaggagactggtgccccacagggattaagtgccttgcccaaggtcaggcttatctccagagggaggtgccctggactggggcccagatgttcagggaccctgcctacacctcatttccagtgtgggctgccttagttagttatgagaacagggaagggctgggaagagacagcctccaaggtcaacacttggagagggtttcacttgctctgaagaccctggtccaggattcgccctctcccatgccttcaagtcagcatcaggcttagggcaaagaccaggcctctgaagctgcctcttgtaattcatgcaggaagatgtcaaagtcagccccatcttggctgatcagggtgttcagccttaaccccacctgtgttctgaagtctcttaccctacctgctcaggactgagacagttattcactgaacatatttattaagcacttgctgtaggccaacagttaagaatccaataatgaaatggacagattcatggaacttagagtccaataggaaagtgagacccagacaatgacaatgagataaatgttaggaagggggaggtatggggtgacttccctgcagtcctgggggcctagatgggcccaagactgggtgagagtcttggcagagcctttgcaacaccttaagtggacaggactgggaggtcttggtggttggagccaacgtgggttccctgcggctccttagtcacctctgatagcagattgagggaggaaaacaggtaaggcatgaggaaatggccaggttgggttaacccactggtttcaaccagttcaggaatgaggttatttggccatgactggctgatcttgagctcaaggatctgcttcaaatgcacacaggcctagttgaagtttaaaccccagcaaaacattcctccctgtaaatggaaaatcctacttctacccccaccctgccctgttttttgttttttttttccccaagatcattagatgtcctcacccctcctcactgcctctcctctctgggacaggctgggacctttgaggaagataaagccttccttgactacccatcatattcagtgtccctgttcctcactcagagaggaaggcagaaccagtcaggcttatttcagtaagttccacagttctacaagactgcaggaattctccttaagggaggagagcaagcaggtgtggccccagcttctggaaatggcagaagagagggttttctcattgaatgggggtgggggctcgtgtgtcctgggaaaccccatcagtcccttcatttcttgagactcaactcctgggaggagagggtctcaagagttgtccctggaaggagggcgggggcagtctgcatctatttcaggttgtggctcttggttctaggactcttacttctctggctaagggctcagcttcttgggacttcaaccatcttctttctgaaagaccaaatctaatgtaaccagtaacgtgaggactgccaagtatggctttgtccctatgactcagaggagggtttgtcgggcaaattcaggtggatgaagtatgtgtgtgcgtgtgcatgggagtgtgcgtggactgggatatcatctctacagcctgcaaataaaccagacaaactta

SEQ ID NO: 442044 - DNA, 2441 bp, Homo sapiens
gcccctcggtcccgcggcacacgcagctagccggagcccggaccaggcgcctgtgcctcctcctcgtccctcgccgcgtccgcgaagcctggagccggcgggagccccgcgctcgccatgtcgggcgagctcagcaacaggttccaaggagggaaggcgttcggcttgctcaaagcccggcaggagaggaggctggccgagatcaaccgggagtttctgtgtgaccagaagtacagtgatgaagagaaccttccagaaaagctcacagccttcaaagagaagtacatggagtttgacctgaacaatgaaggcgagattgacctgatgtctttaaagaggatgatggagaagcttggtgtccccaagacccacctggagatgaagaagatgatctcagaggtgacaggggaggatactgaggggaccaggatgggagaatgaggagtaaaatgctcacggcaaagtcagcagcactggtaagccaagactgagaaatacaaggttgcttgtctgaccccaatctgcttgaaacctgactctgcttctctcatttgtcttcctaccctactcacataattcactcattgactcactcattcaccagatatttattgacctgctattataagctttacatcctcccatgttgtcctggcatgtgcagtatacacggtctaactcatctctccccagatctctcagaaccttgagcttgggaattgaactggggtcacctgtgtcctttcttatggactcgcaggattttagaaccctaatgcaccctggagggtagctgggccagacttctcatttcacaggtgaggagactggtgccccacagggattaagtgccttgcccaaggtcaggcttatctccagagggaggtgccctggactggggcccagatgttcagggaccctgcctacacctcatttccagtgtgggctgccttagttagttatgagaacagggaagggctgggaagagacagcctccaaggtcaacacttggagagggtttcacttgctctgaagaccctggtccaggattcgccctctcccatgccttcaagtcagcatcaggcttagggcaaagaccaggcctctgaagctgcctcttgtaattcatgcaggaagatgtcaaagtcagccccatcttggctgatcagggtgttcagccttaaccccacctgtgttctgaagtctcttaccctacctgctcaggactgagacagttattcactgaacatatttattaagcacttgctgtaggccaacagttaagaatccaataatgaaatggacagattcatggaacttagagtccaataggaaagtgagacccagacaatgacaatgagataaatgttaggaagggggaggtatggggtgacttccctgcagtcctgggggcctagatgggcccaagactgggtgagagtcttggcagagcctttgcaacaccttaagtggacaggactgggaggtcttggtggttggagccaacgtgggttccctgcggctccttagtcacctctgatagcagattgagggaggaaaacaggtaaggcatgaggaaatggccaggttgggttaacccactggtttcaaccagttcaggaatgaggttatttggccatgactggctgatcttgagctcaaggatctgcttcaaatgcacacaggcctagttgaagtttaaaccccagcaaaacattcctccctgtaaatggaaaatcctacttctacccccaccctgccctgttttttgttttttttttccccaagatcattagatgtcctcacccctcctcactgcctctcctctctgggacaggctgggacctttgaggaagataaagccttccttgactacccatcatattcagtgtccctgttcctcactcagagaggaaggcagaaccagtcaggcttatttcagtaagttccacagttctacaagactgcaggaattctccttaagggaggagagcaagcaggtgtggccccagcttctggaaatggcagaagagagggttttctcattgaatgggggtgggggctcgtgtgtcctgggaaaccccatcagtcccttcatttcttgagactcaactcctgggaggagagggtctcaagagttgtccctggaaggagggcgggggcagtctgcatctatttcaggttgtggctcttggttctaggactcttacttctctggctaagggctcagcttcttgggacttcaaccatcttctttctgaaagaccaaatctaatgtaaccagtaacgtgaggactgccaagtatggctttgtccctatgactcagaggagggtttgtcgggcaaattcaggtggatgaagtatgtgtgtgcgtgtgcatgggagtgtgcgtggactgggatatcatctctacagcctgcaaataaaccagacaaactta

SEQ ID NO: 442045 - DNA, 1715 bp, Homo sapiens
gcccctcggtcccgcggcacacgcagctagccggagcccggaccaggcgcctgtgcctcctcctcgtccctcgccgcgtccgcgaagcctggagccggcgggagccccgcgctcgccatgtcgggcgagctcagcaacaggttccaaggagggaaggcgttcggcttgctcaaagcccggcaggagaggaggctggccgagatcaaccgggagtttctgtgtgaccagaagtacagtgatgaagagaaccttccagaaaagctcacagccttcaaagagaagtacatggagtttgacctgaacaatgaaggcgagattgacctgatgtctttaaagaggatgatggagaagcttggtgtccccaagacccacctggagatgaagaagatgatctcagaggtgacaggaggggtcagtgacactatatcctaccgagactttgtgaacatgatgctggggaaacggtcggctgtcctcaagttagtcatgatgtttgaaggaaaagccaacgagagcagccccaagccagttggcccccctccagagagagacattgctagcctgccctgaggaccccgcctggactccccagccttcccaccccatacctccctcccgatcttgctgcccttcttgacacactgtgatctctctctctctcatttgtttggtcattgagggtttgtttgtgttttcatcaatgtctttgtaaagcacaaattatctgccttaaaggggctctgggtcggggaatcctgagccttgggtcccctccctctcttcttccctccttccccgctccctgtgcagaagggctgatatcaaaccaaaaactagagggggcagggccagggcagggaggcttccagcctgtgttcccctcacttggaggaaccagcactctccatcctttcagaaagtctccaagccaagttcaggctcactgacctggctctgacgaggaccccaggccactctgagaagaccttggagtagggacaaggctgcagggcctctttcgggtttccttggacagtgccatggttccagtgctctggtgtcacccaggacacagccactcggggccccgctgccccagctgatccccactcattccacacctcttctcatcctcagtgatgtgaaggtgggaaggaaaggagcttggcattgggagcccttcaagaaggtaccagaaggaaccctccagtcctgctctctggccacacctgtgcaggcagctgagaggcagcgtgcagccctactgtcccttactggggcagcagagggcttcggaggcagaagtgaggcctggggtttggggggaaaggtcagctcagtgctgttccaccttttagggaggatactgaggggaccaggatgggagaatgaggagtaaaatgctcacggcaaagtcagcagcactggtaagccaagactgagaaatacaaggttgcttgtctgaccccaatctgcttgaaacctgactctgcttctctcatttgtcttcctaccctactcacataattcactcattgactcactcattcaccagatatttattgacctgctattataagcttttacaggtcctcaaaacaaccataacacccacacaagacacaaaaccacaacacacaaaccacaaccaactacacaatatcaaacataaacaccatcacagaaataaagaaagccccccaattaaacacccg

SEQ ID NO: 442046 - DNA, 647 bp, Homo sapiens
ctgggataagggggaagaggaagattatatcttgtgttttgggcatgtcacactagaaatagttcctttaaggtgatgatttttccctccaacagattaatgctgaactgttgtttcggccaactgctctttcaactccaagcttttcttctcctaaggaaagtgttccaagaagacatctttcagaaggaacaaattcttatgcgacaagacttctaaataatcatcaagttccacctcagtctgaacctgagagcaacaggtcagtggctaagattggttttccatttggggaatattaaacagagcttttacttgacacttctgtgacagtgatgcaattcgggatcattgtaggttccattgtgaattgtaggttccatgaatgtgaaaatcttcaggacaaattgtcttgcttttattgtctaaacttaggctaaaccctacttctgccacctgttaaattcgttaaaaagtattaattgaccagcctggccaacatggcaaaaccccatctctactacaaatacaaaaaaattaaccaggcgtggtggcgggcacctgtaatcccagctactccagaggcggaggctgaggctgaggctgagctgcaccccagcctgggcaacaagagcaaactccgtctc

SEQ ID NO: 442047 - DNA, 4243 bp, Homo sapiens
tagggctccacagtcgttccgccacctcccagtcgggttgcggcggaggccgttcctggctttgtagctcgctcaagatggcggcgcagccaccccgcgggatacgcctcagcgcgctttgcccgaagtttttacatacaaattctactagtcacacctggccattcagtgcagttgctgaattaatagataatgcttatgatcctgatgtgaacgctaaacaaatatggattgacaaaacagtgataaatgaccatatatgcttgacattcaccgacaatgggaatggtatgacttctgataaattacataaaatgctaagctttggcttcagtgacaaagtcaccatgaatggtcatgtcccagttggattatatgggaatggcttcaagtcgggttctatgcgtctgggtaaagacgcaatcgtttttaccaaaaatggagaaagcatgagcgtgggccttttgtctcagacctacttggaagtcataaaagcggagcatgttgttgttccaatagtggcattcaacaagcaccgacagatgattaatttagcagaatcaaaagccagccttgctgcaattctggaacattctctgttttccacggaacagaagttactggcagaacttgatgctattataggcaagaaggggacgaggatcatcatttggaatcttagaagctacaaaaatgcaacagagttcgattttgaaaaggataaatatgatatcagaattcccgaggatttagatgagataacagggaagaaggggtacaagaagcaggaaaggatggaccagattgcccctgagagtgactattccctgagggcttattgcagtatattatatctaaagccaagaatgcagatcatcctacgtggacagaaagtgaagacacagctggtttcgaagagtcttgcctacatcgaacgtgatgtttatcgaccaaaatttttatctaaaacagtgagaattacctttggattcaactgcagaaataaagatcattatgggataatgatgtatcacagaaatagactcatcaaagcttatgaaaaagttggatgtcagttaagggcaaacaacatgggtgttggagtggttggaattatagagtgtaatttccttaagccaactcataataaacaagatttcgactatactaatgagtacagacttacaataacagcactaggagaaaagctgaatgattactggaatgaaatgaaagtgaagaaaaatacagaatatcctctaaatttgccagttgaagatatacagaagcgtcctgatcagacatgggttcagtgtgatgcctgtctaaagtggcggaaattacctgatgggatggatcaacttcctgaaaaatggtattgctccaataaccctgacccacagttcagaaattgtgaggttccagaagaacctgaagatgaggatttggtacatcccacttatgaaaaaacctacaaaaagaccaacaaggaaaaattcaggatcagacaaccggaaatgatccctcggattaatgctgaactgttgtttcggccaactgctctttcaactccaagcttttcttctcctaaggaaagtgttccaagaagacatctttcagaaggaacaaattcttatgcgacaagacttctaaataatcatcaagttccacctcagtctgaacctgagagcaacagcttgaaacggagactttctactcgttcctcaattttgaatgcaaagaatcggagattgagtagtcagtttgaaaattcagtttataaaggtgatgatgatgatgaagatgtcatcatcttagaagaaaacagtacccccaaacctgcagtagatcatgatattgacatgaaatcagaacagagtcacgttgagcaaggtggtgttcaggttgagtttgtgggtgacagtgaaccttgtggccagactggttcaacaagcacctcatcatcccgatgcgaccagggaaatactgcagctacccagactgaagtaccaagtttagttgttaaaaaagaagaaactgttgaagacgagatagacgtaagaaatgatgcagtgattctgccctcctgtgtagaagctgaagcaaagatacatgaaacccaggaaaccaccgataaatctgcagatgatgcaggctgccaattacaagaactgagaaaccagctactccttgtcactgaggaaaaagagaattataaaagacagtgtcatatgtttactgatcaaatcaaagtgttacaacagaggatactagaaatgaatgacaagtatgttaagaaagaaacttgccatcagtccactgaaaccgatgctgtatttttacttgaaagtattaatggcaaatctgaaagtccagaccatatggtatctcagtatcagcaagctttggaagaaatagaaaggctgaaaaaacaatgtagtgctttgcaacatgtaaaggctgaatgcagccagtgttccaataatgagagtaaaagtgaaatggatgagatggctgtgcagcttgacgatgtgtttagacaactggacaaatgcagtattgagagggaccagtataaaagtgaggttgaattgctggaaatggaaaagtcacaaatccgttcacagtgtgaagaactcaaaactgaagtagaacagttaaaatctacaaatcaacagacggcaacagatgtttcaacatcaagtaacattgaggagtctgtaaatcatatggatggagaaagcctcaaactccgatctcttcgagttaacgtaggacaactgctggctatgattgtgcctgatcttgatcttcagcaagtgaattacgatgttgatgtagttgatgagattttaggacaagttgttgaacaaatgagtgaaatcagtagtacttaaagtatatgttatgtaagataaaatatttgctcaattcttttggttgtacagctttcaaaatataattaattttgttttatagatatgataggcaacagactgaaaaccataatctttactgtattctatgcattcaaatgtggtcacaaatattgtggacacattatcttatgttttgaaatacctgtgaattgttggcattgagcagctgaagctaactcatgactctgttttgaatgtaaatatttgtaattaagcctgcacatatttttttattgccctagagtactcaagtgtttttcaccaagagcttttcaggttgcccctaagctttgtgcaattttttctggttccccaaagtgtatttttctctaagtcgagggctatgccataatacaaatggaaatgttacctttgattttcttataaaggagtttaaataggatttttaaataatgtagtaacactcctgatacaactctggttataagtgaattgagcattaatgtttcttttgtataaattcctgtcctgaaatattttattcatgaaaataaggtaagcaaaaaccaactccattttgccaggattttgttgtgctgagattgccaatcacggttaaacacaaagtgtttttatagaatgaagaaacagtctttaacagaaaaaaggtattgaaatattaaatggccaccaagtttactttgaagcccatttttggctgtttagtcagcatgaagtgggcatgataattttttaatatttctttttgtgaaatttcctgtacagccttttgtaggattactacaggttaatgtgagttgaggaagacagtctttctcaaacaatactacataccttttattatattacaaacctaagtgttttatatcctagagtcaaggaacaaatttccttaggattatagtattacatgccataaaatactatgctttattggtcccatgttttgtgcaattttaaagagatggctttctattaagtataaactatgtatatataagaaccatattttccacaactaaaatgtgcattattttttccaaagttttatcattgctatttatttttacctttgtttttgaacattcaatccgttcattttgtatgtatgcttaatacgtgtcggtcatatacagtattgaatttttactgtatagtaattctggaaagagcaaataaatgaagattgtttttatttgcctgataaagtaattgaaagtgtatttttggtatgaagctggttttctgtcacaattgtaatttcccaaattttaaaatatcttataataaaataaaaatatatgatggctaaatgttcaaat

SEQ ID NO: 442048 - DNA, 306 bp, Homo sapiens
  misc_feature (259)..(259): n is a, c, g, or t
  misc_feature (271)..(272): n is a, c, g, or t
  misc_feature (279)..(279): n is a, c, g, or t
  misc_feature (293)..(293): n is a, c, g, or t
gggattacaggtgtgagccactgggcccagtctgtaatatcctttacattgtatcttttagcttccctgggccacattggaagaattgtcttgggccacattggaagaagaattgtcttgggccacacacacataaaatatactaacgatagctgatgagctttgcccgaagtttttacatacaaattctactagtcacacctggccattcagtgcagttgctgaattaatagataatgcttatgatcctgaatggtgnacgctttgacannggccctncgagatcctcgtangagtcagcctcag

SEQ ID NO: 442049 - DNA, 4354 bp, Homo sapiens
caagggttttgaaccaagtcttggtgagtaagctgtttagttggttcccagtgttatcttccaagaatcgtatattctagattgtatcttccagatgtatcctggagcaagcagctaagtcacttttgtttggtctcaatgttgtttaacacagggataaaaatactggtttttattttcaaaagtaagacctgaattaatttacatggaccttttgtttgtttcagctttgcccgaagtttttacatacaaattctactagtcacacctggccattcagtgcagttgctgaattaatagataatgcttatgatcctgatgtgaacgctaaacaaatatggattgacaaaacagtgataaatgaccatatatgcttgacattcaccgacaatgggaatggtatgacttctgataaattacataaaatgctaagctttggcttcagtgacaaagtcaccatgaatggtcatgtcccagttggattatatgggaatggcttcaagtcgggttctatgcgtctgggtaaagacgcaatcgtttttaccaaaaatggagaaagcatgagcgtgggccttttgtctcagacctacttggaagtcataaaagcggagcatgttgttgttccaatagtggcattcaacaagcaccgacagatgattaatttagcagaatcaaaagccagccttgctgcaattctggaacattctctgttttccacggaacagaagttactggcagaacttgatgctattataggcaagaaggggacgaggatcatcatttggaatcttagaagctacaaaaatgcaacagagttcgattttgaaaaggataaatatgatatcagaattcccgaggatttagatgagataacagggaagaaggggtacaagaagcaggaaaggatggaccagattgcccctgagagtgactattccctgagggcttattgcagtatattatatctaaagccaagaatgcagatcatcctacgtggacagaaagtgaagacacagctggtttcgaagagtcttgcctacatcgaacgtgatgtttatcgaccaaaatttttatctaaaacagtgagaattacctttggattcaactgcagaaataaagatcattatgggataatgatgtatcacagaaatagactcatcaaagcttatgaaaaagttggatgtcagttaagggcaaacaacatgggtgttggagtggttggaattatagagtgtaatttccttaagccaactcataataaacaagatttcgactatactaatgagtacagacttacaataacagcactaggagaaaagctgaatgattactggaatgaaatgaaagtgaagaaaaatacagaatatcctctaaatttgccagttgaagatatacagaagcgtcctgatcagacatgggttcagtgtgatgcctgtctaaagtggcggaaattacctgatgggatggatcaacttcctgaaaaatggtattgctccaataaccctgacccacagttcagaaattgtgaggttccagaagaacctgaagatgaggatttggtacatcccacttatgaaaaaacctacaaaaagaccaacaaggaaaaattcaggatcagacaaccggaaatgatccctcggattaatgctgaactgttgtttcggccaactgctctttcaactccaagcttttcttctcctaaggaaagtgttccaagaagacatctttcagaaggaacaaattcttatgcgacaagacttctaaataatcatcaagttccacctcagtctgaacctgagagcaacagcttgaaacggagactttctactcgttcctcaattttgaatgcaaagaatcggagattgagtagtcagtttgaaaattcagtttataaaggtgatgatgatgatgaagatgtcatcatcttagaagaaaacagtacccccaaacctgcagtagatcatgatattgacatgaaatcagaacagagtcacgttgagcaaggtggtgttcaggttgagtttgtgggtgacagtgaaccttgtggccagactggttcaacaagcacctcatcatcccgatgcgaccagggaaatactgcagctacccagactgaagtaccaagtttagttgttaaaaaagaagaaactgttgaagacgagatagacgtaagaaatgatgcagtgattctgccctcctgtgtagaagctgaagcaaagatacatgaaacccaggaaaccaccgataaatctgcagatgatgcaggctgccaattacaagaactgagaaaccagctactccttgtcactgaggaaaaagagaattataaaagacagtgtcatatgtttactgatcaaatcaaagtgttacaacagaggatactagaaatgaatgacaagtatgttaagaaagaaacttgccatcagtccactgaaaccgatgctgtatttttacttgaaagtattaatggcaaatctgaaagtccagaccatatggtatctcagtatcagcaagctttggaagaaatagaaaggctgaaaaaacaatgtagtgctttgcaacatgtaaaggctgaatgcagccagtgttccaataatgagagtaaaagtgaaatggatgagatggctgtgcagcttgacgatgtgtttagacaactggacaaatgcagtattgagagggaccagtataaaagtgaggttgaattgctggaaatggaaaagtcacaaatccgttcacagtgtgaagaactcaaaactgaagtagaacagttaaaatctacaaatcaacagacggcaacagatgtttcaacatcaagtaacattgaggagtctgtaaatcatatggatggagaaagcctcaaactccgatctcttcgagttaacgtaggacaactgctggctatgattgtgcctgatcttgatcttcagcaagtgaattacgatgttgatgtagttgatgagattttaggacaagttgttgaacaaatgagtgaaatcagtagtacttaaagtatatgttatgtaagataaaatatttgctcaattcttttggttgtacagctttcaaaatataattaattttgttttatagatatgataggcaacagactgaaaaccataatctttactgtattctatgcattcaaatgtggtcacaaatattgtggacacattatcttatgttttgaaatacctgtgaattgttggcattgagcagctgaagctaactcatgactctgttttgaatgtaaatatttgtaattaagcctgcacatatttttttattgccctagagtactcaagtgtttttcaccaagagcttttcaggttgcccctaagctttgtgcaattttttctggttccccaaagtgtatttttctctaagtcgagggctatgccataatacaaatggaaatgttacctttgattttcttataaaggagtttaaataggatttttaaataatgtagtaacactcctgatacaactctggttataagtgaattgagcattaatgtttcttttgtataaattcctgtcctgaaatattttattcatgaaaataaggtaagcaaaaaccaactccattttgccaggattttgttgtgctgagattgccaatcacggttaaacacaaagtgtttttatagaatgaagaaacagtctttaacagaaaaaaggtattgaaatattaaatggccaccaagtttactttgaagcccatttttggctgtttagtcagcatgaagtgggcatgataattttttaatatttctttttgtgaaatttcctgtacagccttttgtaggattactacaggttaatgtgagttgaggaagacagtctttctcaaacaatactacataccttttattatattacaaacctaagtgttttatatcctagagtcaaggaacaaatttccttaggattatagtattacatgccataaaatactatgctttattggtcccatgttttgtgcaattttaaagagatggctttctattaagtataaactatgtatatataagaaccatattttccacaactaaaatgtgcattattttttccaaagttttatcattgctatttatttttacctttgtttttgaacattcaatccgttcattttgtatgtatgcttaatacgtgtcggtcatatacagtattgaatttttactgtatagtaattctggaaagagcaaataaatgaagattgtttttatttgcctgataaagtaattgaaagtgtatttttggtatgaagctggttttctgtcacaattgtaatttcccaaattttaaaatatcttataataaaataaaaatatatgatggctaaatgttcaaat

SEQ ID NO: 442050 - DNA, 2566 bp, Homo sapiens
cagcactttgggaggccgaggtgggtggatcatttgaggtcaggagttcgagaccagcctggccaacatggtgaaaccccgtctctactaaaaagacaagctaggaaacaaaaagctaagggcaaaatgtcatcatcttagaagaaaacagtacccccaaacctgcagtagatcatgatattgacatgaaatcagaacagagtcacgttgagcaaggtggtgttcaggttgagtttgtgggtgacagtgaaccttgtggccagactggttcaacaagcacctcatcatcccgatgcgaccagggaaatactgcagctacccagactgaagtaccaagtttagttgttaaaaaagaagaaactgttgaagacgagatagacgtaagaaatgatgcagtgattctgccctcctgtgtagaagctgaagcaaagatacatgaaacccaggaaaccaccgataaatctgcagatgatgcaggctgccaattacaagaactgagaaaccagctactccttgtcactgaggaaaaagagaattataaaagacagtgtcatatgtttactgatcaaatcaaagtgttacaacagaggatactagaaatgaatgacaagtatgttaagaaagaaacttgccatcagtccactgaaaccgatgctgtatttttacttgaaagtattaatggcaaatctgaaagtccagaccatatggtatctcagtatcagcaagctttggaagaaatagaaaggctgaaaaaacaatgtagtgctttgcaacatgtaaaggctgaatgcagccagtgttccaataatgagagtaaaagtgaaatggatgagatggctgtgcagcttgacgatgtgtttagacaactggacaaatgcagtattgagagggaccagtataaaagtgaggttgaattgctggaaatggaaaagtcacaaatccgttcacagtgtgaagaactcaaaactgaagtagaacagttaaaatctacaaatcaacagacggcaacagatgtttcaacatcaagtaacattgaggagtctgtaaatcatatggatggagaaagcctcaaactccgatctcttcgagttaacgtaggacaactgctggctatgattgtgcctgatcttgatcttcagcaagtgaattacgatgttgatgtagttgatgagattttaggacaagttgttgaacaaatgagtgaaatcagtagtacttaaagtatatgttatgtaagataaaatatttgctcaattcttttggttgtacagctttcaaaatataattaattttgttttatagatatgataggcaacagactgaaaaccataatctttactgtattctatgcattcaaatgtggtcacaaatattgtggacacattatcttatgttttgaaatacctgtgaattgttggcattgagcagctgaagctaactcatgactctgttttgaatgtaaatatttgtaattaagcctgcacatatttttttattgccctagagtactcaagtgtttttcaccaagagcttttcaggttgcccctaagctttgtgcaattttttctggttccccaaagtgtatttttctctaagtcgagggctatgccataatacaaatggaaatgttacctttgattttcttataaaggagtttaaataggatttttaaataatgtagtaacactcctgatacaactctggttataagtgaattgagcattaatgtttcttttgtataaattcctgtcctgaaatattttattcatgaaaataaggtaagcaaaaaccaactccattttgccaggattttgttgtgctgagattgccaatcacggttaaacacaaagtgtttttatagaatgaagaaacagtctttaacagaaaaaaggtattgaaatattaaatggccaccaagtttactttgaagcccatttttggctgtttagtcagcatgaagtgggcatgataattttttaatatttctttttgtgaaatttcctgtacagccttttgtaggattactacaggttaatgtgagttgaggaagacagtctttctcaaacaatactacataccttttattatattacaaacctaagtgttttatatcctagagtcaaggaacaaatttccttaggattatagtattacatgccataaaatactatgctttattggtcccatgttttgtgcaattttaaagagatggctttctattaagtataaactatgtatatataagaaccatattttccacaactaaaatgtgcattattttttccaaagttttatcattgctatttatttttacctttgtttttgaacattcaatccgttcattttgtatgtatgcttaatacgtgtcggtcatatacagtattgaatttttactgtatagtaattctggaaagagcaaataaatgaagattgtttttatttgcctgataaagtaattgaaagtgtatttttggtatgaagctggttttctgtcacaattgtaatttcccaaattttaaaatatcttataataaaataaaaatatatgatggctaaatgttcaaat

SEQ ID NO: 442051 - DNA, 1137 bp, Homo sapiens
tagggctccacagtcgttccgccacctcccagtcgggttgcggcggaggccgttcctggctttgtagctcgctcaagatggcggcgcagccaccccgcgggatacgcctcagcgcgctttgcccgaagtttttacatacaaattctactagtcacacctggccattcagtgcagttgctgaattaatagataatgcttatgatcctgatgtgaacgctaaacaaatatggattgacaaaacagtgataaatgaccatatatgcttgacattcaccgacaatgggaatggtatgacttctgataaattacataaaatgctaagctttggcttcagtgacaaagtcaccatgaatggtcatgtcccagttggattatatgggaatggcttcaagtcgggttctatgcgtctgggtaaagacgcaatcgtttttaccaaaaatggagaaagcatgagcgtgggccttttgtctcagacctacttggaagtcataaaagcggagcatgttgttgttccaatagtggcattcaacaagcaccgacagatgattaatttagcagaatcaaaagccagccttgctgcaattctggaacattctctgttttccacggaacagaagttactggcagaacttgatgctattataggcaagaaggggacgaggatcatcatttggaatcttagaagctacaaaaatgcaacagagttcgattttgaaaaggataaatatgatatcagaattcccgaggatttagatgagataacagggaagaaggggtacaagaagcaggaaaggatggaccagattgcccctgagagtgactattccctgagggcttattgcagtatattatatctaaagccaagaatgcagatcatcctacgtggacagaaagtgaagacacagctggtttcgaagagtcttgcctacatcgaacgtgatgtttatcgaccaaaatttttaacagatgattaatttagcagaatcaaaagccagccttgctgcaattctggaacattctctgttttccacggaacagaagttactggcagaacttgatgctattataggcaagaaggggacgaggatcatcatttggaatcttagaagctacaaaaatgcaacagagttcgatttt

SEQ ID NO: 442052 - DNA, 371 bp, Homo sapiens
aaaaaaaaaaaccttagaaaattatttataaatagtttttctgttatttaagtttatagagttagttttcatattgtaattatgaaaactatgttgtcaatctgagtctttaacttatgatatacgacagatgattaatttagcagaatcaaaagccagccttgctgcaattctggaacattctctgttttccacggaacagaagttactggcagaacttgatgctattataggcaagaaggggacgaggatcatcatttggaatcttagaaggtaaacgtggacatagatgttgaccgtttgggaagtaaagtgcacgtgcagggtggtggtgttatattcatctctcgttacacacagtagaaatacat

SEQ ID NO: 442053 - DNA, 3570 bp, Homo sapiens
gtatatgcttcagtcttgataaattttaactttttaaatagctttgtgtatattttatggtagtaaattataaaatagactagtatttgcatgttttatgcattcatgacatatctaacttattcttaattttttggatatttctgggcaatgcagttcttggaagtttttttcaaattgttataactctctaaaaaattttctaatttattgaaagaaaattgtgtataagtgcagttcaaacctgtgttgttcaagggtcacctataccttgaatgttctttattaactatatgttttggagttttttctcttcacagtgtctatgtactcattactagattatttatgatttatgtttgaaaagaattttttcttgattttatgatttactttttaagacttacaataacagcactaggagaaaagctgaatgattactggaatgaaatgaaagtgaagaaaaatacagaatatcctctaaatttgccagttgaagatatacagaagcgtcctgatcagacatgggttcagtgtgatgcctgtctaaagtggcggaaattacctgatgggatggatcaacttcctgaaaaatggtattgctccaataaccctgacccacagttcaggtaccatagagttggtagtaccctttttggaaagacggaaagtactgttcacagtgtatgaataggcgctggtgacatgttattcctatgtgatttttctgaatagaaattgtgaggttccagaagaacctgaagatgaggatttggtacatcccacttatgaaaaaacctacaaaaagaccaacaaggaaaaattcaggatcagacaaccggaaatgatccctcggattaatgctgaactgttgtttcggccaactgctctttcaactccaagcttttcttctcctaaggaaagtgttccaagaagacatctttcagaaggaacaaattcttatgcgacaagacttctaaataatcatcaagttccacctcagtctgaacctgagagcaacagcttgaaacggagactttctactcgttcctcaattttgaatgcaaagaatcggagattgagtagtcagtttgaaaattcagtttataaaggtgatgatgatgatgaagatgtcatcatcttagaagaaaacagtacccccaaacctgcagtagatcatgatattgacatgaaatcagaacagagtcacgttgagcaaggtggtgttcaggttgagtttgtgggtgacagtgaaccttgtggccagactggttcaacaagcacctcatcatcccgatgcgaccagggaaatactgcagctacccagactgaagtaccaagtttagttgttaaaaaagaagaaactgttgaagacgagatagacgtaagaaatgatgcagtgattctgccctcctgtgtagaagctgaagcaaagatacatgaaacccaggaaaccaccgataaatctgcagatgatgcaggctgccaattacaagaactgagaaaccagctactccttgtcactgaggaaaaagagaattataaaagacagtgtcatatgtttactgatcaaatcaaagtgttacaacagaggatactagaaatgaatgacaagtatgttaagaaagaaacttgccatcagtccactgaaaccgatgctgtatttttacttgaaagtattaatggcaaatctgaaagtccagaccatatggtatctcagtatcagcaagctttggaagaaatagaaaggctgaaaaaacaatgtagtgctttgcaacatgtaaaggctgaatgcagccagtgttccaataatgagagtaaaagtgaaatggatgagatggctgtgcagcttgacgatgtgtttagacaactggacaaatgcagtattgagagggaccagtataaaagtgaggttgaattgctggaaatggaaaagtcacaaatccgttcacagtgtgaagaactcaaaactgaagtagaacagttaaaatctacaaatcaacagacggcaacagatgtttcaacatcaagtaacattgaggagtctgtaaatcatatggatggagaaagcctcaaactccgatctcttcgagttaacgtaggacaactgctggctatgattgtgcctgatcttgatcttcagcaagtgaattacgatgttgatgtagttgatgagattttaggacaagttgttgaacaaatgagtgaaatcagtagtacttaaagtatatgttatgtaagataaaatatttgctcaattcttttggttgtacagctttcaaaatataattaattttgttttatagatatgataggcaacagactgaaaaccataatctttactgtattctatgcattcaaatgtggtcacaaatattgtggacacattatcttatgttttgaaatacctgtgaattgttggcattgagcagctgaagctaactcatgactctgttttgaatgtaaatatttgtaattaagcctgcacatatttttttattgccctagagtactcaagtgtttttcaccaagagcttttcaggttgcccctaagctttgtgcaattttttctggttccccaaagtgtatttttctctaagtcgagggctatgccataatacaaatggaaatgttacctttgattttcttataaaggagtttaaataggatttttaaataatgtagtaacactcctgatacaactctggttataagtgaattgagcattaatgtttcttttgtataaattcctgtcctgaaatattttattcatgaaaataaggtaagcaaaaaccaactccattttgccaggattttgttgtgctgagattgccaatcacggttaaacacaaagtgtttttatagaatgaagaaacagtctttaacagaaaaaaggtattgaaatattaaatggccaccaagtttactttgaagcccatttttggctgtttagtcagcatgaagtgggcatgataattttttaatatttctttttgtgaaatttcctgtacagccttttgtaggattactacaggttaatgtgagttgaggaagacagtctttctcaaacaatactacataccttttattatattacaaacctaagtgttttatatcctagagtcaaggaacaaatttccttaggattatagtattacatgccataaaatactatgctttattggtcccatgttttgtgcaattttaaagagatggctttctattaagtataaactatgtatatataagaaccatattttccacaactaaaatgtgcattattttttccaaagttttatcattgctatttatttttacctttgtttttgaacattcaatccgttcattttgtatgtatgcttaatacgtgtcggtcatatacagtattgaatttttactgtatagtaattctggaaagagcaaataaatgaagattgtttttatttgcctgataaagtaattgaaagtgtatttttggtatgaagctggttttctgtcacaattgtaatttcccaaattttaaaatatcttataataaaataaaaatatatgatggctaaatgttcaaat

SEQ ID NO: 442054 - DNA, 2187 bp, Homo sapiens
tagggctccacagtcgttccgccacctcccagtcgggttgcggcggaggccgttcctggctttgtagctcgctcaagatggcggcgcagccaccccgcgggatacgcctcagcgcgctttgcccgaagtttttacatacaaattctactagtcacacctggccattcagtgcagttgctgaattaatagataatgcttatgatcctgatgtgaacgctaaacaaatatggattgacaaaacagtgataaatgaccatatatgcttgacattcaccgacaatgggaatggtatgacttctgataaattacataaaatgctaagctttggcttcagtgacaaagtcaccatgaatggtcatgtcccagttggattatatgggaatggcttcaagtcgggttctatgcgtctgggtaaagacgcaatcgtttttaccaaaaatggagaaagcatgagcgtgggccttttgtctcagacctacttggaagtcataaaagcggagcatgttgttgttccaatagtggcattcaacaagcaccgacagatgattaatttagcagaatcaaaagccagccttgctgcaattctggaacattctctgttttccacggaacagaagttactggcagaacttgatgctattataggcaagaaggggacgaggatcatcatttggaatcttagaagctacaaaaatgcaacagagttcgattttgaaaaggataaatatgatatcagaattcccgaggatttagatgagataacagggaagaaggggtacaagaagcaggaaaggatggaccagattgcccctgagagtgactattccctgagggcttattgcagtatattatatctaaagccaagaatgcagatcatcctacgtggacagaaagtgaagacacagctggtttcgaagagtcttgcctacatcgaacgtgatgtttatcgaccaaaatttttatctaaaacagtgagaattacctttggattcaactgcagaaataaagatcattatgggataatgatgtatcacagaaatagactcatcaaagcttatgaaaaagttggatgtcagttaagggcaaacaacatgggtgttggagtggttggaattatagagtgtaatttccttaagccaactcataataaacaagatttcgactatactaatgagtacagacttacaataacagcactaggagaaaagctgaatgattactggaatgaaatgaaagtgaagaaaaatacagaatatcctctaaatttgccagttgaagatatacagaagcgtcctgatcagacatgggttcagtgtgatgcctgtctaaagtggcggaaattacctgatgggatggatcaacttcctgaaaaatggtattgctccaataaccctgacccacagttcaggtaccatagagttggtagtaccctttttggaaagacggaaagtactgttcacagtgtatgaataggcgctggtgacatgttattcctatgtgatttttctgaatagaaattgtgaggttccagaagaacctgaagatgaggatttggtacatcccacttatgaaaaaacctacaaaaagaccaacaaggaaaaattcaggatcagacaaccggaaatgatccctcggattaatgctgaactgttgtttcggccaactgctctttcaactccaagcttttcttctcctaaggaaagtgttccaagaagacatctttcagaaggaacaaattcttatgcgacaagacttctaaataatcatcaagttccacctcagtctgaacctgagagcaacaggtcagtggctaagattggttttccatttggggaatattaaacagagcttttacttgacacttctgtgacagtgatgcaattcgggatcattgtaggttccattgtgaattgtaggttccatgaatgtgaaaatcttcaggacaaattgtcttgcttttattgtctaaacttaggctaaaccctacttctgccacctgttaaattcgttaaaaagtattaattgaccagcctggccaacatggcaaaaccccatctctactacaaatacaaaaaaattaaccaggcgtggtggcgggcacctgtaatcccagctactccagaggcggaggctgaggctgaggctgagctgcaccccagcctgggcaacaagagcaaactccgtctc

SEQ ID NO: 442055 - DNA, 831 bp, Homo sapiens
tagggctccacagtcgttccgccacctcccagtcgggttgcggcggaggccgttcctggctttgtagctcgctcaagatggcggcgcagccaccccgcgggatacgcctcagcgcgctttgcccgaagtttttacatacaaattctactagtcacacctggccattcagtgcagttgctgaattaatagataatgcttatgatcctgatgtgaacgctaaacaaatatggattgacaaaacagtgataaatgaccatatatgcttgacattcaccgacaatgggaatggtatgacttctgataaattacataaaatgctaagctttggcttcagtgacaaagtcaccatgaatggtcatgtcccagttggattatatgggaatggcttcaagtcgggttctatgcgtctgggtaaagacgcaatcgtttttaccaaaaatggagaaagcatgagcgtgggccttttgtctcagacctacttggaagtcataaaagcggagcatgttgttgttccaatagtggcattcaacaagcaccgacagatgattaatttagcagaatcaaaagccagccttgctgcaattctggaacattctctgttttccacggaacagaagttactggcagaacttgatgctattataggcaagaaggggacgaggatcatcatttggaatcttagaaggtaaacgtggacatagatgttgaccgtttgggaagtaaagtgcacgtgcagggtggtggtgttatattcatctctcgttacacacagtagaaatacatggaaaggtactcattttttggtgtagttactgatttgtctttgcccag

SEQ ID NO: 442056 - DNA, 3509 bp, Homo sapiens
ggcccagttggcggcgcgcactccaggtggcggccggctgcgggccgcggccagagggctagaatccgcgccttccgagggagccgcgccctgcgggccccaccgtacccgaggggatggagggctgcccccgaggcccccgcgcggctcgcggtcccacgcctgccggcccgcgctagctactcgactcgtgcgctaaatttatccgtcacccaggccttgtctcccgagtcattggcgtcgtggttcaaaagaaatggaagaaaaggagcgatgtgaccgattgtgttcggtcctcctgctttgaggcctggcatttgcagagggaaacagcaagaaaatcgtggggattttggaggggggtgggagggaagggtggggaaacggaaacaaggtcttacattttatgtgtttttttaaattctgcactttgacagtggtagcaaaataaaagtaatccaaaagttatttttctattgagaagagagaagaggtgggttttatttttttccttttgattccaatcttttctcccagtgacaaagcataaatcatggacaccagagaataaggtggacctcaggaatccggaaaagactgagaagcttacattcttcctctagagggaagagtggggtgtttatagccatctctggaacctaaaacaaaactgccccaggcagcacccccacaaatctaccatgagaaacagcgcagggagctttgtgccctccacgccctcaataacgtcttccaggacagcaatgccttcacccgggatacgctgcaagagattttccagaggttgtctccaaacaccatggtgacacctcacaagaagagcatgctgggaaatggcaactacgatgtgaatgtcattatggcagcacttcagaccaaaggctatgaagctgtttggtgggacaagcgcagggatgtcggtgtcattgccctcactaacgtcatgggcttcatcatgaatctgccctccagcctatgctggggtccactgaaactgcccctcaaaaggcagcactggatctgtgttcgagaggtgggaggggcctactacaacctcgactccaaactcaagatgcccgagtggattggaggcgagagcgagctcaggaagtttctaaaacatcatttgcgaggaaagaactgtgaactcctgctggtggtaccagaagaggtagaggctcatcagagttggaggaccgatgtgtaacagttctgcccaacctccctctcgcctcagccccttcagtcctctgtgacgtgctgtggcctctacagtgggtctgcccttgccacttccccaaacatctcatcaagtttttccccttcagatctgacagtgcaataggacagacgtgtggactgttataagaactactcagtgttttgttcctgggcaaggaaggtaggagttctgtgcacttaaggccagtggtcacaaacccttgttttatttaagagacagaggagaaagtggagcggggagggaatcctagcttattttcccttttctatgaggacttgacacaggttctgctgagttgtcactgctgctccagactcacctagagatgctgcctccactttccatcctgtctgggtctgaaaacagtgggtctgcagatagtgcccacaaaccccatgtgactggtttgaaggacccagagcataaaggtctctcaggaaaccatgtccaaaaccctagcagcggtacagcatgctgtctccaacccttatccccaggtttaagggtggtttatggccatacgtggaggttttttgttgttgtttttgagactgagtttcactcttgttgcccaggctggagtgcaatggcaccatctcggctcactgcaacctccacctcctggttcaagcgattctcaggcctcagcttcccaagtagttgggattacaggcgcctgccaccacacctggctaattttgtatttttagtagagatggggtttctccatgttggtcaggctggtctcaaactcccgacctcaagtgatctgcccgccttggcctcccaaagtgctgggattacaggcgtgagccaccgcacccggcagagttttataatgaaaaattaactaatattctagtatgaagtgaggaggatactgaacaggatgtggctaaagccaacctgggacagccatggggtggcttggtttcttcactccagtgttgtccctaccatttcgcagcattgatttaggaggctctgggacaaaagagaagccaaagagcagttttcccagttcactcactctggcaaaatcaggaaaaaaaagtctgcttttgacatcaaattccactaatttggggcagcgttgggtgaggaaagtattgtgaagacaggcttcttggagtaggggcagccacaattcagtagacactctaggctcggaggctgccactgtagttgccaagctcaggttgggtggttctgtgctgtatggatggaataggacctgggctggtcatcttcatgtcgtttcctctctgtatcaatggaagttcaacccgcccctacctcttcagatagttgtaggccacttttctcttgtaactttggaaaacaaaagaggagaaataagtatcataccatatgcgtgtctccaaagtggatgtggttgcctcaaggcaggtggcaggcaggggtgacctgctggccctcagatcaatggtcgtggcaggtctgagagctgtcccactggccagacttctctccagcagcaaagccagcctggggcttgcatgttgatcctgagcaagcttaacggggtgaagctgggctttctcccccctgtgactggagtgcatgttgacaccagcactttttctgcacatgtatcttcaatccaacaaggccgtttttttaatgctgagtaacaggccaccaagcggctactgcgttatatcttctcagcaactggccgcagtctcttctgcaccattttctacaccagacctgcttggcaccacagggagctcttttcctgccctgcacaatgacattccaaccaccaccagccagacattacagccaaccttgctgattgtcacaagcaggaccttggggccactggcactgtcagatagtaagccatttcttgggtagaggaggaaactcctctccacaaatccacttgggcctgtgcaaatggcacttgaaagagtccccatgcacttggagtccatgagccaatgggatatgcaaagacgcttaaacatttcagggctggtttctctgttcatatccaattctggtgcttaggaacagggacccatgctgatgcccaagggcaaaaagccccacttcctttaaggaagtgaacaggcctgaccctgatgcccaataacgggcaaccctaggctttttgtttttcttgcttttattcctttttgttgttggccttgtgctgcgtttgtttacaaaagatgtattttgtttaaccaaatattaaaaatggaaaactcca

SEQ ID NO: 442057 - DNA, 3691 bp, Homo sapiens
ggcccagttggcggcgcgcactccaggtggcggccggctgcgggccgcggccagagggctagaatccgcgccttccgagggagccgcgccctgcgggccccaccgtacccgaggggatggagggctgcccccgaggcccccgcgcggctcgcggtcccacgcctgccggcccgcgctagctactcgactcgtgcgctaaatttatccgtcacccaggccttgtctcccgagtcattggcgtcgtggttcaaaagaaatggaagaaaaggagcgatgtgaccgattgtgttcggtcctcctgctttgaggcctggcatttgcagagggaaacagcaagaaaatcgtggggattttggaggggggtgggagggaagggtggggaaacggaaacaaggtcttacattttatgtgtttttttaaattctgcactttgacagtggtagcaaaataaaagtaatccaaaagttatttttctattgagaagagagaagaggtgggttttatttttttccttttgattccaatcttttctcccagtgacaaagcataaatcatggacaccagagaataaggtggacctcaggaatccggaaaagactgagaagcttacattcttcctctagagggaagagtggggtgtttatagccatctctggaacctaaaacaaaaaacatgagttgtgtgccatggaaaggagacaaggccaaatctgaatcattggagctgccccaggcagcacccccacaaatctaccatgagaaacagcgcagggagctttgtgccctccacgccctcaataacgtcttccaggacagcaatgccttcacccgggatacgctgcaagagattttccagaggttgtctccaaacaccatggtgacacctcacaagaagagcatgctgggaaatggcaactacgatgtgaatgtcattatggcagcacttcagaccaaaggctatgaagctgtttggtgggacaagcgcagggatgtcggtgtcattgccctcactaacgtcatgggcttcatcatgaatctgccctccagcctatgctggggtccactgaaactgcccctcaaaaggcagcactggatctgtgttcgagaggtgggaggggcctactacaacctcgactccaaactcaagatgcccgagtggattggaggcgagagcgagctcagcagggcacagggtttttccctttaacaacaacacacattcccaaaatttttttttggggccccggggaaacacgggcggggccaacacaccccacacaagggggaaaaaaaacccttttgggtgtttggggaaaaacactttccccctttggcctttggggtttggggctaacgccaggacacggacaggtcaccagggctcatcagagttggaggaccgatgtgtaacagttctgcccaacctccctctcgcctcagccccttcagtcctctgtgacgtgctgtggcctctacagtgggtctgcccttgccacttccccaaacatctcatcaagtttttccccttcagatctgacagtgcaataggacagacgtgtggactgttataagaactactcagtgttttgttcctgggcaaggaaggtaggagttctgtgcacttaaggccagtggtcacaaacccttgttttatttaagagacagaggagaaagtggagcggggagggaatcctagcttattttcccttttctatgaggacttgacacaggttctgctgagttgtcactgctgctccagactcacctagagatgctgcctccactttccatcctgtctgggtctgaaaacagtgggtctgcagatagtgcccacaaaccccatgtgactggtttgaaggacccagagcataaaggtctctcaggaaaccatgtccaaaaccctagcagcggtacagcatgctgtctccaacccttatccccaggtttaagggtggtttatggccatacgtggaggttttttgttgttgtttttgagactgagtttcactcttgttgcccaggctggagtgcaatggcaccatctcggctcactgcaacctccacctcctggttcaagcgattctcaggcctcagcttcccaagtagttgggattacaggcgcctgccaccacacctggctaattttgtatttttagtagagatggggtttctccatgttggtcaggctggtctcaaactcccgacctcaagtgatctgcccgccttggcctcccaaagtgctgggattacaggcgtgagccaccgcacccggcagagttttataatgaaaaattaactaatattctagtatgaagtgaggaggatactgaacaggatgtggctaaagccaacctgggacagccatggggtggcttggtttcttcactccagtgttgtccctaccatttcgcagcattgatttaggaggctctgggacaaaagagaagccaaagagcagttttcccagttcactcactctggcaaaatcaggaaaaaaaagtctgcttttgacatcaaattccactaatttggggcagcgttgggtgaggaaagtattgtgaagacaggcttcttggagtaggggcagccacaattcagtagacactctaggctcggaggctgccactgtagttgccaagctcaggttgggtggttctgtgctgtatggatggaataggacctgggctggtcatcttcatgtcgtttcctctctgtatcaatggaagttcaacccgcccctacctcttcagatagttgtaggccacttttctcttgtaactttggaaaacaaaagaggagaaataagtatcataccatatgcgtgtctccaaagtggatgtggttgcctcaaggcaggtggcaggcaggggtgacctgctggccctcagatcaatggtcgtggcaggtctgagagctgtcccactggccagacttctctccagcagcaaagccagcctggggcttgcatgttgatcctgagcaagcttaacggggtgaagctgggctttctcccccctgtgactggagtgcatgttgacaccagcactttttctgcacatgtatcttcaatccaacaaggccgtttttttaatgctgagtaacaggccaccaagcggctactgcgttatatcttctcagcaactggccgcagtctcttctgcaccattttctacaccagacctgcttggcaccacagggagctcttttcctgccctgcacaatgacattccaaccaccaccagccagacattacagccaaccttgctgattgtcacaagcaggaccttggggccactggcactgtcagatagtaagccatttcttgggtagaggaggaaactcctctccacaaatccacttgggcctgtgcaaatggcacttgaaagagtccccatgcacttggagtccatgagccaatgggatatgcaaagacgcttaaacatttcagggctggtttctctgttcatatccaattctggtgcttaggaacagggacccatgctgatgcccaagggcaaaaagccccacttcctttaaggaagtgaacaggcctgaccctgatgcccaataacgggcaaccctaggctttttgtttttcttgcttttattcctttttgttgttggccttgtgctgcgtttgtttacaaaagatgtattttgtttaaccaaatattaaaaatggaaaactcca

SEQ ID NO: 442058 - DNA, 3505 bp, Homo sapiens
ggcccagttggcggcgcgcactccaggtggcggccggctgcgggccgcggccagagggctagaatccgcgccttccgagggagccgcgccctgcgggccccaccgtacccgaggggatggagggctgcccccgaggcccccgcgcggctcgcggtcccacgcctgccggcccgcgctagctactcgactcgtgcgctaaatttatccgtcacccaggccttgtctcccgagtcattggcgtcgtggttcaaaagaaatggaagaaaaggagcgatgtgaccgattgtgttcggtcctcctgctttgaggcctggcatttgcagagggaaacagcaagaaaatcgtggggattttggaggggggtgggagggaagggtggggaaacggaaacaaggtcttacattttatgtgtttttttaaattctgcactttgacagtggtagcaaaataaaagtaatccaaaagttatttttctattgagaagagagaagaggtgggttttatttttttccttttgattccaatcttttctcccagtgacaaagcataaatcatggacaccagagaataaggtggacctcaggaatccggaaaagactgagaagcttacattcttcctctagagggaagagtggggtgtttatagccatctctggaacctaaaacaaaaaacatgagttgtgtgccatggaaaggagacaaggccaaatctgaatcattggagctgccccaggcagcacccccacaaatctaccatgagaaacagcgcagggagctttgtgccctccacgccctcaataacgtcttccaggacagcaatgccttcacccgggatacgctgcaagagattttccagaggttgtctccaaacaccatggtgacacctcacaagaagagcatgctgggaaatggcaactacgatgtgaatgtcattatggcagcacttcagaccaaaggctatgaagctgtttggtgggacaagcgcagggatgtcggtgtcattgccctcactaacgtcatgggcttcatcatgaatctgccctccagcctatgctggggtccactgaaactgcccctcaaaaggcagcactggatctgtgttcgagaggtgggaggggcctactacaacctcgactccaaactcaagatgcccgagtggattggaggcgagagcgagctcaggaagtttctaaaacatcatttgcgaggaaagaactgtgaactcctgctggtggtaccagaagaggtagaggctcatcagagttggaggaccgatgtgtaacagttctgcccaacctccctctcgcctcagccccttcagtcctctgtgacgtgctgtggcctctacagtgggtctgcccttgccacttccccaaacatctcatcaagtttttccccttcagatctgacagtgcaataggacagacgtgtggactgttataagaactactcagtgttttgttcctgggcaaggaaggtaggagttctgtgcacttaaggccagtggtcacaaacccttgttttatttaagagacagaggagaaagtggagcggggagggaatcctagcttattttcccttttctatgaggacttgacacaggttctgctgagttgtcactgctgctccagactcacctagagatgctgcctccactttccatcctgtctgggtctgaaaacagtgggtctgcagatagtgcccacaaaccccatgtgactggtttgaaggacccagagcataaaggtctctcaggaaaccatgtccaaaaccctagcagcggtacagcatgctgtctccaacccttatccccaggtttaagggtggtttatggccatacgtggaggttttttgttgttgtttttgagactgagtttcactcttgttgcccaggctggagtgcaatggcaccatctcggctcactgcaacctccacctcctggttcaagcgattctcaggcctcagcttcccaagtagttgggattacaggcgcctgccaccacacctggctaattttgtatttttagtagagatggggtttctccatgttggtcaggctggtctcaaactcccgacctcaagtgatctgcccgccttggcctcccaaagtgctgggattacaggcgtgagccaccgcacccggcagagttttataatgaaaaattaactaatattctagtatgaagtgaggaggatactgaacaggatgtggctaaagccaacctgggacagccatggggtggcttggtttcttcactccagtgttgtccctaccatttcgcagcattgatttaggaggctctgggacaaaagagaagccaaagagcagttttcccagttcactcactctggcaaaatcaggaaaaaaaagtctgcttttgacatcaaattccactaatttggggcagcgttgggtgaggaaagtattgtgaagacaggcttcttggagtaggggcagccacaattcagtagacactctaggctcggaggctgccactgtagttgccaagctcaggttgggtggttctgtgctgtatggatggaataggacctgggctggtcatcttcatgtcgtttcctctctgtatcaatggaagttcaacccgcccctacctcttcagatagttgtaggccacttttctcttgtaactttggttgcctcaaggcaggtggcaggcaggggtgacctgctggccctcagatcaatggtcgtggcaggtctgagagctgtcccactggccagacttctctccagcagcaaagccagcctggggcttgcatgttgatcctgagcaagcttaacggggtgaagctgggctttctcccccctgtgactggagtgcatgttgacaccagcactttttctgcacatgtatcttcaatccaacaaggccgtttttttaatgctgagtaacaggccaccaagcggctactgcgttatatcttctcagcaactggccgcagtctcttctgcaccattttctacaccagacctgcttggcaccacagggagctcttttcctgccctgcacaatgacattccaaccaccaccagccagacattacagccaaccttgctgattgtcacaagcaggaccttggggccactggcactgtcagatagtaagccatttcttgggtagaggaggaaactcctctccacaaatccacttgggcctgtgcaaatggcacttgaaagagtccccatgcacttggagtccatgagccaatgggatatgcaaagacgcttaaacatttcagggctggtttctctgttcatatccaattctggtgcttaggaacagggacccatgctgatgcccaagggcaaaaagccccacttcctttaaggaagtgaacaggcctgaccctgatgcccaataacgggcaaccctaggctttttgtttttcttgcttttattcctttttgttgttggccttgtgctgcgtttgtttacaaaagatgtattttgtttaaccaaatattaaaaatggaaaactcca

SEQ ID NO: 442059 - DNA, 3642 bp, Homo sapiens
ggcccagttggcggcgcgcactccaggtggcggccggctgcgggccgcggccagagggctagaatccgcgccttccgagggagccgcgccctgcgggccccaccgtacccgaggggatggagggctgcccccgaggcccccgcgcggctcgcggtcccacgcctgccggcccgcgctagctactcgactcgtgcgctaaatttatccgtcacccaggccttgtctcccgagtcattggcgtcgtggttcaaaagaaatggaagaaaaggagcgatgtgaccgattgtgttcggtcctcctgctttgaggcctggcatttgcagagggaaacagcaagaaaatcgtggggattttggaggggggtgggagggaagggtggggaaacggaaacaaggtcttacattttatgtgtttttttaaattctgcactttgacagtggtagcaaaataaaagtaatccaaaagttatttttctattgagaagagagaagaggtgggttttatttttttccttttgattccaatcttttctcccagtgacaaagcataaatcatggacaccagagaataaggtggacctcaggaatccggaaaagactgagaagcttacattcttcctctagagggaagagtggggtgtttatagccatctctggaacctaaaacaaaaaacatgagttgtgtgccatggaaaggagacaaggccaaatctgaatcattggagctgccccaggcagcacccccacaaatctaccatgagaaacagcgcagggagctttgtgccctccacgccctcaataacgtcttccaggacagcaatgccttcacccgggatacgctgcaagagattttccagaggttgtctccaaacaccatggtgacacctcacaagaagagcatgctgggaaatggcaactacgatgtgaatgtcattatggcagcacttcagaccaaaggctatgaagctgtttggtgggacaagcgcagggatgtcggtgtcattgccctcactaacgtcatgggcttcatcatgaatctgccctccagcctatgctggggtccactgaaactgcccctcaaaaggcagcactggatctgtgttcgagaggtgggaggggcctactacaacctcgactccaaactcaagatgcccgagtggattggaggcgagagcgagctcaggaagtttctaaaacatcatttgcgaggaaagaactgtgaactcctgctggtggtaccagaagaggtagaggctcatcagagttggaggaccgatgtgtaacagttctgcccaacctccctctcgcctcagccccttcagtcctctgtgacgtgctgtggcctctacagtgggtctgcccttgccacttccccaaacatctcatcaagtttttccccttcagatctgacagtgcaataggacagacgtgtggactgttataagaactactcagtgttttgttcctgggcaaggaaggtaggagttctgtgcacttaaggccagtggtcacaaacccttgttttatttaagagacagaggagaaagtggagcggggagggaatcctagcttattttcccttttctatgaggacttgacacaggttctgctgagttgtcactgctgctccagactcacctagagatgctgcctccactttccatcctgtctgggtctgaaaacagtgggtctgcagatagtgcccacaaaccccatgtgactggtttgaaggacccagagcataaaggtctctcaggaaaccatgtccaaaaccctagcagcggtacagcatgctgtctccaacccttatccccaggtttaagggtggtttatggccatacgtggaggttttttgttgttgtttttgagactgagtttcactcttgttgcccaggctggagtgcaatggcaccatctcggctcactgcaacctccacctcctggttcaagcgattctcaggcctcagcttcccaagtagttgggattacaggcgcctgccaccacacctggctaattttgtatttttagtagagatggggtttctccatgttggtcaggctggtctcaaactcccgacctcaagtgatctgcccgccttggcctcccaaagtgctgggattacaggcgtgagccaccgcacccggcagagttttataatgaaaaattaactaatattctagtatgaagtgaggaggatactgaacaggatgtggctaaagccaacctgggacagccatggggtggcttggtttcttcactccagtgttgtccctaccatttcgcagcattgatttaggaggctctgggacaaaagagaagccaaagagcagttttcccagttcactcactctggcaaaatcaggaaaaaaaagtctgcttttgacatcaaattccactaatttggggcagcgttgggtgaggaaagtattgtgaagacaggcttcttggagtaggggcagccacaattcagtagacactctaggctcggaggctgccactgtagttgccaagctcaggttgggtggttctgtgctgtatggatggaataggacctgggctggtcatcttcatgtcgtttcctctctgtatcaatggaagttcaacccgcccctacctcttcagatagttgtaggccacttttctcttgtaactttggaaaacaaaagaggagaaataagtatcataccatatgcgtgtctccaaagtggatgtggttgcctcaaggcaggtggcaggcaggggtgacctgctggccctcagatcaatggtcgtggcaggtctgagagctgtcccactggccagacttctctccagcagcaaagccagcctggggcttgcatgttgatcctgagcaagcttaacggggtgaagctgggctttctcccccctgtgactggagtgcatgttgacaccagcactttttctgcacatgtatcttcaatccaacaaggccgtttttttaatgctgagtaacaggccaccaagcggctactgcgttatatcttctcagcaactggccgcagtctcttctgcaccattttctacaccagacctgcttggcaccacagggagctcttttcctgccctgcacaatgacattccaaccaccaccagccagacattacagccaaccttgctgattgtcacaagcaggaccttggggccactggcactgtcagatagtaagccatttcttgggtagaggaggaaactcctctccacaaatccacttgggcctgtgcaaatggcacttgaaagagtccccatgcacttggagtccatgagccaatgggatatgcaaagacgcttaaacatttcagggctggtttctctgttcatatccaattctggtgcttaggaacagggacccatgctgatgcccaagggcaaaaagccccacttcctttaaggaagtgaacaggcctgaccctgatgcccaataacgggcaaccctaggctttttgtttttcttgcttttattcctttttgttgttggccttgtgctgcgtttgtttacaaaagatgtattttgtttaaccaaatattaaaaatggaaaactccatatatgtctccttgtctgcctgaattctataattgtgtaaagaaaaataaactttagtatgacgctgttttaaaaggag

SEQ ID NO: 442060 - DNA, 3836 bp, Homo sapiens
  misc_feature (3586)..(3586): n is a, c, g, or t
  misc_feature (3721)..(3721): n is a, c, g, or t
ggcccagttggcggcgcgcactccaggtggcggccggctgcgggccgcggccagagggctagaatccgcgccttccgagggagccgcgccctgcgggccccaccgtacccgaggggatggagggctgcccccgaggcccccgcgcggctcgcggtcccacgcctgccggcccgcgctagctactcgactcgtgcgctaaatttatccgtcacccaggccttgtctcccgagtcattggcgtcgtggttcaaaagaaatggaagaaaaggagcgatgtgaccgattgtgttcggtcctcctgctttgaggcctggcatttgcagagggaaacagcaagaaaatcgtggggattttggaggggggtgggagggaagggtggggaaacggaaacaaggtcttacattttatgtgtttttttaaattctgcactttgacagtggtagcaaaataaaagtaatccaaaagttatttttctattgagaagagagaagaggtgggttttatttttttccttttgattccaatcttttctcccagtgacaaagcataaatcatggacaccagagaataaggtggacctcaggaatccggaaaagactgagaagcttacattcttcctctagagggaagagtggggtgtttatagccatctctggaacctaaaacaaaaaacatgagttgtgtgccatggaaaggagacaaggccaaatctgaatcattggagctgccccaggcagcacccccacaaatctaccatgagaaacagcgcagggagctttgtgccctccacgccctcaataacgtcttccaggacagcaatgccttcacccgggatacgctgcaagagattttccagaggttgtctccaaacaccatggtgacacctcacaagaagagcatgctgggaaatggcaactacgatgtgaatgtcattatggcagcacttcagaccaaaggctatgaagctgtttggtgggacaagcgcagggatgtcggtgtcattgccctcactaacgtcatgggcttcatcatgaatctgccctccagcctatgctggggtccactgaaactgcccctcaaaaggcagcactggatctgtgttcgagaggtgggaggggcctactacaacctcgactccaaactcaagatgcccgagtggattggaggcgagagcgagctcaggaagtttctaaaacatcatttgcgaggaaagaactgtgaactcctgctggtggtaccagaagaggtagaggctcatcagagttggaggaccgatgtgtaacagttctgcccaacctccctctcgcctcagccccttcagtcctctgtgacgtgctgtggcctctacagtgggtctgcccttgccacttccccaaacatctcatcaagtttttccccttcagatctgacagtgcaataggacagacgtgtggactgttataagaactactcagtgttttgttcctgggcaaggaaggtaggagttctgtgcacttaaggccagtggtcacaaacccttgttttatttaagagacagaggagaaagtggagcggggagggaatcctagcttattttcccttttctatgaggacttgacacaggttctgctgagttgtcactgctgctccagactcacctagagatgctgcctccactttccatcctgtctgggtctgaaaacagtgggtctgcagatagtgcccacaaaccccatgtgactggtttgaaggacccagagcataaaggtctctcaggaaaccatgtccaaaaccctagcagcggtacagcatgctgtctccaacccttatccccaggtttaagggtggtttatggccatacgtggaggttttttgttgttgtttttgagactgagtttcactcttgttgcccaggctggagtgcaatggcaccatctcggctcactgcaacctccacctcctggttcaagcgattctcaggcctcagcttcccaagtagttgggattacaggcgcctgccaccacacctggctaattttgtatttttagtagagatggggtttctccatgttggtcaggctggtctcaaactcccgacctcaagtgatctgcccgccttggcctcccaaagtgctgggattacaggcgtgagccaccgcacccggcagagttttataatgaaaaattaactaatattctagtatgaagtgaggaggatactgaacaggatgtggctaaagccaacctgggacagccatggggtggcttggtttcttcactccagtgttgtccctaccatttcgcagcattgatttaggaggctctgggacaaaagagaagccaaagagcagttttcccagttcactcactctggcaaaatcaggaaaaaaaagtctgcttttgacatcaaattccactaatttggggcagcgttgggtgaggaaagtattgtgaagacaggcttcttggagtaggggcagccacaattcagtagacactctaggctcggaggctgccactgtagttgccaagctcaggttgggtggttctgtgctgtatggatggaataggacctgggctggtcatcttcatgtcgtttcctctctgtatcaatggaagttcaacccgcccctacctcttcagatagttgtaggccacttttctcttgtaactttggaaaacaaaagaggagaaataagtatcataccatatgcgtgtctccaaagtggatgtggttgcctcaaggcaggtggcaggcaggggtgacctgctggccctcagatcaatggtcgtggcaggtctgagagctgtcccactggccagacttctctccagcagcaaagccagcctggggcttgcatgttgatcctgagcaagcttaacggggtgaagctgggctttctcccccctgtgactggagtgcatgttgacaccagcactttttctgcacatgtatcttcaatccaacaaggccgtttttttaatgctgagtaacaggccaccaagcggctactgcgttatatcttctcagcaactggccgcagtctcttctgcaccattttctacaccagacctgcttggcaccacagggagctcttttcctgccctgcacaatgacattccaaccaccaccagccagacattacagccaaccttgctgattgtcacaagcaggaccttggggccactggcactgtcagatagtaagccatttcttgggtagaggaggaaactcctctccacaaatccacttgggcctgtgcaaatggcacttgaaagagtccccatgcacttggagtccatgagccaatgggatatgcaaagacgcttaaacatttcagggctggtttctctgttcatatccaattctggtgcttaggaacagggacccatgctgatgcccaagggcaaaaagccccacttcctttaaggaagtgaacaggcctgaccctgatgcccaataacgggcaaccctaggctttttgtttttcttgcttttattcctttttgttgttggccttgtgctgcgtttgtttacaaaagatgtattttgtttaaccaaatattaaaaatggaaaactccaaaaaaaaaaaaaaaaaaaaaaanaaaaaatgttggggcggctttggccaaacgattctagaattaaagcaacttaatattgggcccgaaattgaggcgatttggccaatatcccataatggggggggttaaaattaactgcggggggttttaaaaacnggaatgggaaaaaaaggggggcccacctaaataagtgggggaaaaaccctttctcacttggggttataaaaaaacccgccccccccccttccaaaaataggaaccgatggggagg

SEQ ID NO: 442061 - DNA, 2270 bp, Homo sapiens
ggcccagttggcggcgcgcactccaggtggcggccggctgcgggccgcggccagagggctagaatccgcgccttccgagggagccgcgccctgcgggccccaccgtacccgaggggatggagggctgcccccgaggcccccgcgcggctcgcggtcccacgcctgccggcccgcgctagctactcgactcgtgcgctaaatttatccgtcacccaggccttgtctcccgagtcattggcgtcgtggttcaaaagaaatggaagaaaaggagcgatgtgaccgattgtgttcggtcctcctgctttgaggcctggcatttgcagagggaaacagcaagaaaatcgtggggattttggaggggggtgggagggaagggtggggaaacggaaacaaggtcttacattttatgtgtttttttaaattctgcactttgacagtggtagcaaaataaaagtaatccaaaagttatttttctattgagaagagagaagaggtgggttttatttttttccttttgattccaatcttttctcccagtgacaaagcataaatcatggacaccagagaataaggtggacctcaggaatccggaaaagactgagaagcttacattcttcctctagagggaagagtggggtgtttatagccatctctggaacctaaaacaaaaaacatgagttgtgtgccatggaaaggagacaaggccaaatctgaatcattggagctgccccaggcagcacccccacaaatctaccatgagaaacagcgcagggagctttgtgccctccacgccctcaataacgtcttccaggacagcaatgccttcacccgggatacgctgcaagagattttccagaggttgtctccaaacaccatggtgacacctcacaagaagagcatgctgggaaatggcaactacgatgtgaatgtcattatggcagcacttcagaccaaaggctatgaagctgtttggtgggacaagcgcagggatgtcggtgtcattgccctcactaacgtcatgggcttcatcatgaatctgccctccagcctatgctggggtccactgaaactgcccctcaaaaggcagcactggatctgtgttcgagaggtgggaggggcctactacaacctcgactccaaactcaagatgcccgagtggattggaggcgagagcgagctcaggaagtttctaaaacatcatttgcgaggaaagaactgtgaactcctgctggtggtaccagaagaggtagaggctcatcagagttggaggaccgatgtgtaacagttctgcccaacctccctctcgcctcagccccttcagtcctctgtgacgtgctgtggcctctacagtgggtctgcccttgccacttccccaaacatctcatcaagtttttccccttcagatctgacagtgcaataggacagacgtgtggactgttataagaactactcagtgttttgttcctgggcaaggaaggtaggagttctgtgcacttaaggccagtggtcacaaacccttgttttatttaagagacagaggagaaagtggagcggggagggaatcctagcttattttcccttttctatgaggacttgacacaggttctgctgagttgtcactgctgctccagactcacctagagatgctgcctccactttccatcctgtctgggtctgaaaacagtgggtctgcagatagtgcccacaaaccccatgtgactggtttgaaggacccagagcataaaggtctctcaggaaaccatgtccaaaaccctagcagcggtacagcatgctgtctccaacccttatccccaggtttaagggtggtttatggccatacgtggaggttttttgttgttgtttttgagactgagtttcactcttgttgcccaggctggagtgcaatggcaccatctcggctcactgcaacctccacctcctggttcaagcgattctcaggcctcagcttcccaagtagttgggattacaggcgcctgccaccacacctggctaattttgtatttttagtagagatggggtttctccatgttggtcaggctggtctcaaactcccgacctcaagtgatctgcccgccttggcctcccaaagtgctgggattacaggcgtgagccaccgcacccggcagagttttataatgaaaaattaactaatattctagtatgaagtgaggaggatactgaacaggatagcttgccgtggtaccgaggctcgaaattacgtacatcaatggtccatagcctgttttcca

SEQ ID NO: 442062 - DNA, 1574 bp, Homo sapiens
ggcccagttggcggcgcgcactccaggtggcggccggctgcgggccgcggccagagggctagaatccgcgccttccgagggagccgcgccctgcgggccccaccgtacccgaggggatggagggctgcccccgaggcccccgcgcggctcgcggtcccacgcctgccggcccgcgctagctactcgactcgtgcgctaaatttatccgtcacccaggccttgtctcccgagtcattggcgtcgtggttcaaaagaaatggaagaaaaggagcgatgtgaccgattgtgttcggtcctcctgctttgaggcctggcatttgcagagggaaacagcaagaaaatcgtggggattttggaggggggtgggagggaagggtggggaaacggaaacaaggtcttacattttatgtgtttttttaaattctgcactttgacagtggtagcaaaataaaagtaatccaaaagttatttttctattgagaagagagaagaggtgggttttatttttttccttttgattccaatcttttctcccagtgacaaagcataaatcatggacaccagagaataaggtggacctcaggaatccggaaaagactgagaagcttacattcttcctctagagggaagagtggggtgtttatagccatctctggaacctaaaacaaaaaacatgagttgtgtgccatggaaaggagacaaggccaaatctgaatcattggagctgccccaggcagcacccccacaaatctaccatgagaaacagcgcagggagctttgtgccctccacgccctcaataacgtcttccaggacagcaatgccttcacccgggatacgctgcaagagattttccagaggttgtctccaaacaccatggtgacacctcacaagaagagcatgctgggaaatggcaactacgatgtgaatgtcattatggcagcacttcagaccaaaggctatgaagctgtttggtgggacaagcgcagggatgtcggtgtcattgccctcactaacgtcatgggcttcatcatgaatctgccctccagcctatgctggggtccactgaaactgcccctcaaaaggcagcactggatctgtgttcgagaggtgggaggggcctactacaacctcgactccaaactcaagatgcccgagtggattggaggcgagagcgagctcaggaagtttctaaaacatcatttgcgaggaaagaactgtgaactcctgctggtggtaccagaagaggtagaggctcatcagagttggaggaccgatgtgtaacagttctgcccaacctccctctcgcctcagccccttcagtcctctgtgacgtgctgtggcctctacagtgggtctgcccttgccacttccccaaacatctcatcaagtttttccccttcagatctgacagtgcaataggacagacgtgtggactgttataagaactactcagtgttttgttcctgggcaacagcgagaatctgtctcaaaaaataataataatagtaaatagagtaagtgaggcacgagattgggcccttcaatctcaaagtccccaaagcgaataagggga

SEQ ID NO: 442063 - DNA, 3563 bp, Homo sapiens
ggcccagttggcggcgcgcactccaggtggcggccggctgcgggccgcggccagagggctagaatccgcgccttccgagggagccgcgccctgcgggccccaccgtacccgaggggatggagggctgcccccgaggcccccgcgcggctcgcggtcccacgcctgccggcccgcgctagctactcgactcgtgcgctaaatttatccgtcacccaggccttgtctcccgagtcattggcgtcgtggttcaaaagaaatggaagaaaaggagcgatgtgaccgattgtgttcggtcctcctgctttgaggcctggcatttgcagagggaaacagcaagaaaatcgtggggattttggaggggggtgggagggaagggtggggaaacggaaacaaggtcttacattttatgtgtttttttaaattctgcactttgacagtggtagcaaaataaaagtaatccaaaagttatttttctattgagaagagagaagaggtgggttttatttttttccttttgattccaatcttttctcccagtgacaaagcataaatcatggacaccagagaataaggtggacctcaggaatccggaaaagactgagaagcttacattcttcctctagagggaagagtggggtgtttatagccatctctggaacctaaaacaaaaaacatgagttgtgtgccatggaaaggagacaaggccaaatctgaatcattggagctgccccaggcagcacccccacaaatctaccatgagaaacagcgcagggagctttgtgccctccacgccctcaataacgtcttccaggacagcaatgccttcacccgggatacgctgcaagagattttccagaggttgtctccaaacaccatggtgacacctcacaagaagagcatgctgggaaatggcaactacgatgtgaatgtcattatggcagcacttcagaccaaaggctatgaagctgtttggtgggacaagcgcagggatgtcggtgtcattgccctcactaacgtcatgggcttcatcatgaatctgccctccagcctatgctggggtccactgaaactgcccctcaaaaggcagcactggatctgtgttcgagaggtgggaggggcctactacaacctcgactccaaactcaagatgcccgagtggattggaggcgagagcgagctcaggaagtttctaaaacatcatttgcgaggaaagaactgtgaactcctgctggtggtaccagaagaggtagaggctcatcagagttggaggaccgatgtgtaacagttctgcccaacctccctctcgcctcagccccttcagtcctctgtgacgtgctgtggcctctacagtgggtctgcccttgccacttccccaaacatctcatcaagtttttccccttcagatctgacagtgcaataggacagacgtgtggactgttataagaactactcagtgttttgttcctgggcaaggaaggtaggagttctgtgcacttaaggccagtggtcacaaacccttgttttatttaagagacagaggagaaagtggagcggggagggaatcctagcttattttcccttttctatgaggacttgacacaggttctgctgagttgtcactgctgctccagactcacctagagatgctgcctccactttccatcctgtctgggtctgaaaacagtgggtctgcagatagtgcccacaaaccccatgtgactggtttgaaggacccagagcataaaggtctctcaggaaaccatgtccaaaaccctagcagcggtacagcatgctgtctccaacccttatccccaggtttaagggtggtttatggccatacgtggaggttttttgttgttgtttttgagactgagtttcactcttgttgcccaggctggagtgcaatggcaccatctcggctcactgcaacctccacctcctggttcaagcgattctcaggcctcagcttcccaagtagttgggattacaggcgcctgccaccacacctggctaattttgtatttttagtagagatggggtttctccatgttggtcaggctggtctcaaactcccgacctcaagtgatctgcccgccttggcctcccaaagtgctgggattacaggcgtgagccaccgcacccggcagagttttataatgaaaaattaactaatattctagtatgaagtgaggaggatactgaacaggatgtggctaaagccaacctgggacagccatggggtggcttggtttcttcactccagtgttgtccctaccatttcgcagcattgatttaggaggctctgggacaaaagagaagccaaagagcagttttcccagttcactcactctggcaaaatcaggaaaaaaaagtctgcttttgacatcaaattccactaatttggggcagcgttgggtgaggaaagtattgtgaagacaggcttcttggagtaggggcagccacaattcagtagacactctaggctcggaggctgccactgtagttgccaagctcaggttgggtggttctgtgctgtatggatggaataggacctgggctggtcatcttcatgtcgtttcctctctgtatcaatggaagttcaacccgcccctacctcttcagatagttgtaggccacttttctcttgtaactttggaaaacaaaagaggagaaataagtatcataccatatgcgtgtctccaaagtggatgtggttgcctcaaggcaggtggcaggcaggggtgacctgctggccctcagatcaatggtcgtggcaggtctgagagctgtcccactggccagacttctctccagcagcaaagccagcctggggcttgcatgttgatcctgagcaagcttaacggggtgaagctgggctttctcccccctgtgactggagtgcatgttgacaccagcactttttctgcacatgtatcttcaatccaacaaggccgtttttttaatgctgagtaacaggccaccaagcggctactgcgttatatcttctcagcaactggccgcagtctcttctgcaccattttctacaccagacctgcttggcaccacagggagctcttttcctgccctgcacaatgacattccaaccaccaccagccagacattacagccaaccttgctgattgtcacaagcaggaccttggggccactggcactgtcagatagtaagccatttcttgggtagaggaggaaactcctctccacaaatccacttgggcctgtgcaaatggcacttgaaagagtccccatgcacttggagtccatgagccaatgggatatgcaaagacgcttaaacatttcagggctggtttctctgttcatatccaattctggtgcttaggaacagggacccatgctgatgcccaagggcaaaaagccccacttcctttaaggaagtgaacaggcctgaccctgatgcccaataacgggcaaccctaggctttttgtttttcttgcttttattcctttttgttgttggccttgtgctgcgtttgtttacaaaagatgtattttgtttaaccaaatattaaaaatggaaaactcca

SEQ ID NO: 442064 - DNA, 3503 bp, Homo sapiens
ggcccagttggcggcgcgcactccaggtggcggccggctgcgggccgcggccagagggctagaatccgcgccttccgagggagccgcgccctgcgggccccaccgtacccgaggggatggagggctgcccccgaggcccccgcgcggctcgcggtcccacgcctgccggcccgcgctagctactcgactcgtgcgctaaatttatccgtcacccaggccttgtctcccgagtcattggcgtcgtggttcaaaagaaatggaagaaaaggagcgatgtgaccgattgtgttcggtcctcctgctttgaggcctggcatttgcagagggaaacagcaagaaaatcgtggggattttggaggggggtgggagggaagggtggggaaacggaaacaaggtcttacattttatgtgtttttttaaattctgcactttgacagtggtagcaaaataaaagtaatccaaaagttatttttctattgagaagagagaagaggtgggttttatttttttccttttgattccaatcttttctcccagtgacaaagcataaatcatggacaccagagaataaggtggacctcaggaatccggaaaagactgagaagcttacattcttcctctagagggaagagtggggtgtttatagccatctctggaacctaaaacaaaaaacatgagttgtgtgccatggaaaggagacaaggccaaatctgaatcattggagctgccccaggcagcacccccacaaatctaccatgagaaacagcgcagggagctttgtgccctccacgccctcaataacgtcttccaggacagcaatgccttcacccgggatacgctgcaagagattttccagaggttgtctccaaacaccatggtgacacctcacaagaagagcatgctgggaaatggcaactacgatgtgaatgtcattatggcagcacttcagaccaaaggctatgaagctgtttggtgggacaagcgcagcctatgctggggtccactgaaactgcccctcaaaaggcagcactggatctgtgttcgagaggtgggaggggcctactacaacctcgactccaaactcaagatgcccgagtggattggaggcgagagcgagctcaggaagtttctaaaacatcatttgcgaggaaagaactgtgaactcctgctggtggtaccagaagaggtagaggctcatcagagttggaggaccgatgtgtaacagttctgcccaacctccctctcgcctcagccccttcagtcctctgtgacgtgctgtggcctctacagtgggtctgcccttgccacttccccaaacatctcatcaagtttttccccttcagatctgacagtgcaataggacagacgtgtggactgttataagaactactcagtgttttgttcctgggcaaggaaggtaggagttctgtgcacttaaggccagtggtcacaaacccttgttttatttaagagacagaggagaaagtggagcggggagggaatcctagcttattttcccttttctatgaggacttgacacaggttctgctgagttgtcactgctgctccagactcacctagagatgctgcctccactttccatcctgtctgggtctgaaaacagtgggtctgcagatagtgcccacaaaccccatgtgactggtttgaaggacccagagcataaaggtctctcaggaaaccatgtccaaaaccctagcagcggtacagcatgctgtctccaacccttatccccaggtttaagggtggtttatggccatacgtggaggttttttgttgttgtttttgagactgagtttcactcttgttgcccaggctggagtgcaatggcaccatctcggctcactgcaacctccacctcctggttcaagcgattctcaggcctcagcttcccaagtagttgggattacaggcgcctgccaccacacctggctaattttgtatttttagtagagatggggtttctccatgttggtcaggctggtctcaaactcccgacctcaagtgatctgcccgccttggcctcccaaagtgctgggattacaggcgtgagccaccgcacccggcagagttttataatgaaaaattaactaatattctagtatgaagtgaggaggatactgaacaggatgtggctaaagccaacctgggacagccatggggtggcttggtttcttcactccagtgttgtccctaccatttcgcagcattgatttaggaggctctgggacaaaagagaagccaaagagcagttttcccagttcactcactctggcaaaatcaggaaaaaaaagtctgcttttgacatcaaattccactaatttggggcagcgttgggtgaggaaagtattgtgaagacaggcttcttggagtaggggcagccacaattcagtagacactctaggctcggaggctgccactgtagttgccaagctcaggttgggtggttctgtgctgtatggatggaataggacctgggctggtcatcttcatgtcgtttcctctctgtatcaatggaagttcaacccgcccctacctcttcagatagttgtaggccacttttctcttgtaactttggaaaacaaaagaggagaaataagtatcataccatatgcgtgtctccaaagtggatgtggttgcctcaaggcaggtggcaggcaggggtgacctgctggccctcagatcaatggtcgtggcaggtctgagagctgtcccactggccagacttctctccagcagcaaagccagcctggggcttgcatgttgatcctgagcaagcttaacggggtgaagctgggctttctcccccctgtgactggagtgcatgttgacaccagcactttttctgcacatgtatcttcaatccaacaaggccgtttttttaatgctgagtaacaggccaccaagcggctactgcgttatatcttctcagcaactggccgcagtctcttctgcaccattttctacaccagacctgcttggcaccacagggagctcttttcctgccctgcacaatgacattccaaccaccaccagccagacattacagccaaccttgctgattgtcacaagcaggaccttggggccactggcactgtcagatagtaagccatttcttgggtagaggaggaaactcctctccacaaatccacttgggcctgtgcaaatggcacttgaaagagtccccatgcacttggagtccatgagccaatgggatatgcaaagacgcttaaacatttcagggctggtttctctgttcatatccaattctggtgcttaggaacagggacccatgctgatgcccaagggcaaaaagccccacttcctttaaggaagtgaacaggcctgaccctgatgcccaataacgggcaaccctaggctttttgtttttcttgcttttattcctttttgttgttggccttgtgctgcgtttgtttacaaaagatgtattttgtttaaccaaatattaaaaatggaaaactcca

SEQ ID NO: 442065 - DNA, 3509 bp, Homo sapiens
ggcccagttggcggcgcgcactccaggtggcggccggctgcgggccgcggccagagggctagaatccgcgccttccgagggagccgcgccctgcgggccccaccgtacccgaggggatggagggctgcccccgaggcccccgcgcggctcgcggtcccacgcctgccggcccgcgctagctactcgactcgtgcgctaaatttatccgtcacccaggccttgtctcccgagtcattggcgtcgtggttcaaaagaaatggaagaaaaggagcgatgtgaccgattgtgttcggtcctcctgctttgaggcctggcatttgcagagggaaacagcaagaaaatcgtggggattttggaggggggtgggagggaagggtggggaaacggaaacaaggtcttacattttatgtgtttttttaaattctgcactttgacagtggtagcaaaataaaagtaatccaaaagttatttttctattgagaagagagaagaggtgggttttatttttttccttttgattccaatcttttctcccagtgacaaagcataaatcatggacaccagagaataaggtggacctcaggaatccggaaaagactgagaagcttacattcttcctctagagggaagagtggggtgtttatagccatctctggaacctaaaacaaaaaacatgagttgtgtgccatggaaaggagacaaggccaaatctgaatcattggagctgccccaggcagcacccccacaaatctaccatgagaaacagcgcagggagctttgtgccctccacgccctcaataacgtcttccaggacagcaatgccttcacccgggatacgctgcaagagattttccagaggttgtctccaaacaccatggtgacacctcacaagaagagcatgctgggaaatggcaactacgatgtgaatgtcattatggcagcacttcagaccaaaggctatgaagctgtttggtgggacaagcgcagggatgtcggtgtcattgccctcactaacgtcatgggcttcatcatgaatctgccctccagcctatgctggggtccactgaaactgcccctcaaaaggcagcactggatctgtgttcgagaggtgggaggggcctactacaacctcgactccaaactcaagatgcccgagtggattggaggcgagagcgagctcaggaagtttctaaaacatcatttgcgaggaaagaactgtgaactcctgctggtggtaccagaagaggtagaggctcatcagagttggaggaccgatgtgtaacagttctgcccaacctccctctcgcctcagccccttcagtcctctgtgacgtgctgtggcctctacagtgggtctgcccttgccacttccccaaacatctcatcaagtttttccccttcagatctgacagtgcaataggacagacgtgtggactgttataagaactactcagtgttttgttcctgggcaaggaaggtaggagttctgtgcacttaaggccagtggtcacaaacccttgttttatttaagagacagaggagaaagtggagcggggagggaatcctagcttattttcccttttctatgaggacttgacacaggttctgctgagttgtcactgctgctccagactcacctagagatgctgcctccactttccatcctgtctgggtctgaaaacagtgggtctgcagatagtgcccacaaaccccatgtgactggtttgaaggacccagagcataaaggtctctcaggaaaccatgtccaaaaccctagcagcggtacagcatgctgtctccaacccttatccccaggtttaagggtggtttatggccatacgtggaggttttttgttgttgtttttgagactgagtttcactcttgttgcccaggctggagtgcaatggcaccatctcggctcactgcaacctccacctcctggttcaagcgattctcaggcctcagcttcccaagtagttgggattacaggcgcctgccaccacacctggctaattttgtatttttagtagagatggggtttctccatgttggtcaggctggtctcaaactcccgacctcaagtgatctgcccgccttggcctcccaaagtgctgggattacaggcgtgagccaccgcacccggcagagttttataatgaaaaattaactaatattctagtatgaagtgaggaggatactgaacaggatgtggctaaagccaacctgggacagccatggggtggcttggtttcttcactccagtgttgtccctaccatttcgcagcattgatttaggaggctctgggacaaaagagaagccaaagagcagttttcccagttcactcactctggcaaaatcaggaaaaaaaatattgtgaagacaggcttcttggagtaggggcagccacaattcagtagacactctaggctcggaggctgccactgtagttgccaagctcaggttgggtggttctgtgctgtatggatggaataggacctgggctggtcatcttcatgtcgtttcctctctgtatcaatggaagttcaacccgcccctacctcttcagatagttgtaggccacttttctcttgtaactttggaaaacaaaagaggagaaataagtatcataccatatgcgtgtctccaaagtggatgtggttgcctcaaggcaggtggcaggcaggggtgacctgctggccctcagatcaatggtcgtggcaggtctgagagctgtcccactggccagacttctctccagcagcaaagccagcctggggcttgcatgttgatcctgagcaagcttaacggggtgaagctgggctttctcccccctgtgactggagtgcatgttgacaccagcactttttctgcacatgtatcttcaatccaacaaggccgtttttttaatgctgagtaacaggccaccaagcggctactgcgttatatcttctcagcaactggccgcagtctcttctgcaccattttctacaccagacctgcttggcaccacagggagctcttttcctgccctgcacaatgacattccaaccaccaccagccagacattacagccaaccttgctgattgtcacaagcaggaccttggggccactggcactgtcagatagtaagccatttcttgggtagaggaggaaactcctctccacaaatccacttgggcctgtgcaaatggcacttgaaagagtccccatgcacttggagtccatgagccaatgggatatgcaaagacgcttaaacatttcagggctggtttctctgttcatatccaattctggtgcttaggaacagggacccatgctgatgcccaagggcaaaaagccccacttcctttaaggaagtgaacaggcctgaccctgatgcccaataacgggcaaccctaggctttttgtttttcttgcttttattcctttttgttgttggccttgtgctgcgtttgtttacaaaagatgtattttgtttaaccaaatattaaaaatggaaaactcca

SEQ ID NO: 442066 - DNA, 3991 bp, Homo sapiens
  misc_feature (3586)..(3586): n is a, c, g, or t
ggcccagttggcggcgcgcactccaggtggcggccggctgcgggccgcggccagagggctagaatccgcgccttccgagggagccgcgccctgcgggccccaccgtacccgaggggatggagggctgcccccgaggcccccgcgcggctcgcggtcccacgcctgccggcccgcgctagctactcgactcgtgcgctaaatttatccgtcacccaggccttgtctcccgagtcattggcgtcgtggttcaaaagaaatggaagaaaaggagcgatgtgaccgattgtgttcggtcctcctgctttgaggcctggcatttgcagagggaaacagcaagaaaatcgtggggattttggaggggggtgggagggaagggtggggaaacggaaacaaggtcttacattttatgtgtttttttaaattctgcactttgacagtggtagcaaaataaaagtaatccaaaagttatttttctattgagaagagagaagaggtgggttttatttttttccttttgattccaatcttttctcccagtgacaaagcataaatcatggacaccagagaataaggtggacctcaggaatccggaaaagactgagaagcttacattcttcctctagagggaagagtggggtgtttatagccatctctggaacctaaaacaaaaaacatgagttgtgtgccatggaaaggagacaaggccaaatctgaatcattggagctgccccaggcagcacccccacaaatctaccatgagaaacagcgcagggagctttgtgccctccacgccctcaataacgtcttccaggacagcaatgccttcacccgggatacgctgcaagagattttccagaggttgtctccaaacaccatggtgacacctcacaagaagagcatgctgggaaatggcaactacgatgtgaatgtcattatggcagcacttcagaccaaaggctatgaagctgtttggtgggacaagcgcagggatgtcggtgtcattgccctcactaacgtcatgggcttcatcatgaatctgccctccagcctatgctggggtccactgaaactgcccctcaaaaggcagcactggatctgtgttcgagaggtgggaggggcctactacaacctcgactccaaactcaagatgcccgagtggattggaggcgagagcgagctcaggaagtttctaaaacatcatttgcgaggaaagaactgtgaactcctgctggtggtaccagaagaggtagaggctcatcagagttggaggaccgatgtgtaacagttctgcccaacctccctctcgcctcagccccttcagtcctctgtgacgtgctgtggcctctacagtgggtctgcccttgccacttccccaaacatctcatcaagtttttccccttcagatctgacagtgcaataggacagacgtgtggactgttataagaactactcagtgttttgttcctgggcaaggaaggtaggagttctgtgcacttaaggccagtggtcacaaacccttgttttatttaagagacagaggagaaagtggagcggggagggaatcctagcttattttcccttttctatgaggacttgacacaggttctgctgagttgtcactgctgctccagactcacctagagatgctgcctccactttccatcctgtctgggtctgaaaacagtgggtctgcagatagtgcccacaaaccccatgtgactggtttgaaggacccagagcataaaggtctctcaggaaaccatgtccaaaaccctagcagcggtacagcatgctgtctccaacccttatccccaggtttaagggtggtttatggccatacgtggaggttttttgttgttgtttttgagactgagtttcactcttgttgcccaggctggagtgcaatggcaccatctcggctcactgcaacctccacctcctggttcaagcgattctcaggcctcagcttcccaagtagttgggattacaggcgcctgccaccacacctggctaattttgtatttttagtagagatggggtttctccatgttggtcaggctggtctcaaactcccgacctcaagtgatctgcccgccttggcctcccaaagtgctgggattacaggcgtgagccaccgcacccggcagagttttataatgaaaaattaactaatattctagtatgaagtgaggaggatactgaacaggatgtggctaaagccaacctgggacagccatggggtggcttggtttcttcactccagtgttgtccctaccatttcgcagcattgatttaggaggctctgggacaaaagagaagccaaagagcagttttcccagttcactcactctggcaaaatcaggaaaaaaaagtctgcttttgacatcaaattccactaatttggggcagcgttgggtgaggaaagtattgtgaagacaggcttcttggagtaggggcagccacaattcagtagacactctaggctcggaggctgccactgtagttgccaagctcaggttgggtggttctgtgctgtatggatggaataggacctgggctggtcatcttcatgtcgtttcctctctgtatcaatggaagttcaacccgcccctacctcttcagatagttgtaggccacttttctcttgtaactttggaaaacaaaagaggagaaataagtatcataccatatgcgtgtctccaaagtggatgtggttgcctcaaggcaggtggcaggcaggggtgacctgctggccctcagatcaatggtcgtggcaggtctgagagctgtcccactggccagacttctctccagcagcaaagccagcctggggcttgcatgttgatcctgagcaagcttaacggggtgaagctgggctttctcccccctgtgactggagtgcatgttgacaccagcactttttctgcacatgtatcttcaatccaacaaggccgtttttttaatgctgagtaacaggccaccaagcggctactgcgttatatcttctcagcaactggccgcagtctcttctgcaccattttctacaccagacctgcttggcaccacagggagctcttttcctgccctgcacaatgacattccaaccaccaccagccagacattacagccaaccttgctgattgtcacaagcaggaccttggggccactggcactgtcagatagtaagccatttcttgggtagaggaggaaactcctctccacaaatccacttgggcctgtgcaaatggcacttgaaagagtccccatgcacttggagtccatgagccaatgggatatgcaaagacgcttaaacatttcagggctggtttctctgttcatatccaattctggtgcttaggaacagggacccatgctgatgcccaagggcaaaaagccccacttcctttaaggaagtgaacaggcctgaccctgatgcccaataacgggcaaccctaggctttttgtttttcttgcttttattcctttttgttgttggccttgtgctgcgtttgtttacaaaagatgtattttgtttaaccaaatattaaaaatggaaaactccaaaaaaaaaaaaaaaaaaaaaaanaaaaaaaaaaagaaaaaaaacagaacgcaaaacacaaaaaaagggggggggggggaaaagaacccgggggggacaccagatagcgtcgcgccgattttgtgaaacaacggcgcccactaggggaccatataaagccagagcgggggcgcgtaaaaacagcggcggcgggcgacaaaccgcctctgcgtcatgtgggggaagaacccttctgcggggggcacaatggcaccccccaccgatgacaggcggggaaaaaaagcttggtgttggtggtgcacccgccatgtccgtgcaaggctgctaataaatctctacattcatacgtagatacatagagacgactcagcagtgcacgtgaatgtcatcatgatagcagcagaacatacgtctgcgcacgagaatgaa

SEQ ID NO: 442067 - DNA, 3587 bp, Homo sapiens
ggcccagttggcggcgcgcactccaggtggcggccggctgcgggccgcggccagagggctagaatccgcgccttccgagggagccgcgccctgcgggccccaccgtacccgaggggatggagggctgcccccgaggcccccgcgcggctcgcggtcccacgcctgccggcccgcgctagctactcgactcgtgcgctaaatttatccgtcacccaggccttgtctcccgagtcattggcgtcgtggttcaaaagaaatggaagaaaaggagcgatgtgaccgattgtgttcggtcctcctgctttgaggcctggcatttgcagagggaaacagcaagaaaatcgtggggattttggaggggggtgggagggaagggtggggaaacggaaacaaggtcttacattttatgtgtttttttaaattctgcactttgacagtggtagcaaaataaaagtaatccaaaagttatttttctattgagaagagagaagaggtgggttttatttttttccttttgattccaatcttttctcccagtgacaaagcataaatcatggacaccagagaataaggtggacctcaggaatccggaaaagactgagaagcttacattcttcctctagagggaagagtggggtgtttatagccatctctggaacctaaaacaaaaaacatgagttgtgtgccatggaaaggagacaaggccaaatctgaatcattggagctgccccaggcagcacccccacaaatctaccatgagaaacagcgcagggagctttgtgccctccacgccctcaataacgtcttccaggacagcaatgccttcacccgggatacgctgcaagagattttccagaggttgtctccaaacaccatggtgacacctcacaagaagagcatgctgggaaatggcaactacgatgtgaatgtcattatggcagcacttcagaccaaaggctatgaagctgtttggtgggacaagcgcagggatgtcggtgtcattgccctcactaacgtcatgggcttcatcatgaatctgccctccagcctatgctggggtccactgaaactgcccctcaaaaggcagcactggatctgtgttcgagaggtgggaggggcctactacaacctcgactccaaactcaagatgcccgagtggattggaggcgagagcgagctcaggaagtttctaaaacatcatttgcgaggaaagaactgtgaactcctgctggtggtaccagaagaggtagaggctcatcagagttggaggaccgatgtgtaacagttctgcccaacctccctctcgcctcagccccttcagtcctctgtgacgtgctgtggcctctacagtgggtctgcccttgccacttccccaaacatctcatcaagtttttccccttcagatctgacagtgcaataggacagacgtgtggactgttataagaactactcagtgttttgttcctgggcaaggaaggtaggagttctgtgcacttaaggccagtggtcacaaacccttgttttatttaagagacagaggagaaagtggagcggggagggaatcctagcttattttcccttttctatgaggacttgacacaggttctgctgagttgtcactgctgctccagactcacctagagatgctgcctccactttccatcctgtctgggtctgaaaacagtgggtctgcagatagtgcccacaaaccccatgtgactggtttgaaggacccagagcataaaggtctctcaggaaaccatgtccaaaaccctagcagcggtacagcatgctgtctccaacccttatccccaggtttaagggtggtttatggccatacgtggaggttttttgttgttgtttttgagactgagtttcactcttgttgcccaggctggagtgcaatggcaccatctcggctcactgcaacctccacctcctggttcaagcgattctcaggcctcagcttcccaagtagttgggattacaggcgcctgccaccacacctggctaattttgtatttttagtagagatggggtttctccatgttggtcaggctggtctcaaactcccgacctcaagtgatctgcccgccttggcctcccaaagtgctgggattacaggcgtgagccaccgcacccggcagagttttataatgaaaaattaactaatattctagtatgaagtgaggaggatactgaacaggatgtggctaaagccaacctgggacagccatggggtggcttggtttcttcactccagtgttgtccctaccatttcgcagcattgatttaggaggctctgggacaaaagagaagccaaagagcagttttcccagttcactcactctggcaaaatcaggaaaaaaaagtctgcttttgacatcaaattccactaatttggggcagcgttgggtgaggaaagtattgtgaagacaggcttcttggagtaggggcagccacaattcagtagacactctaggctcggaggctgccactgtagttgccaagctcaggttgggtggttctgtgctgtatggatggaataggacctgggctggtcatcttcatgtcgtttcctctctgtatcaatggaagttcaacccgcccctacctcttcagatagttgtaggccacttttctcttgtaactttggaaaacaaaagaggagaaataagtatcataccatatgcgtgtctccaaagtggatgtggttgcctcaaggcaggtggcaggcaggggtgacctgctggccctcagatcaatggtcgtggcaggtctgagagctgtcccactggccagacttctctccagcagcaaagccagcctggggcttgcatgttgatcctgagcaagcttaacggggtgaagctgggctttctcccccctgtgactggagtgcatgttgacaccagcactttttctgcacatgtatcttcaatccaacaaggccgtttttttaatgctgagtaacaggccaccaagcggctactgcgttatatcttctcagcaactggccgcagtctcttctgcaccattttctacaccagacctgcttggcaccacagggagctcttttcctgccctgcacaatgacattccaaccaccaccagccagacattacagccaaccttgctgattgtcacaagcaggaccttggggccactggcactgtcagatagtaagccatttcttgggtagaggaggaaactcctctccacaaatccacttgggcctgtgcaaatggcacttgaaagagtccccatgcacttggagtccatgagccaatgggatatgcaaagacgcttggacccatgctgatgcccaagggcaaaaagccccacttcctttaaggaagtgaacaggcctgaccctgatgcccaataacgggcaaccctaggctttttgtttttcttgcttttattcctttttgttgttggccttgtgctgcgtttgtttacaaaagatgtattttgtttaaccaaatattaaaaatggaaaactccatatatgtctccttgtctgcctgaattctataattgtgtaaagaaaaataaactttagtatgacgctgttttaaaaggag

SEQ ID NO: 442068 - DNA, 1852 bp, Homo sapiens
ggcccagttggcggcgcgcactccaggtggcggccggctgcgggccgcggccagagggctagaatccgcgccttccgagggagccgcgccctgcgggccccaccgtacccgaggggatggagggctgcccccgaggcccccgcgcggctcgcggtcccacgcctgccggcccgcgctagctactcgactcgtgcgctaaatttatccgtcacccaggccttgtctcccgagtcattggcgtcgtggttcaaaagaaatggaagaaaaggagcgatgtgaccgattgtgttcggtcctcctgctttgaggcctggcatttgcagagggaaacagcaagaaaatcgtggggattttggaggggggtgggagggaagggtggggaaacggaaacaaggtcttacattttatgtgtttttttaaattctgcactttgacagtggtagcaaaataaaagtaatccaaaagttatttttctattgagaagagagaagaggtgggttttatttttttccttttgattccaatcttttctcccagtgacaaagcataaatcatggacaccagagaataaggtggacctcaggaatccggaaaagactgagaagcttacattcttcctctagagggaagagtggggtgtttatagccatctctggaacctaaaacaaaaaacatgagttgtgtgccatggaaaggagacaaggccaaatctgaatcattggagctgccccaggcagcacccccacaaatctaccatgagaaacagcgcagggagctttgtgccctccacgccctcaataacgtcttccaggacagcaatgccttcacccgggatacgctgcaagagattttccagaggttgtctccaaacaccatggtgacacctcacaagaagagcatgctgggaaatggcaactacgatgtgaatgtcattatggcagcacttcagaccaaaggctatgaagctgtttggtgggacaagcgcagggatgtcggtgtcattgccctcactaacgtcatgggcttcatcatgaatctgccctccagcctatgctggggtccactgaaactgcccctcaaaaggcagcactggatctgtgttcgagaggtgggaggggcctactacaacctcgactccaaactcaagatgcccgagtggattggaggcgagagcgagctcaggaagtttctaaaacatcatttgcgaggaaagaactgtgaactcctgctggtggtaccagaagaggtagaggctcatcagagttggaggaccgatgtgtaacagttctgcccaacctccctctcgcctcagccccttcagtcctctgtgacgtgctgtggcctctacagtgggtctgcccttgccacttccccaaacatctcatcaagtttttccccttcagatctgacagtgcaataggacagacgtgtggactgttataagaactactcagtgttttgttcctgggcaaggaaggtaggagttctgtgcacttaaggccagtggtcacaaatccacttgggcctgtgcaaatggcacttgaaagagtccccatgcacttggagtccatgagccaatgggatatgcaaagacgcttaaacatttcagggctggtttctctgttcatatccaattctggtgcttaggaacagggacccatgctgatgcccaagggcaaaaagccccacttcctttaaggaagtgaacaggcctgaccctgatgcccaataacgggcaaccctaggctttttgtttttcttgcttttattcctttttgttgttggccttgtgctgcgtttgtttacaaaagatgtattttgtttaaccaaatattaaaaatggaaaactcca

SEQ ID NO: 442069 - DNA, 2893 bp, Homo sapiens
  misc_feature (867)..(867): n is a, c, g, or t
  misc_feature (1372)..(1372): n is a, c, g, or t
  misc_feature (2893)..(2893): n is a, c, g, or t
gtcatggagtgtctgcacgggacgtcctggagagtcggacacgtaagcagcacagtgaggccaccaacagcagcaaccgagtcttcgtgtactgcgccttcctggacttcagctccggagaaggggtctggtcgaaccacggctgtgcgctcacgagaggaaacctcacctactccgtctgccgctgcactcacctcaccaactttgccatcctcatgcaggtggtcccgctggaggtcaacattggcatcctcatcgctgtgaccagagtcatctcacagatcagcgccgacaactacaagatccatggagaccccagtgccttcaagttgacggccaaggcagtggccgtgctgctgcccatcctgggtacctcgtgggtctttggcgtgcttgctgtcaacggttgtgctgtggttttccagtacatgtttgccacgctcaactccctgcagggactgttcatattcctctttcattgtctcctgaattcagaggtgagagccgccttcaagcacaaaaccaaggtctggtcgctcacgagcagctccgcccgcacctccaacgcgaagcccttccactcggacctcatgaatgggacccggccaggcatggcctccaccaagctcagcccttgggacaagagcagccactctgcccaccgcgtcgacctgtcagccgtgtgagccgggaggctgccaaccaggccaggctgcgctcagaacacacccccccaaacagaatgaaatgccccacctttgcccatggaccctctccttgctgctgtctggacatgggtgttgtggcccgagacagctgtcctcccctgtgactctggctgtcggagcacactgctcagcccagcangctgatgcccaggccagcgtgggccctcctgccttgcatccacccgtgggctgagtgacttcctcgggggattcccaggacacagtggcctgactgtgatggtgcccttgagcctcccttcatcactcagcatcagacccagcgaggccaggacactcggggccggtcccgcagcaccaggaggggatgttcagcctctgtgccttggtggggcttggggactcagggccaaagaggtggttcaggtccccacgcaccctcagtcaggcgcaggcagctgggggtgtgtggggaagagcatgcggagtccccagtgtctgaatccactgagtggtgagttccccacagccggcgctagccgtggtgtgtgtctctgtaggtggtgccggcgtgggccaacctgtgctgtgtcatcagttgggggcccctgcccaagccgagctcgagccgtgggcgggagtcgttgactctccaggtgagggcgacccctctgccctgtccttgngggggtcccctctgctcacgtgaagagccgctctgggccttgaggctgcctgatggtgcctgtgcttgggggagcttctcggccatccgctgtgagttttgcctctttggaccccaattcggccttaagatgccctcctccctcgtgtgccagcctccttggttgttcttgggccacaggagctggccgtgtccccgcagtgcctggtgtccaggtggaaagtggagggcattttccagggcactgctttccccagaggcttcctcatggctcacaggcactctacgaagtttctaatgggcagaccacgcggcaggtagcacagtgcgctccgtctggtcaccatgagaccgacctgcgctgagtccccactgacctggagagggagggctggtgacagccgtgtcttctgtgttgagggaaatttatggactcagactcagccccagaggagatgggataattgttatggacccatgtgtgggcatgatcctgtggaacacaggtttgggatcatagatgtgaattaagacaccaccgagatacgggctgtgaggttcatactgtgctgatagcactcgtggtgtctgtgaaatgtgggtaagacattcaaacctggttttgatactggaaactcttcctttaaaactgtgaccatgatttcattcagcccctccacacccctatgtctgccttgtttcagagtgagttttctatggagcctgtggcccttttgcagcccacctggtggcttcttaatgtaactcttcccctggtcgcctggagtggaccactcatctgcaggcctctcctgcatggggagggtaggcagggagcagcatgtctgcaggggtgaacctttgctcttctgtcaggcgaggcccaggctgcaccagccacctgccacatggtgacagtgccacgggccctgcgtatggcccctgcaaccgtgctctggcgggcacacctggctgctgcaggccaaggccgctgttcagtgaagagtcccatgtttagtatggactaaagtcccatgtttagccactgccccaggctcccgtgaccccagaaaccaggtcacatggaccacagtgccagatcctcatcacgccggtgagcacctagaagtgagaacactgtattcctacaatgtacacttggatatttctccttatttagtttctagtgaaacaaatcaagtaaggaactatctttagtttagatggaattatttgtttttaattgttgccgtattcatctatatagctaatatttcaagataagtaatgaacaaaacctgtctaaaccttttgtttccaatgaatgaaagtcatgcactttatttataggctctatgttttggcttctgcagtacttttattatctatacataatttggccaaaaataagaaattggaaagaatgaaatgtttagtttatagtagaagaaagatgatgacactaagttgtgaaaatatgttgtgatttttatgaaataaactcatgtcctgaaaagaaaan

SEQ ID NO: 442070 - DNA, 278 bp, Homo sapiens
atcaaggtctttgggacggcggacagcaagcaccgttactactatgggatgggatggggttttcctcttctgatctgcatcatttcactgtcatttgccatggacagttacgggacaagcaacaattgctggctgtcgttggcgagtggcgccatctgggcctttgtagcccctgccctgtttgtcatcgtggtcaacattggcatcctcatcgctgtgaccagagtcatctcacagatcagcgccgacccaaagcacagcgccgtcccaaagcacag

SEQ ID NO: 442071 - DNA, 2703 bp, Homo sapiens
  misc_feature (677)..(677): n is a, c, g, or t
  misc_feature (1182)..(1182): n is a, c, g, or t
  misc_feature (2703)..(2703): n is a, c, g, or t
atgatttctttgtgcagttagcaccggtggacaccaggagctgctggtcaacattggcatcctcatcgctgtgaccagagtcatctcacagatcagcgccgacaactacaagatccatggagaccccagtgccttcaagttgacggccaaggcagtggccgtgctgctgcccatcctgggtacctcgtgggtctttggcgtgcttgctgtcaacggttgtgctgtggttttccagtacatgtttgccacgctcaactccctgcagggactgttcatattcctctttcattgtctcctgaattcagaggtgagagccgccttcaagcacaaaaccaaggtctggtcgctcacgagcagctccgcccgcacctccaacgcgaagcccttccactcggacctcatgaatgggacccggccaggcatggcctccaccaagctcagcccttgggacaagagcagccactctgcccaccgcgtcgacctgtcagccgtgtgagccgggaggctgccaaccaggccaggctgcgctcagaacacacccccccaaacagaatgaaatgccccacctttgcccatggaccctctccttgctgctgtctggacatgggtgttgtggcccgagacagctgtcctcccctgtgactctggctgtcggagcacactgctcagcccagcangctgatgcccaggccagcgtgggccctcctgccttgcatccacccgtgggctgagtgacttcctcgggggattcccaggacacagtggcctgactgtgatggtgcccttgagcctcccttcatcactcagcatcagacccagcgaggccaggacactcggggccggtcccgcagcaccaggaggggatgttcagcctctgtgccttggtggggcttggggactcagggccaaagaggtggttcaggtccccacgcaccctcagtcaggcgcaggcagctgggggtgtgtggggaagagcatgcggagtccccagtgtctgaatccactgagtggtgagttccccacagccggcgctagccgtggtgtgtgtctctgtaggtggtgccggcgtgggccaacctgtgctgtgtcatcagttgggggcccctgcccaagccgagctcgagccgtgggcgggagtcgttgactctccaggtgagggcgacccctctgccctgtccttgngggggtcccctctgctcacgtgaagagccgctctgggccttgaggctgcctgatggtgcctgtgcttgggggagcttctcggccatccgctgtgagttttgcctctttggaccccaattcggccttaagatgccctcctccctcgtgtgccagcctccttggttgttcttgggccacaggagctggccgtgtccccgcagtgcctggtgtccaggtggaaagtggagggcattttccagggcactgctttccccagaggcttcctcatggctcacaggcactctacgaagtttctaatgggcagaccacgcggcaggtagcacagtgcgctccgtctggtcaccatgagaccgacctgcgctgagtccccactgacctggagagggagggctggtgacagccgtgtcttctgtgttgagggaaatttatggactcagactcagccccagaggagatgggataattgttatggacccatgtgtgggcatgatcctgtggaacacaggtttgggatcatagatgtgaattaagacaccaccgagatacgggctgtgaggttcatactgtgctgatagcactcgtggtgtctgtgaaatgtgggtaagacattcaaacctggttttgatactggaaactcttcctttaaaactgtgaccatgatttcattcagcccctccacacccctatgtctgccttgtttcagagtgagttttctatggagcctgtggcccttttgcagcccacctggtggcttcttaatgtaactcttcccctggtcgcctggagtggaccactcatctgcaggcctctcctgcatggggagggtaggcagggagcagcatgtctgcaggggtgaacctttgctcttctgtcaggcgaggcccaggctgcaccagccacctgccacatggtgacagtgccacgggccctgcgtatggcccctgcaaccgtgctctggcgggcacacctggctgctgcaggccaaggccgctgttcagtgaagagtcccatgtttagtatggactaaagtcccatgtttagccactgccccaggctcccgtgaccccagaaaccaggtcacatggaccacagtgccagatcctcatcacgccggtgagcacctagaagtgagaacactgtattcctacaatgtacacttggatatttctccttatttagtttctagtgaaacaaatcaagtaaggaactatctttagtttagatggaattatttgtttttaattgttgccgtattcatctatatagctaatatttcaagataagtaatgaacaaaacctgtctaaaccttttgtttccaatgaatgaaagtcatgcactttatttataggctctatgttttggcttctgcagtacttttattatctatacataatttggccaaaaataagaaattggaaagaatgaaatgtttagtttatagtagaagaaagatgatgacactaagttgtgaaaatatgttgtgatttttatgaaataaactcatgtcctgaaaagaaaan

SEQ ID NO: 442072 - DNA, 567 bp, Homo sapiens
actaatcagtcattaggttctctggcaagtgaaaaatggaataaagataaagaatgtagtggttaatcaagagtaacctgtttataacatagactaggctcaaaacttaaacttgaaacttaacacaataaattaaaccatctttgtaaacagtagaatttaaagagattcccttaaacattaaacattaggaccttctgtggtgtcaccttattcaaactaccactgtgttacctctttttgactcttaaggctgccagacaccctacttgaaggatcctgttggaacctgtggaaataatacttacaagaacgttgcagctaagctggtccgggtgcagtggtgttacaactaatggatcacaaccagtcacggatttctttgttccatctccattcccacttcttcacttgactagccttaaaaaggctcatgcctgtaatcccagcactaagggaggctcagacagaaggatcatttgagcccaggagtttgagatcagcccaggcaacatagcgagacttcatctctactaaaaataaaataaaaaaattagccaggagtgg

SEQ ID NO: 442073 - DNA, 757 bp, Homo sapiens
ctcctgctgtgtggcccagttcctaacaggccacgaactggtactgattgttccccagagtttggggaccccttgtcttgacagtatcatgcacaggagaagatggtataaactggtccatcagtgacaaagacattgaggcccagatagctaataaccgaacacctggaagatggacccagcggtactattcagccaacaaaaacattatctgtagaaattgtgacaaacgtggtcatttatcaaaaaactgccccttaccacgaaaagttcgtcgctgcttcctgtgctccaggagaggacatctcctgtattcctgtccagcccccctttgcgaatactgtcctgtgcctaagatgttggaccactcatgtcttttcagacattcctgggataaacagtgtgaccgatgtcatatgctaggccactatacagatgcttgcacagaaatctggaggcagtatcacctaacgaccaaacctggaccacccaaaaagccgaagaccccttcaagaccatcagccttagcatattgctatcactgcgcgcaaaaaggccattatggacacgaatgtccagaaagagaagtgtatgacccgtctccagtatctccattcatctgctactatgatgacaaatatgaaattcaggagagagaaaagagactaaaacaaaaaataaaagttaaagtctcaagaaaatggggtttccagagcatccaagtacttttataaaggggaatggaaaccaatgattt

SEQ ID NO: 442074 - DNA, 756 bp, Homo sapiens
gtaaagtaccttgtttcatgctcccagctgatcaatatttttattttccaggcttgcacagaaatctggaggcagtatcacctaacgaccaaacctggaccacccaaaaagccgaagaccccttcaagaccatcagccttagcatattgctatcactgcgcgcaaaaaggccattatggacacgaatgtccagaaagagaagtgtatgacccgtctccagtatctccattcatctgctactatgatgacaaatatgaaattcaggagagagaaaagagactaaaacaaaaaataaaagcatttacaagttactccaagaaaacatgggggttattccccaagaagcccattccaaggctaccttttattattaaaaaaggcaggcaaattgagaaatcccccaacattgattatcaggaaagggccccgttgccctccatgcgaaaaagccaaccagggtggcgcctccaacgaacacattacaggaaagcacaataaaggaacacttgcacgaaacaacgaaattagaaaacctggggaagaacgccaccagggacagggctggacaggaccattcggtgaacgtgggattgaacgattttctccccaagggggcccctaggagacctaactccttcttcctgggcaagttttttacaaaaccccaagaaaggccttctaaaggccccttttcacccggtttcaatcacatataacccaacacgttccaacgacgaacgacaaaggtcttcccaa

SEQ ID NO: 442075 - DNA, 542 bp, Homo sapiens
caagttgcgagaccccgtctctgaaaaaaaaaaaaaaatcaaatttgccaggtgtggtgttgtgagccaatcctcccacctcagccccccgagtagctgggactacaagtatgtaccaccacatccagctaatttttgcattttttgtagagatgggttttgcccatgttgcccaggctggtctcaaactcccgggctcaagcgatccacttgcctcagcttcctaaagtgttgaggttacaggtgtgagccacgatgctgggcctagctttctatgtggccagtttctctggtatttttctctggaaattgcagcgactttgacctgtgtacattctgtgatctgtccttgacactcaattacgtagatggggtctggtttgactacctcctcccttacaaggtggccaggaaaccttctcaatgtaagattcaacttacctatttcctttctctccaggatcactattctgccatgtctgtgtgtctaaaagtgtttcaggcagaggcagggggatctcttgaggctaggagtttgatat

SEQ ID NO: 442076 - DNA, 460 bp, Homo sapiens
tctagggcaggagatactaaagggggaaaaatactaaatcatctgtttgatattaatatgaattcttattttattccccagtctgccttaactagctgctttatgcatcatccaggttttctggattcagtggaaaagacaaggtagtgtgtgcttattccatcttacttggaattggaactcctggtatatttggaaatcaacaaaaatgttaaaacgtaagaaacaattgtaactctaatgtatgggtttccccatattctttgttttatgcttcatgttgtttaagaatacatgcattaggctgggcacggtggctcacgcctgtaaatcccagcactttgggaggctgaggcgggtggatcacctgaagtcaggagttcgagaccagcctgaccaacatggaaaaaccctgtctctactaaaaaaaaataccaaattagctgggcgtggtggtgct

SEQ ID NO: 442077 - DNA, 426 bp, Homo sapiens
agttagccccgataatttctacccaaacacctccaaattatgctacttcaaaaacagttgaagggaagtttaggaatataatatagtttcattttaagaccactaggataatagacattgtaatgtaatggaaaaacattttgtcccataaaaaccactttcatttaatgctttgtttttctgtctaaccaggtaatacctagcaaatacagaaagagagataaagcaagcaagctgttttgaaagtgtctaatattggctgatgtagagctatagaatccatcagtagaagaattattttgtacactatgtgtgaaagatcaaagaatatggggcagtcaccagttgtttacaacctggtttgcaagtggcataaaaaaatattagtttgtctgctgaataaaattaaacttatttttctctctg

SEQ ID NO: 442078 - DNA, 2832 bp, Homo sapiens
agagctgtgttgtccccggaagtgccttccctcccgggtctgcgcggacgcggcctccttacctcatttgtcctcgcccctccccgtccctctacgcgtttggttcccggttggtgcttcctgttcgcagctgcggcagtgagtatgtgtgtgacggacccccgccgcccgcggctcgggacccctgcctaccctccttcttgcccgccgggctgtggaactagcgcgtgccccctcgccggcctcgacgtctcccgtccgcccctcactcgtggcagggcgcagctcctgcttcaaggttactgactttttatgatgtttggtggctatgagactatagaagcatacgaagatgatctttatcgagatgagtcatctagtgaactgagtgttgatagtgaggtggaatttcaactctatagccaaattcattatgcccaagatcttgatgatgtcatcagggaggaagagcatgaagaaaagaactctgggaattcggaatcttcgagtagtaaaccaaatcagaagaagctaatcgtcctttcagatagtgaggtcatccagctgtcagatgggtcagaggtcatcactttgtctgatgaagacagtatttatagatgtaaaggaaagaatgttagagttcaagcacaagaaaatgcccatggtctttcttcttctcttcaatctaatgagctggttgataagaaatgcaagagtgatattgagaagcctaaatctgaagagagatcaggtgtaatccgagaggtcatgattatagaggtcagttcaagtgaagaggaagagagcaccatttcagaaggtgataatgtggaaagctggatgctactgggatgtgaagtagatgataaagatgatgatatccttctcaaccttgtgggatgtgaaaactctgttactgaaggagaagatggtataaactggtccatcagtgacaaagacattgaggcccagatagctaataaccgaacacctggaagatggacccagcggtactattcagccaacaaaaacattatctgtagaaattgtgacaaacgtggtcatttatcaaaaaactgccccttaccacgaaaagttcgtcgctgcttcctgtgctccaggagaggacatctcctgtattcctgtccagcccccctttgcgaatactgtcctgtgcctaagatgttggaccactcatgtcttttcagacattcctgggataaacagtgtgaccgatgtcatatgctaggccactatacagatgcttgcacagaaatctggaggcagtatcacctaacgaccaaacctggaccacccaaaaagccgaagaccccttcaagaccatcagccttagcatattgctatcactgcgcgcaaaaaggccattatggacacgaatgtccagaaagagaagtgtatgacccgtctccagtatctccattcatctgctactatgatgacaaatatgaaattcaggagagagaaaagagactaaaacaaaaaataaaagtactcaagaaaaatggggttatcccagagccatccaagctaccttatataaaagcagcaaatgagaacccccaccatgatataaggaagggccgtgcctcatggaaaagcaacaggtggcctcaagaaaataaagaaacacaaaaagaaatgaagaacaagaatagaaactgggagaagcacaggaaggctgacagacatcgtgaagtggatgaggattttcccaggggccccaaaacctactcttctcctggcagttttaaaacccagaagccttctaagccctttcaccgttcatcacattaccacacgtcaagagaagacaagtctcccaaggaaggcaagaggggcaagcagaagaaaaaggagaggtgctgggaagatgatgacaatgataacttatttcttattaagcagagaaaaaaaaagtcttaagccgtcaggcagcctctgatgtggcttttcattgttcatttggcctttgtgtctataaccttctggcactgtgtttattatctatgattaaataaagtgagtttttggtttggttttttaatttcagccattcctagagttactgaatatccatggagatctcaattctctgtgtccaacaggatattaggtaagaaagtacaaagataaacctggacttctcctattccaatatgtcatctttactcagaatcctagggataggtagaagaattcatcttttcaagaaagtgttttaaaaatactttgggaaaaaaactgcatcaaaggtaatttatcctcaaattaaatccttgcaggaagagaaattaacactaagaaaaagtcatcaatatttttcaactttttttttttttttttttactttggaaaggacaataactataaacctatatccagattttctttctgctgaagctgttgtcagaatcttcctttggacaaaacatcactagctgactataaaaacaaaagtgtcatcattgaagccctgaagaggcagggaattgagcttcagcaaaatacaggaaaagaactatccagtataaatgtcagaagacagatttcctaaacaagtaaaagagacatcaaaaattttaacataatcacaatgaaatcattttttaccacttttacagcggtgtttcaagcggactgtcactcagatctgcagagatgaatattactcaaaaaatttttttgttctcttgcatttttttcaactaccgcaaagctatacagatttttttgtacttgtggatcttttgtacttctcataacctaatgtcagactaagaaaaataaaatatctgagagtaaaaaaaaaaa

SEQ ID NO: 442079 - DNA, 2670 bp, Homo sapiens
actgagaaggcgtccaccgagcgccagggagaaggaggcggagcccggcctcaacctcgcccgtgtcctcatgggggttgtagttttcctcgcgggggtagagggcacgaactccccggcttttgcccgcttcaaggttactgactttttatgatgtttggtggctatgagactatagaagcatacgaagatgatctttatcgagatgagtcatctagtgaactgagtgttgatagtgaggtggaatttcaactctatagccaaattcattatgcccaagatcttgatgatgtcatcagggaggaagagcatgaagaaaagaactctgggaattcggaatcttcgagtagtaaaccaaatcagaagaagctaatcgtcctttcagatagtgaggtcatccagctgtcagatgggtcagaggtcatcactttgtctgatgaagacagtatttatagatgtaaaggaaagaatgttagagttcaagcacaagaaaatgcccatggtctttcttcttctcttcaatctaatgagctggttgataagaaatgcaagagtgatattgagaagcctaaatctgaagagagatcaggtgtaatccgagaggtcatgattatagaggtcagttcaagtgaagaggaagagagcaccatttcagaaggtgataatgtggaaagctggatgctactgggatgtgaagtagatgataaagatgatgatatccttctcaaccttgtgggatgtgaaaactctgttactgaaggagaagatggtataaactggtccatcagtgacaaagacattgaggcccagatagctaataaccgaacacctggaagatggacccagcggtactattcagccaacaaaaacattatctgtagaaattgtgacaaacgtggtcatttatcaaaaaactgccccttaccacgaaaagttcgtcgctgcttcctgtgctccaggagaggacatctcctgtattcctgtccagcccccctttgcgaatactgtcctgtgcctaagatgttggaccactcatgtcttttcagacattcctgggataaacagtgtgaccgatgtcatatgctaggccactatacagatgcttgcacagaaatctggaggcagtatcacctaacgaccaaacctggaccacccaaaaagccgaagaccccttcaagaccatcagccttagcatattgctatcactgcgcgcaaaaaggccattatggacacgaatgtccagaaagagaagtgtatgacccgtctccagtatctccattcatctgctactatgatgacaaatatgaaattcaggagagagaaaagagactaaaacaaaaaataaaagtactcaagaaaaatggggttatcccagagccatccaagctaccttatataaaagcagcaaatgagaacccccaccatgatataaggaagggccgtgcctcatggaaaagcaacaggtggcctcaagaaaataaagaaacacaaaaagaaatgaagaacaagaatagaaactgggagaagcacaggaaggctgacagacatcgtgaagtggatgaggattttcccaggggccccaaaacctactcttctcctggcagttttaaaacccagaagccttctaagccctttcaccgttcatcacattaccacacgtcaagagaagacaagtctcccaaggaaggcaagaggggcaagcagaagaaaaaggagaggtgctgggaagatgatgacaatgataacttatttcttattaagcagagaaaaaaaaagtcttaagccgtcaggcagcctctgatgtggcttttcattgttcatttggcctttgtgtctataaccttctggcactgtgtttattatctatgattaaataaagtgagtttttggtttggttttttaatttcagccattcctagagttactgaatatccatggagatctcaattctctgtgtccaacaggatattaggtaagaaagtacaaagataaacctggacttctcctattccaatatgtcatctttactcagaatcctagggataggtagaagaattcatcttttcaagaaagtgttttaaaaatactttgggaaaaaaactgcatcaaaggtaatttatcctcaaattaaatccttgcaggaagagaaattaacactaagaaaaagtcatcaatatttttcaactttttttttttttttttttactttggaaaggacaataactataaacctatatccagattttctttctgctgaagctgttgtcagaatcttcctttggacaaaacatcactagctgactataaaaacaaaagtgtcatcattgaagccctgaagaggcagggaattgagcttcagcaaaatacaggaaaagaactatccagtataaatgtcagaagacagatttcctaaacaagtaaaagagacatcaaaaattttaacataatcacaatgaaatcattttttaccacttttacagcggtgtttcaagcggactgtcactcagatctgcagagatgaatattactcaaaaaatttttttgttctcttgcatttttttcaactaccgcaaagctatacagatttttttgtacttgtggatcttttgtacttctcataacctaatgtcagactaagaaaaataaaatatctgagagtaaaaaaaaaaa

SEQ ID NO: 442080 - DNA, 2950 bp, Homo sapiens
agagctgtgttgtccccggaagtgccttccctcccgggtctgcgcggacgcggcctccttacctcatttgtcctcgcccctccccgtccctctacgcgtttggttcccggttggtgcttcctgttcgcagctgcggcagtgagtatgtgtgtgacggacccccgccgcccgcggctcgggacccctgcctaccctccttcttgcccgccgggctgtggaactagcgcgtgccccctcgccggcctcgacgtctcccgtccgcccctcactcgtggcagggcgcagctcctggtccgtcacctgcgcgccgccccacgcggccgggctgcgggtctagggggtccgcgtctccctggctttccaagggctaatgccgtgattctagagcggctgggcgtctagggcctcgcttcaaggttactgactttttatgatgtttggtggctatgagactatagaagcatacgaagatgatctttatcgagatgagtcatctagtgaactgagtgttgatagtgaggtggaatttcaactctatagccaaattcattatgcccaagatcttgatgatgtcatcagggaggaagagcatgaagaaaagaactctgggaattcggaatcttcgagtagtaaaccaaatcagaagaagctaatcgtcctttcagatagtgaggtcatccagctgtcagatgggtcagaggtcatcactttgtctgatgaagacagtatttatagatgtaaaggaaagaatgttagagttcaagcacaagaaaatgcccatggtctttcttcttctcttcaatctaatgagctggttgataagaaatgcaagagtgatattgagaagcctaaatctgaagagagatcaggtgtaatccgagaggtcatgattatagaggtcagttcaagtgaagaggaagagagcaccatttcagaaggtgataatgtggaaagctggatgctactgggatgtgaagtagatgataaagatgatgatatccttctcaaccttgtgggatgtgaaaactctgttactgaaggagaagatggtataaactggtccatcagtgacaaagacattgaggcccagatagctaataaccgaacacctggaagatggacccagcggtactattcagccaacaaaaacattatctgtagaaattgtgacaaacgtggtcatttatcaaaaaactgccccttaccacgaaaagttcgtcgctgcttcctgtgctccaggagaggacatctcctgtattcctgtccagcccccctttgcgaatactgtcctgtgcctaagatgttggaccactcatgtcttttcagacattcctgggataaacagtgtgaccgatgtcatatgctaggccactatacagatgcttgcacagaaatctggaggcagtatcacctaacgaccaaacctggaccacccaaaaagccgaagaccccttcaagaccatcagccttagcatattgctatcactgcgcgcaaaaaggccattatggacacgaatgtccagaaagagaagtgtatgacccgtctccagtatctccattcatctgctactatgatgacaaatatgaaattcaggagagagaaaagagactaaaacaaaaaataaaagtactcaagaaaaatggggttatcccagagccatccaagctaccttatataaaagcagcaaatgagaacccccaccatgatataaggaagggccgtgcctcatggaaaagcaacaggtggcctcaagaaaataaagaaacacaaaaagaaatgaagaacaagaatagaaactgggagaagcacaggaaggctgacagacatcgtgaagtggatgaggattttcccaggggccccaaaacctactcttctcctggcagttttaaaacccagaagccttctaagccctttcaccgttcatcacattaccacacgtcaagagaagacaagtctcccaaggaaggcaagaggggcaagcagaagaaaaaggagaggtgctgggaagatgatgacaatgataacttatttcttattaagcagagaaaaaaaaagtcttaagccgtcaggcagcctctgatgtggcttttcattgttcatttggcctttgtgtctataaccttctggcactgtgtttattatctatgattaaataaagtgagtttttggtttggttttttaatttcagccattcctagagttactgaatatccatggagatctcaattctctgtgtccaacaggatattaggtaagaaagtacaaagataaacctggacttctcctattccaatatgtcatctttactcagaatcctagggataggtagaagaattcatcttttcaagaaagtgttttaaaaatactttgggaaaaaaactgcatcaaaggtaatttatcctcaaattaaatccttgcaggaagagaaattaacactaagaaaaagtcatcaatatttttcaactttttttttttttttttttactttggaaaggacaataactataaacctatatccagattttctttctgctgaagctgttgtcagaatcttcctttggacaaaacatcactagctgactataaaaacaaaagtgtcatcattgaagccctgaagaggcagggaattgagcttcagcaaaatacaggaaaagaactatccagtataaatgtcagaagacagatttcctaaacaagtaaaagagacatcaaaaattttaacataatcacaatgaaatcattttttaccacttttacagcggtgtttcaagcggactgtcactcagatctgcagagatgaatattactcaaaaaatttttttgttctcttgcatttttttcaactaccgcaaagctatacagatttttttgtacttgtggatcttttgtacttctcataacctaatgtcagactaagaaaaataaaatatctgagagtaaaaaaaaaaa

SEQ ID NO: 442081 - DNA, 2585 bp, Homo sapiens
agagctgtgttgtccccggaagtgccttccctcccgggtctgcgcggacgcggcctccttacctcatttgtcctcgcccctccccgtccctctacgcgtttggttcccggttggtgcttcctgttcgcagctgcggcacttcaaggttactgactttttatgatgtttggtggctatgagactatagaagcatacgaagatgatctttatcgagatgagtcatctagtgaactgagtgttgatagtgaggtggaatttcaactctatagccaaattcattatgcccaagatcttgatgatgtcatcagggaggaagagcatgaagaaaagaactctgggaattcggaatcttcgagtagtaaaccaaatcagaagaagctaatcgtcctttcagatagtgaggtcatccagctgtcagatgggtcagaggtcatcactttgtctgatgaagacagtatttatagatgtaaaggaaagaatgttagagttcaagcacaagaaaatgcccatggtctttcttcttctcttcaatctaatgagctggttgataagaaatgcaagagtgatattgagaagcctaaatctgaagagagatcaggtgtaatccgagaggtcatgattatagaggtcagttcaagtgaagaggaagagagcaccatttcagaaggtgataatgtggaaagctggatgctactgggatgtgaagtagatgataaagatgatgatatccttctcaaccttgtgggatgtgaaaactctgttactgaaggagaagatggtataaactggtccatcagtgacaaagacattgaggcccagatagctaataaccgaacacctggaagatggacccagcggtactattcagccaacaaaaacattatctgtagaaattgtgacaaacgtggtcatttatcaaaaaactgccccttaccacgaaaagttcgtcgctgcttcctgtgctccaggagaggacatctcctgtattcctgtccagcccccctttgcgaatactgtcctgtgcctaagatgttggaccactcatgtcttttcagacattcctgggataaacagtgtgaccgatgtcatatgctaggccactatacagatgcttgcacagaaatctggaggcagtatcacctaacgaccaaacctggaccacccaaaaagccgaagaccccttcaagaccatcagccttagcatattgctatcactgcgcgcaaaaaggccattatggacacgaatgtccagaaagagaagtgtatgacccgtctccagtatctccattcatctgctactatgatgacaaatatgaaattcaggagagagaaaagagactaaaacaaaaaataaaagtgcctcatggaaaagcaacaggtggcctcaagaaaataaagaaacacaaaaagaaatgaagaacaagaatagaaactgggagaagcacaggaaggctgacagacatcgtgaagtggatgaggattttcccaggggccccaaaacctactcttctcctggcagttttaaaacccagaagccttctaagccctttcaccgttcatcacattaccacacgtcaagagaagacaagtctcccaaggaaggcaagaggggcaagcagaagaaaaaggagaggtgctgggaagatgatgacaatgataacttatttcttattaagcagagaaaaaaaaagtcttaagccgtcaggcagcctctgatgtggcttttcattgttcatttggcctttgtgtctataaccttctggcactgtgtttattatctatgattaaataaagtgagtttttggtttggttttttaatttcagccattcctagagttactgaatatccatggagatctcaattctctgtgtccaacaggatattaggtaagaaagtacaaagataaacctggacttctcctattccaatatgtcatctttactcagaatcctagggataggtagaagaattcatcttttcaagaaagtgttttaaaaatactttgggaaaaaaactgcatcaaaggtaatttatcctcaaattaaatccttgcaggaagagaaattaacactaagaaaaagtcatcaatatttttcaactttttttttttttttttttactttggaaaggacaataactataaacctatatccagattttctttctgctgaagctgttgtcagaatcttcctttggacaaaacatcactagctgactataaaaacaaaagtgtcatcattgaagccctgaagaggcagggaattgagcttcagcaaaatacaggaaaagaactatccagtataaatgtcagaagacagatttcctaaacaagtaaaagagacatcaaaaattttaacataatcacaatgaaatcattttttaccacttttacagcggtgtttcaagcggactgtcactcagatctgcagagatgaatattactcaaaaaatttttttgttctcttgcatttttttcaactaccgcaaagctatacagatttttttgtacttgtggatcttttgtacttctcataacctaatgtcagactaagaaaaataaaatatctgagagtaaaaaaaaaaa

SEQ ID NO: 442082 - DNA, 2738 bp, Homo sapiens
agagctgtgttgtccccggaagtgccttccctcccgggtctgcgcggacgcggcctccttacctcatttgtcctcgcccctccccgtccctctacgcgtttggttcccggttggtgcttcctgttcgcagctgcggcacttcaaggttactgactttttatgatgtttggtggctatgagactatagaagcatacgaagatgatctttatcgagatgagtcatctagtgaactgagtgttgatagtgaggtggaatttcaactctatagccaaattcattatgcccaagatcttgatgatgtcatcagggaggaagagcatgaagaaaagaactctgggaattcggaatcttcgagtagtaaaccaaatcagaagaagctaatcgtcctttcagatagtgaggtcatccagctgtcagatgggtcagaggtcatcactttgtctgatgaagacagtatttatagatgtaaaggaaagaatgttagagttcaagcacaagaaaatgcccatggtctttcttcttctcttcaatctaatgagctggttgataagaaatgcaagagtgatattgagaagcctaaatctgaagagagatcaggtgtaatccgagaggtcatgattatagaggtcagttcaagtgaagaggaagagagcaccatttcagaaggtgataatgtggaaagctggatgctactggggccatcgtgacaaatctgataggataaacagatagatagatgatcccttcctacgaaccatatgtgggcgatagttgaaaccactgcttgttaacttgctgtgcggatgattgtgtcttccactgggtgccctcaatgagatcgctagacatttgccgaagacggatataaacctgcctaacctgcggcaactcgagcacaagataggccgcaaggcggtactattcagccaacaaaaacattatctgtagaaattgtgacaaacgtggtcatttatcaaaaaactgccccttaccacgaaaagttcgtcgctgcttcctgtgctccaggagaggacatctcctgtattcctgtccagcccccctttgcgaatactgtcctgtgcctaagatgttggaccactcatgtcttttcagacattcctgggataaacagtgtgaccgatgtcatatgctaggccactatacagatgcttgcacagaaatctggaggcagtatcacctaacgaccaaacctggaccacccaaaaagccgaagaccccttcaagaccatcagccttagcatattgctatcactgcgcgcaaaaaggccattatggacacgaatgtccagaaagagaagtgtatgacccgtctccagtatctccattcatctgctactatgatgacaaatatgaaattcaggagagagaaaagagactaaaacaaaaaataaaagtactcaagaaaaatggggttatcccagagccatccaagctaccttatataaaagcagcaaatgagaacccccaccatgatataaggaagggccgtgcctcatggaaaagcaacaggtggcctcaagaaaataaagaaacacaaaaagaaatgaagaacaagaatagaaactgggagaagcacaggaaggctgacagacatcgtgaagtggatgaggattttcccaggggccccaaaacctactcttctcctggcagttttaaaacccagaagccttctaagccctttcaccgttcatcacattaccacacgtcaagagaagacaagtctcccaaggaaggcaagaggggcaagcagaagaaaaaggagaggtgctgggaagatgatgacaatgataacttatttcttattaagcagagaaaaaaaaagtcttaagccgtcaggcagcctctgatgtggcttttcattgttcatttggcctttgtgtctataaccttctggcactgtgtttattatctatgattaaataaagtgagtttttggtttggttttttaatttcagccattcctagagttactgaatatccatggagatctcaattctctgtgtccaacaggatattaggtaagaaagtacaaagataaacctggacttctcctattccaatatgtcatctttactcagaatcctagggataggtagaagaattcatcttttcaagaaagtgttttaaaaatactttgggaaaaaaactgcatcaaaggtaatttatcctcaaattaaatccttgcaggaagagaaattaacactaagaaaaagtcatcaatatttttcaactttttttttttttttttttactttggaaaggacaataactataaacctatatccagattttctttctgctgaagctgttgtcagaatcttcctttggacaaaacatcactagctgactataaaaacaaaagtgtcatcattgaagccctgaagaggcagggaattgagcttcagcaaaatacaggaaaagaactatccagtataaatgtcagaagacagatttcctaaacaagtaaaagagacatcaaaaattttaacataatcacaatgaaatcattttttaccacttttacagcggtgtttcaagcggactgtcactcagatctgcagagatgaatattactcaaaaaatttttttgttctcttgcatttttttcaactaccgcaaagctatacagatttttttgtacttgtggatcttttgtacttctcataacctaatgtcagactaagaaaaataaaatatctgagagtaaaaaaaaaaa

SEQ ID NO: 442083 - DNA, 2050 bp, Homo sapiens
aagcagtggtatcaacgcagagggcccattacggccgggggaaaaccatgagccattgagttttgtgaattcaagttagacagtaacagaggccaagactctaagcgaacaatatctgaaaaggaagtacacaaaaacaggagaagatggtataaactggtccatcagtgacaaagacattgaggcccagatagctaataaccgaacacctggaagatggacccagcggtactattcagccaacaaaaacattatctgtagaaattgtgacaaacgtggtcatttatcaaaaaactgccccttaccacgaaaagttcgtcgctgcttcctgtgctccaggagaggacatctcctgtattcctgtccagcccccctttgcgaatactgtcctgtgcctaagatgttggaccactcatgtcttttcagacattcctgggataaacagtgtgaccgatgtcatatgctaggccactatacagatgcttgcacagaaatctggaggcagtatcacctaacgaccaaacctggaccacccaaaaagccgaagaccccttcaagaccatcagccttagcatattgctatcactgcgcgcaaaaaggccattatggacacgaatgtccagaaagagaagtgtatgacccgtctccagtatctccattcatctgctactatgatgacaaatatgaaattcaggagagagaaaagagactaaaacaaaaaataaaagtactcaagaaaaatggggttatcccagagccatccaagctaccttatataaaagcagcaaatgagaacccccaccatgatataaggaagggccgtgcctcatggaaaagcaacaggtggcctcaagaaaataaagaaacacaaaaagaaatgaagaacaagaatagaaactgggagaagcacaggaaggctgacagacatcgtgaagtggatgaggattttcccaggggccccaaaacctactcttctcctggcagttttaaaacccagaagccttctaagccctttcaccgttcatcacattaccacacgtcaagagaagacaagtctcccaaggaaggcaagaggggcaagcagaagaaaaaggagaggtgctgggaagatgatgacaatgataacttatttcttattaagcagagaaaaaaaaagtcttaagccgtcaggcagcctctgatgtggcttttcattgttcatttggcctttgtgtctataaccttctggcactgtgtttattatctatgattaaataaagtgagtttttggtttggttttttaatttcagccattcctagagttactgaatatccatggagatctcaattctctgtgtccaacaggatattaggtaagaaagtacaaagataaacctggacttctcctattccaatatgtcatctttactcagaatcctagggataggtagaagaattcatcttttcaagaaagtgttttaaaaatactttgggaaaaaaactgcatcaaaggtaatttatcctcaaattaaatccttgcaggaagagaaattaacactaagaaaaagtcatcaatatttttcaactttttttttttttttttttactttggaaaggacaataactataaacctatatccagattttctttctgctgaagctgttgtcagaatcttcctttggacaaaacatcactagctgactataaaaacaaaagtgtcatcattgaagccctgaagaggcagggaattgagcttcagcaaaatacaggaaaagaactatccagtataaatgtcagaagacagatttcctaaacaagtaaaagagacatcaaaaattttaacataatcacaatgaaatcattttttaccacttttacagcggtgtttcaagcggactgtcactcagatctgcagagatgaatattactcaaaaaatttttttgttctcttgcatttttttcaactaccgcaaagctatacagatttttttgtacttgtggatcttttgtacttctcataacctaatgtcagactaagaaaaataaaatatctgagagtaaaaaaaaaaa

SEQ ID NO: 442084 - DNA, 2048 bp, Homo sapiens
agagctgtgttgtccccggaagtgccttccctcccgggtctgcgcggacgcggcctccttacctcatttgtcctcgcccctccccgtccctctacgcgtttggttcccggttggtgcttcctgttcgcagctgcggcagagaagatggtataaactggtccatcagtgacaaagacattgaggcccagatagctaataaccgaacacctggaagatggacccagcggtactattcagccaacaaaaacattatctgtagaaattgtgacaaacgtggtcatttatcaaaaaactgccccttaccacgaaaagttcgtcgctgcttcctgtgctccaggagaggacatctcctgtattcctgtccagcccccctttgcgaatactgtcctgtgcctaagatgttggaccactcatgtcttttcagacattcctgggataaacagtgtgaccgatgtcatatgctaggccactatacagatgcttgcacagaaatctggaggcagtatcacctaacgaccaaacctggaccacccaaaaagccgaagaccccttcaagaccatcagccttagcatattgctatcactgcgcgcaaaaaggccattatggacacgaatgtccagaaagagaagtgtatgacccgtctccagtatctccattcatctgctactatgatgacaaatatgaaattcaggagagagaaaagagactaaaacaaaaaataaaagtactcaagaaaaatggggttatcccagagccatccaagctaccttatataaaagcagcaaatgagaacccccaccatgatataaggaagggccgtgcctcatggaaaagcaacaggtggcctcaagaaaataaagaaacacaaaaagaaatgaagaacaagaatagaaactgggagaagcacaggaaggctgacagacatcgtgaagtggatgaggattttcccaggggccccaaaacctactcttctcctggcagttttaaaacccagaagccttctaagccctttcaccgttcatcacattaccacacgtcaagagaagacaagtctcccaaggaaggcaagaggggcaagcagaagaaaaaggagaggtgctgggaagatgatgacaatgataacttatttcttattaagcagagaaaaaaaaagtcttaagccgtcaggcagcctctgatgtggcttttcattgttcatttggcctttgtgtctataaccttctggcactgtgtttattatctatgattaaataaagtgagtttttggtttggttttttaatttcagccattcctagagttactgaatatccatggagatctcaattctctgtgtccaacaggatattaggtaagaaagtacaaagataaacctggacttctcctattccaatatgtcatctttactcagaatcctagggataggtagaagaattcatcttttcaagaaagtgttttaaaaatactttgggaaaaaaactgcatcaaaggtaatttatcctcaaattaaatccttgcaggaagagaaattaacactaagaaaaagtcatcaatatttttcaactttttttttttttttttttactttggaaaggacaataactataaacctatatccagattttctttctgctgaagctgttgtcagaatcttcctttggacaaaacatcactagctgactataaaaacaaaagtgtcatcattgaagccctgaagaggcagggaattgagcttcagcaaaatacaggaaaagaactatccagtataaatgtcagaagacagatttcctaaacaagtaaaagagacatcaaaaattttaacataatcacaatgaaatcattttttaccacttttacagcggtgtttcaagcggactgtcactcagatctgcagagatgaatattactcaaaaaatttttttgttctcttgcatttttttcaactaccgcaaagctatacagatttttttgtacttgtggatcttttgtacttctcataacctaatgtcagactaagaaaaataaaatatctgagagtaaaaaaaaaaa

SEQ ID NO: 442085 - DNA, 1697 bp, Homo sapiens
ccgtattattctgaggacactgtggtaatcaagaactatccataactaatgtataaataactgcttgcttatttctacaataatccaactcaaattatatatacacagcaaaaagcttatgatagaaggcttgcacagaaatctggaggcagtatcacctaacgaccaaacctggaccacccaaaaagccgaagaccccttcaagaccatcagccttagcatattgctatcactgcgcgcaaaaaggccattatggacacgaatgtccagaaagagaagtgtatgacccgtctccagtatctccattcatctgctactatgatgacaaatatgaaattcaggagagagaaaagagactaaaacaaaaaataaaagtactcaagaaaaatggggttatcccagagccatccaagctaccttatataaaagcagcaaatgagaacccccaccatgatataaggaagggccgtgcctcatggaaaagcaacaggtggcctcaagaaaataaagaaacacaaaaagaaatgaagaacaagaatagaaactgggagaagcacaggaaggctgacagacatcgtgaagtggatgaggattttcccaggggccccaaaacctactcttctcctggcagttttaaaacccagaagccttctaagccctttcaccgttcatcacattaccacacgtcaagagaagacaagtctcccaaggaaggcaagaggggcaagcagaagaaaaaggagaggtgctgggaagatgatgacaatgataacttatttcttattaagcagagaaaaaaaaagtcttaagccgtcaggcagcctctgatgtggcttttcattgttcatttggcctttgtgtctataaccttctggcactgtgtttattatctatgattaaataaagtgagtttttggtttggttttttaatttcagccattcctagagttactgaatatccatggagatctcaattctctgtgtccaacaggatattaggtaagaaagtacaaagataaacctggacttctcctattccaatatgtcatctttactcagaatcctagggataggtagaagaattcatcttttcaagaaagtgttttaaaaatactttgggaaaaaaactgcatcaaaggtaatttatcctcaaattaaatccttgcaggaagagaaattaacactaagaaaaagtcatcaatatttttcaactttttttttttttttttttactttggaaaggacaataactataaacctatatccagattttctttctgctgaagctgttgtcagaatcttcctttggacaaaacatcactagctgactataaaaacaaaagtgtcatcattgaagccctgaagaggcagggaattgagcttcagcaaaatacaggaaaagaactatccagtataaatgtcagaagacagatttcctaaacaagtaaaagagacatcaaaaattttaacataatcacaatgaaatcattttttaccacttttacagcggtgtttcaagcggactgtcactcagatctgcagagatgaatattactcaaaaaatttttttgttctcttgcatttttttcaactaccgcaaagctatacagatttttttgtacttgtggatcttttgtacttctcataacctaatgtcagactaagaaaaataaaatatctgagagtaaaaaaaaaaa

SEQ ID NO: 442086 - DNA, 1965 bp, Homo sapiens
tcagatttagtcatgctgttattttagcccagtggtccagagagatgactgaaaagagaagatggtataaactggtccatcagtgacaaagacattgaggcccagatagctaataaccgaacacctggaagatggacccagcggtactattcagccaacaaaaacattatctgtagaaattgtgacaaacgtggtcatttatcaaaaaactgccccttaccacgaaaagttcgtcgctgcttcctgtgctccaggagaggacatctcctgtattcctgtccagcccccctttgcgaatactgtcctgtgcctaagatgttggaccactcatgtcttttcagacattcctgggataaacagtgtgaccgatgtcatatgctaggccactatacagatgcttgcacagaaatctggaggcagtatcacctaacgaccaaacctggaccacccaaaaagccgaagaccccttcaagaccatcagccttagcatattgctatcactgcgcgcaaaaaggccattatggacacgaatgtccagaaagagaagtgtatgacccgtctccagtatctccattcatctgctactatgatgacaaatatgaaattcaggagagagaaaagagactaaaacaaaaaataaaagtactcaagaaaaatggggttatcccagagccatccaagctaccttatataaaagcagcaaatgagaacccccaccatgatataaggaagggccgtgcctcatggaaaagcaacaggtggcctcaagaaaataaagaaacacaaaaagaaatgaagaacaagaatagaaactgggagaagcacaggaaggctgacagacatcgtgaagtggatgaggattttcccaggggccccaaaacctactcttctcctggcagttttaaaacccagaagccttctaagccctttcaccgttcatcacattaccacacgtcaagagaagacaagtctcccaaggaaggcaagaggggcaagcagaagaaaaaggagaggtgctgggaagatgatgacaatgataacttatttcttattaagcagagaaaaaaaaagtcttaagccgtcaggcagcctctgatgtggcttttcattgttcatttggcctttgtgtctataaccttctggcactgtgtttattatctatgattaaataaagtgagtttttggtttggttttttaatttcagccattcctagagttactgaatatccatggagatctcaattctctgtgtccaacaggatattaggtaagaaagtacaaagataaacctggacttctcctattccaatatgtcatctttactcagaatcctagggataggtagaagaattcatcttttcaagaaagtgttttaaaaatactttgggaaaaaaactgcatcaaaggtaatttatcctcaaattaaatccttgcaggaagagaaattaacactaagaaaaagtcatcaatatttttcaactttttttttttttttttttactttggaaaggacaataactataaacctatatccagattttctttctgctgaagctgttgtcagaatcttcctttggacaaaacatcactagctgactataaaaacaaaagtgtcatcattgaagccctgaagaggcagggaattgagcttcagcaaaatacaggaaaagaactatccagtataaatgtcagaagacagatttcctaaacaagtaaaagagacatcaaaaattttaacataatcacaatgaaatcattttttaccacttttacagcggtgtttcaagcggactgtcactcagatctgcagagatgaatattactcaaaaaatttttttgttctcttgcatttttttcaactaccgcaaagctatacagatttttttgtacttgtggatcttttgtacttctcataacctaatgtcagactaagaaaaataaaatatctgagagtaaaaaaaaaaa

SEQ ID NO: 442087 - DNA, 1620 bp, Homo sapiens
gtaaagtaccttgtttcatgctcccagctgatcaatatttttattttccaggcttgcacagaaatctggaggcagtatcacctaacgaccaaacctggaccacccaaaaagccgaagaccccttcaagaccatcagccttagcatattgctatcactgcgcgcaaaaaggccattatggacacgaatgtccagaaagagaagtgtatgacccgtctccagtatctccattcatctgctactatgatgacaaatatgaaattcaggagagagaaaagagactaaaacaaaaaataaaagtactcaagaaaaatggggttatcccagagccatccaagctaccttatataaaagcagcaaatgagaacccccaccatgatataaggaagggccgtgcctcatggaaaagcaacaggtggcctcaagaaaataaagaaacacaaaaagaaatgaagaacaagaatagaaactgggagaagcacaggaaggctgacagacatcgtgaagtggatgaggattttcccaggggccccaaaacctactcttctcctggcagttttaaaacccagaagccttctaagccctttcaccgttcatcacattaccacacgtcaagagaagacaagtctcccaaggaaggcaagaggggcaagcagaagaaaaaggagaggtgctgggaagatgatgacaatgataacttatttcttattaagcagagaaaaaaaaagtcttaagccgtcaggcagcctctgatgtggcttttcattgttcatttggcctttgtgtctataaccttctggcactgtgtttattatctatgattaaataaagtgagtttttggtttggttttttaatttcagccattcctagagttactgaatatccatggagatctcaattctctgtgtccaacaggatattaggtaagaaagtacaaagataaacctggacttctcctattccaatatgtcatctttactcagaatcctagggataggtagaagaattcatcttttcaagaaagtgttttaaaaatactttgggaaaaaaactgcatcaaaggtaatttatcctcaaattaaatccttgcaggaagagaaattaacactaagaaaaagtcatcaatatttttcaactttttttttttttttttttactttggaaaggacaataactataaacctatatccagattttctttctgctgaagctgttgtcagaatcttcctttggacaaaacatcactagctgactataaaaacaaaagtgtcatcattgaagccctgaagaggcagggaattgagcttcagcaaaatacaggaaaagaactatccagtataaatgtcagaagacagatttcctaaacaagtaaaagagacatcaaaaattttaacataatcacaatgaaatcattttttaccacttttacagcggtgtttcaagcggactgtcactcagatctgcagagatgaatattactcaaaaaatttttttgttctcttgcatttttttcaactaccgcaaagctatacagatttttttgtacttgtggatcttttgtacttctcataacctaatgtcagactaagaaaaataaaatatctgagagtaaaaaaaaaaa

SEQ ID NO: 442088 - DNA, 1660 bp, Homo sapiens
gttacaaacaacacactttttgctcctgagaagatggtaaactgatcaactatacataagcagcttggttagaaaaagtgtccttaacaaggcttgcacagaaatctggaggcagtatcacctaacgaccaaacctggaccacccaaaaagccgaagaccccttcaagaccatcagccttagcatattgctatcactgcgcgcaaaaaggccattatggacacgaatgtccagaaagagaagtgtatgacccgtctccagtatctccattcatctgctactatgatgacaaatatgaaattcaggagagagaaaagagactaaaacaaaaaataaaagtactcaagaaaaatggggttatcccagagccatccaagctaccttatataaaagcagcaaatgagaacccccaccatgatataaggaagggccgtgcctcatggaaaagcaacaggtggcctcaagaaaataaagaaacacaaaaagaaatgaagaacaagaatagaaactgggagaagcacaggaaggctgacagacatcgtgaagtggatgaggattttcccaggggccccaaaacctactcttctcctggcagttttaaaacccagaagccttctaagccctttcaccgttcatcacattaccacacgtcaagagaagacaagtctcccaaggaaggcaagaggggcaagcagaagaaaaaggagaggtgctgggaagatgatgacaatgataacttatttcttattaagcagagaaaaaaaaagtcttaagccgtcaggcagcctctgatgtggcttttcattgttcatttggcctttgtgtctataaccttctggcactgtgtttattatctatgattaaataaagtgagtttttggtttggttttttaatttcagccattcctagagttactgaatatccatggagatctcaattctctgtgtccaacaggatattaggtaagaaagtacaaagataaacctggacttctcctattccaatatgtcatctttactcagaatcctagggataggtagaagaattcatcttttcaagaaagtgttttaaaaatactttgggaaaaaaactgcatcaaaggtaatttatcctcaaattaaatccttgcaggaagagaaattaacactaagaaaaagtcatcaatatttttcaactttttttttttttttttttactttggaaaggacaataactataaacctatatccagattttctttctgctgaagctgttgtcagaatcttcctttggacaaaacatcactagctgactataaaaacaaaagtgtcatcattgaagccctgaagaggcagggaattgagcttcagcaaaatacaggaaaagaactatccagtataaatgtcagaagacagatttcctaaacaagtaaaagagacatcaaaaattttaacataatcacaatgaaatcattttttaccacttttacagcggtgtttcaagcggactgtcactcagatctgcagagatgaatattactcaaaaaatttttttgttctcttgcatttttttcaactaccgcaaagctatacagatttttttgtacttgtggatcttttgtacttctcataacctaatgtcagactaagaaaaataaaatatctgagagtaaaaaaaaaaa

SEQ ID NO: 442089 - DNA, 1698 bp, Homo sapiens
gttacaaacaacacactttttgctcctgagaagatggtaaactgatcaactatacataagcagcttggttagaaaaagtgtccttaacaaggtcataatttaggcataagaagatttatatatgtgttcgcttgcacagaaatctggaggcagtatcacctaacgaccaaacctggaccacccaaaaagccgaagaccccttcaagaccatcagccttagcatattgctatcactgcgcgcaaaaaggccattatggacacgaatgtccagaaagagaagtgtatgacccgtctccagtatctccattcatctgctactatgatgacaaatatgaaattcaggagagagaaaagagactaaaacaaaaaataaaagtactcaagaaaaatggggttatcccagagccatccaagctaccttatataaaagcagcaaatgagaacccccaccatgatataaggaagggccgtgcctcatggaaaagcaacaggtggcctcaagaaaataaagaaacacaaaaagaaatgaagaacaagaatagaaactgggagaagcacaggaaggctgacagacatcgtgaagtggatgaggattttcccaggggccccaaaacctactcttctcctggcagttttaaaacccagaagccttctaagccctttcaccgttcatcacattaccacacgtcaagagaagacaagtctcccaaggaaggcaagaggggcaagcagaagaaaaaggagaggtgctgggaagatgatgacaatgataacttatttcttattaagcagagaaaaaaaaagtcttaagccgtcaggcagcctctgatgtggcttttcattgttcatttggcctttgtgtctataaccttctggcactgtgtttattatctatgattaaataaagtgagtttttggtttggttttttaatttcagccattcctagagttactgaatatccatggagatctcaattctctgtgtccaacaggatattaggtaagaaagtacaaagataaacctggacttctcctattccaatatgtcatctttactcagaatcctagggataggtagaagaattcatcttttcaagaaagtgttttaaaaatactttgggaaaaaaactgcatcaaaggtaatttatcctcaaattaaatccttgcaggaagagaaattaacactaagaaaaagtcatcaatatttttcaactttttttttttttttttttactttggaaaggacaataactataaacctatatccagattttctttctgctgaagctgttgtcagaatcttcctttggacaaaacatcactagctgactataaaaacaaaagtgtcatcattgaagccctgaagaggcagggaattgagcttcagcaaaatacaggaaaagaactatccagtataaatgtcagaagacagatttcctaaacaagtaaaagagacatcaaaaattttaacataatcacaatgaaatcattttttaccacttttacagcggtgtttcaagcggactgtcactcagatctgcagagatgaatattactcaaaaaatttttttgttctcttgcatttttttcaactaccgcaaagctatacagatttttttgtacttgtggatcttttgtacttctcataacctaatgtcagactaagaaaaataaaatatctgagagtaaaaaaaaaaa

SEQ ID NO: 442090 - DNA, 1713 bp, Homo sapiens
agttagcaccaagtgattccgtaaaagatgccaacagctatcacaaatatgtaataacagtgaagtcttcttaaagcagttactattaaattgttttccatcttactaccaaagttcaaaatgctgttttaaaaggtgtacttggcttgcacagaaatctggaggcagtatcacctaacgaccaaacctggaccacccaaaaagccgaagaccccttcaagaccatcagccttagcatattgctatcactgcgcgcaaaaaggccattatggacacgaatgtccagaaagagaagtgtatgacccgtctccagtatctccattcatctgctactatgatgacaaatatgaaattcaggagagagaaaagagactaaaacaaaaaataaaagtactcaagaaaaatggggttatcccagagccatccaagctaccttatataaaagcagcaaatgagaacccccaccatgatataaggaagggccgtgcctcatggaaaagcaacaggtggcctcaagaaaataaagaaacacaaaaagaaatgaagaacaagaatagaaactgggagaagcacaggaaggctgacagacatcgtgaagtggatgaggattttcccaggggccccaaaacctactcttctcctggcagttttaaaacccagaagccttctaagccctttcaccgttcatcacattaccacacgtcaagagaagacaagtctcccaaggaaggcaagaggggcaagcagaagaaaaaggagaggtgctgggaagatgatgacaatgataacttatttcttattaagcagagaaaaaaaaagtcttaagccgtcaggcagcctctgatgtggcttttcattgttcatttggcctttgtgtctataaccttctggcactgtgtttattatctatgattaaataaagtgagtttttggtttggttttttaatttcagccattcctagagttactgaatatccatggagatctcaattctctgtgtccaacaggatattaggtaagaaagtacaaagataaacctggacttctcctattccaatatgtcatctttactcagaatcctagggataggtagaagaattcatcttttcaagaaagtgttttaaaaatactttgggaaaaaaactgcatcaaaggtaatttatcctcaaattaaatccttgcaggaagagaaattaacactaagaaaaagtcatcaatatttttcaactttttttttttttttttttactttggaaaggacaataactataaacctatatccagattttctttctgctgaagctgttgtcagaatcttcctttggacaaaacatcactagctgactataaaaacaaaagtgtcatcattgaagccctgaagaggcagggaattgagcttcagcaaaatacaggaaaagaactatccagtataaatgtcagaagacagatttcctaaacaagtaaaagagacatcaaaaattttaacataatcacaatgaaatcattttttaccacttttacagcggtgtttcaagcggactgtcactcagatctgcagagatgaatattactcaaaaaatttttttgttctcttgcatttttttcaactaccgcaaagctatacagatttttttgtacttgtggatcttttgtacttctcataacctaatgtcagactaagaaaaataaaatatctgagagtaaaaaaaaaaa

SEQ ID NO: 442091 - DNA, 1772 bp, Homo sapiens
caatgccaaattgaatgaggagggaagaaggagagggaagcacacattgacattaagagtaaaagaattgttcttaccatgttatatactttaatatatggaatcgcctgaatacaggtctccatacaaaactctaagaaacttctaaggaatcccttacctataaagctcttttggaaagaatgaggttttaattttcttctaacatcaacaaaccctcacaaatattcatgttgcagaccaaacctggaccacccaaaaagccgaagaccccttcaagaccatcagccttagcatattgctatcactgcgcgcaaaaaggccattatggacacgaatgtccagaaagagaagtgtatgacccgtctccagtatctccattcatctgctactatgatgacaaatatgaaattcaggagagagaaaagagactaaaacaaaaaataaaagtactcaagaaaaatggggttatcccagagccatccaagctaccttatataaaagcagcaaatgagaacccccaccatgatataaggaagggccgtgcctcatggaaaagcaacaggtggcctcaagaaaataaagaaacacaaaaagaaatgaagaacaagaatagaaactgggagaagcacaggaaggctgacagacatcgtgaagtggatgaggattttcccaggggccccaaaacctactcttctcctggcagttttaaaacccagaagccttctaagccctttcaccgttcatcacattaccacacgtcaagagaagacaagtctcccaaggaaggcaagaggggcaagcagaagaaaaaggagaggtgctgggaagatgatgacaatgataacttatttcttattaagcagagaaaaaaaaagtcttaagccgtcaggcagcctctgatgtggcttttcattgttcatttggcctttgtgtctataaccttctggcactgtgtttattatctatgattaaataaagtgagtttttggtttggttttttaatttcagccattcctagagttactgaatatccatggagatctcaattctctgtgtccaacaggatattaggtaagaaagtacaaagataaacctggacttctcctattccaatatgtcatctttactcagaatcctagggataggtagaagaattcatcttttcaagaaagtgttttaaaaatactttgggaaaaaaactgcatcaaaggtaatttatcctcaaattaaatccttgcaggaagagaaattaacactaagaaaaagtcatcaatatttttcaactttttttttttttttttttactttggaaaggacaataactataaacctatatccagattttctttctgctgaagctgttgtcagaatcttcctttggacaaaacatcactagctgactataaaaacaaaagtgtcatcattgaagccctgaagaggcagggaattgagcttcagcaaaatacaggaaaagaactatccagtataaatgtcagaagacagatttcctaaacaagtaaaagagacatcaaaaattttaacataatcacaatgaaatcattttttaccacttttacagcggtgtttcaagcggactgtcactcagatctgcagagatgaatattactcaaaaaatttttttgttctcttgcatttttttcaactaccgcaaagctatacagatttttttgtacttgtggatcttttgtacttctcataacctaatgtcagactaagaaaaataaaatatctgagagtaaaaaaaaaaa

SEQ ID NO: 442092 - DNA, 1570 bp, Homo sapiens
tttctatatttttgcatcattaagcccatactcaggcaccaaacctggaccacccaaaaagccgaagaccccttcaagaccatcagccttagcatattgctatcactgcgcgcaaaaaggccattatggacacgaatgtccagaaagagaagtgtatgacccgtctccagtatctccattcatctgctactatgatgacaaatatgaaattcaggagagagaaaagagactaaaacaaaaaataaaagtactcaagaaaaatggggttatcccagagccatccaagctaccttatataaaagcagcaaatgagaacccccaccatgatataaggaagggccgtgcctcatggaaaagcaacaggtggcctcaagaaaataaagaaacacaaaaagaaatgaagaacaagaatagaaactgggagaagcacaggaaggctgacagacatcgtgaagtggatgaggattttcccaggggccccaaaacctactcttctcctggcagttttaaaacccagaagccttctaagccctttcaccgttcatcacattaccacacgtcaagagaagacaagtctcccaaggaaggcaagaggggcaagcagaagaaaaaggagaggtgctgggaagatgatgacaatgataacttatttcttattaagcagagaaaaaaaaagtcttaagccgtcaggcagcctctgatgtggcttttcattgttcatttggcctttgtgtctataaccttctggcactgtgtttattatctatgattaaataaagtgagtttttggtttggttttttaatttcagccattcctagagttactgaatatccatggagatctcaattctctgtgtccaacaggatattaggtaagaaagtacaaagataaacctggacttctcctattccaatatgtcatctttactcagaatcctagggataggtagaagaattcatcttttcaagaaagtgttttaaaaatactttgggaaaaaaactgcatcaaaggtaatttatcctcaaattaaatccttgcaggaagagaaattaacactaagaaaaagtcatcaatatttttcaactttttttttttttttttttactttggaaaggacaataactataaacctatatccagattttctttctgctgaagctgttgtcagaatcttcctttggacaaaacatcactagctgactataaaaacaaaagtgtcatcattgaagccctgaagaggcagggaattgagcttcagcaaaatacaggaaaagaactatccagtataaatgtcagaagacagatttcctaaacaagtaaaagagacatcaaaaattttaacataatcacaatgaaatcattttttaccacttttacagcggtgtttcaagcggactgtcactcagatctgcagagatgaatattactcaaaaaatttttttgttctcttgcatttttttcaactaccgcaaagctatacagatttttttgtacttgtggatcttttgtacttctcataacctaatgtcagactaagaaaaataaaatatctgagagtaaaaaaaaaaa

SEQ ID NO: 442093 - DNA, 1524 bp, Homo sapiens
gtaaagtaccttgtttcatgctcccagctgatcaatatttttattttccaggcttgcacagaaatctggaggcagtatcacctaacggaatgtccagaaagagaagtgtatgacccgtctccagtatctccattcatctgctactatgatgacaaatatgaaattcaggagagagaaaagagactaaaacaaaaaataaaagtactcaagaaaaatggggttatcccagagccatccaagctaccttatataaaagcagcaaatgagaacccccaccatgatataaggaagggccgtgcctcatggaaaagcaacaggtggcctcaagaaaataaagaaacacaaaaagaaatgaagaacaagaatagaaactgggagaagcacaggaaggctgacagacatcgtgaagtggatgaggattttcccaggggccccaaaacctactcttctcctggcagttttaaaacccagaagccttctaagccctttcaccgttcatcacattaccacacgtcaagagaagacaagtctcccaaggaaggcaagaggggcaagcagaagaaaaaggagaggtgctgggaagatgatgacaatgataacttatttcttattaagcagagaaaaaaaaagtcttaagccgtcaggcagcctctgatgtggcttttcattgttcatttggcctttgtgtctataaccttctggcactgtgtttattatctatgattaaataaagtgagtttttggtttggttttttaatttcagccattcctagagttactgaatatccatggagatctcaattctctgtgtccaacaggatattaggtaagaaagtacaaagataaacctggacttctcctattccaatatgtcatctttactcagaatcctagggataggtagaagaattcatcttttcaagaaagtgttttaaaaatactttgggaaaaaaactgcatcaaaggtaatttatcctcaaattaaatccttgcaggaagagaaattaacactaagaaaaagtcatcaatatttttcaactttttttttttttttttttactttggaaaggacaataactataaacctatatccagattttctttctgctgaagctgttgtcagaatcttcctttggacaaaacatcactagctgactataaaaacaaaagtgtcatcattgaagccctgaagaggcagggaattgagcttcagcaaaatacaggaaaagaactatccagtataaatgtcagaagacagatttcctaaacaagtaaaagagacatcaaaaattttaacataatcacaatgaaatcattttttaccacttttacagcggtgtttcaagcggactgtcactcagatctgcagagatgaatattactcaaaaaatttttttgttctcttgcatttttttcaactaccgcaaagctatacagatttttttgtacttgtggatcttttgtacttctcataacctaatgtcagactaagaaaaataaaatatctgagagtaaaaaaaaaaa

SEQ ID NO: 442094 - DNA, 1475 bp, Homo sapiens
tgaccatgtgacatcataattttacatacaatttataggaatgtccagaaagagaagtgtatgacccgtctccagtatctccattcatctgctactatgatgacaaatatgaaattcaggagagagaaaagagactaaaacaaaaaataaaagtactcaagaaaaatggggttatcccagagccatccaagctaccttatataaaagcagcaaatgagaacccccaccatgatataaggaagggccgtgcctcatggaaaagcaacaggtggcctcaagaaaataaagaaacacaaaaagaaatgaagaacaagaatagaaactgggagaagcacaggaaggctgacagacatcgtgaagtggatgaggattttcccaggggccccaaaacctactcttctcctggcagttttaaaacccagaagccttctaagccctttcaccgttcatcacattaccacacgtcaagagaagacaagtctcccaaggaaggcaagaggggcaagcagaagaaaaaggagaggtgctgggaagatgatgacaatgataacttatttcttattaagcagagaaaaaaaaagtcttaagccgtcaggcagcctctgatgtggcttttcattgttcatttggcctttgtgtctataaccttctggcactgtgtttattatctatgattaaataaagtgagtttttggtttggttttttaatttcagccattcctagagttactgaatatccatggagatctcaattctctgtgtccaacaggatattaggtaagaaagtacaaagataaacctggacttctcctattccaatatgtcatctttactcagaatcctagggataggtagaagaattcatcttttcaagaaagtgttttaaaaatactttgggaaaaaaactgcatcaaaggtaatttatcctcaaattaaatccttgcaggaagagaaattaacactaagaaaaagtcatcaatatttttcaactttttttttttttttttttactttggaaaggacaataactataaacctatatccagattttctttctgctgaagctgttgtcagaatcttcctttggacaaaacatcactagctgactataaaaacaaaagtgtcatcattgaagccctgaagaggcagggaattgagcttcagcaaaatacaggaaaagaactatccagtataaatgtcagaagacagatttcctaaacaagtaaaagagacatcaaaaattttaacataatcacaatgaaatcattttttaccacttttacagcggtgtttcaagcggactgtcactcagatctgcagagatgaatattactcaaaaaatttttttgttctcttgcatttttttcaactaccgcaaagctatacagatttttttgtacttgtggatcttttgtacttctcataacctaatgtcagactaagaaaaataaaatatctgagagtaaaaaaaaaaa

SEQ ID NO: 442095 - DNA, 1320 bp, Homo sapiens
  misc_feature (1257)..(1257): n is a, c, g, or t
  misc_feature (1259)..(1259): n is a, c, g, or t
  misc_feature (1261)..(1261): n is a, c, g, or t
  misc_feature (1265)..(1265): n is a, c, g, or t
  misc_feature (1278)..(1279): n is a, c, g, or t
  misc_feature (1282)..(1283): n is a, c, g, or t
  misc_feature (1301)..(1301): n is a, c, g, or t
agagctgtgttgtccccggaagtgccttccctcccgggtctgcgcggacgcggcctccttacctcatttgtcctcgcccctccccgtccctctacgcgtttggttcccggttggtgcttcctgttcgcagctgcggcacttcaaggttactgactttttatgatgtttggtggctatgagactatagaagcatacgaagatgatctttatcgagatgagtcatctagtgaactgagtgttgatagtgaggtggaatttcaactctatagccaaattcattatgcccaagatcttgatgatgtcatcagggaggaagagcatgaagaaaagaactctgggaattcggaatcttcgagtagtaaaccaaatcagaagaagctaatcgtcctttcagatagtgaggtcatccagctgtcagatgggtcagaggtcatcactttgtctgatgaagacagtatttatagatgtaaaggaaagaatgttagagttcaagcacaagaaaatgcccatggtctttcttcttctcttcaatctaatgagctggttgataagaaatgcaagagtgatattgagaagcctaaatctgaagagagatcaggtgtaatccgagaggtcatgattatagaggtcagttcaagtgaagaggaagagagcaccatttcagaaggtgataatgtggaaagctggatgctactgggatgtgaagtagatgataaagatgatgatatccttctcaaccttgtgggatgtgaaaactctgttactgaaggagaagatggtataaactggtccatcagtgacaaagacattgaggcccagatagctaataaccgaacacctggaagatggacccagcggtactattcagccaacaaaaacattatctgtagaaattgtgacaaacgtggtcatttatcaaaaaactgccccttaccacgaaaagttcgtcgctgcttcctgtgctccaggagaggacatctcctgtattcctgtccagcccccctttgcgaatactgtcctgtgcctaagatgttggaccactcatgtcttttcagacattcctgggataaacagtgtgaccgatgtcatatgctaggccactatacagatgcttgcacagaaatctggaggcagtatcacctaacgaccaaacctggaccacccaaaaagccgaagaccccttcaagaccatcagccttagcatattgctatcactgcgcgcaaaaaggccattatggacacccagtatatgattgngnangacntatttgcatattnntannaattgaatagatatactnagcagactaggtaatcaga

SEQ ID NO: 442096 - DNA, 1150 bp, Homo sapiens
  misc_feature (1087)..(1087): n is a, c, g, or t
  misc_feature (1089)..(1089): n is a, c, g, or t
  misc_feature (1091)..(1091): n is a, c, g, or t
  misc_feature (1095)..(1095): n is a, c, g, or t
  misc_feature (1108)..(1109): n is a, c, g, or t
  misc_feature (1112)..(1113): n is a, c, g, or t
  misc_feature (1131)..(1131): n is a, c, g, or t
agagctgtgttgtccccggaagtgccttccctcccgggtctgcgcggacgcggcctccttacctcatttgtcctcgcccctccccgtccctctacgcgtttggttcccggttggtgcttcctgttcgcagctgcggcacttcaaggttactgactttttatgatgtttggtggctatgagactatagaagcatacgaagatgatctttatcgagatgagtcatctagtgaactgagtgttgatagtgaggtggaatttcaactctatagccaaattcattatgcccaagatcttgatgatgtcatcagggaggaagagcatgaagaaaagaactctgggaattcggaatcttcgagtagtaaaccaaatcagaagaagctaatcgtcctttcagatagtgaggtcatccagctgtcagatgggtcagaggtcatcactttgtctgatgaagacagtatttatagatgtaaaggaaagaatgttagagttcaagcacaagaaaatgcccatggtctttcttcttctcttcaatctaatgagctggttgataagaaatgcaagagtgatattgagaagcctaaatctgaagagagatcaggtgtaatccgagaggtcatgattatagaggtcagttcaagtgaagaggaagagagcaccatttcagaaggtgataatgtggaaagctggatgctactgggatgtgaagtagatgataaagatgatgatatccttctcaaccttgtgggatgtgaaaactctgttactgaagaaagttcgtcgctgcttcctgtgctccaggagaggacatctcctgtattcctgtccagcccccctttgcgaatactgtcctgtgcctaagatgttggaccactcatgtcttttcagacattcctgggataaacagtgtgaccgatgtcatatgctaggccactatacagatgcttgcacagaaatctggaggcagtatcacctaacgaccaaacctggaccacccaaaaagccgaagaccccttcaagaccatcagccttagcatattgctatcactgcgcgcaaaaaggccattatggacacccagtatatgattgngnangacntatttgcatattnntannaattgaatagatatactnagcagactaggtaatcaga

SEQ ID NO: 442097 - DNA, 1084 bp, Homo sapiens
agagctgtgttgtccccggaagtgccttccctcccgggtctgcgcggacgcggcctccttacctcatttgtcctcgcccctccccgtccctctacgcgtttggttcccggttggtgcttcctgttcgcagctgcggcacttcaaggttactgactttttatgatgtttggtggctatgagactatagaagcatacgaagatgatctttatcgagatgagtcatctagtgaactgagtgttgatagtgaggtggaatttcaactctatagccaaattcattatgcccaagatcttgatgatgtcatcagggaggaagagcatgaagaaaagaactctgggaattcggaatcttcgagtagtaaaccaaatcagaagaagctaatcgtcctttcagatagtgaggtcatccagctgtcagatgggtcagaggtcatcactttgtctgatgaagacagtatttatagatgtaaaggaaagaatgttagagttcaagcacaagaaaatgcccatggtctttcttcttctcttcaatctaatgagctggttgataagaaatgcaagagtgatattgagaagcctaaatctgaagagagatcaggtgtaatccgagaggtcatgattatagaggtcagttcaagtgaagaggaagagagcaccatttcagaaggtgataatgtggaaagctggatgctactgggatgtgaagtagatgataaagatgatgatatccttctcaaccttgtgggatgtgaaaactctgttactgaaggctgccagacaccctacttgaaggatcctgttggaacctgtggaaataatacttacaagaacgttgcagctaagctggtccgggtgcagtggtgttacaactaatggatcacaaccagtcacggatttctttgttccatctccattcccacttcttcacttgactagccttaaaaaggctcatgcctgtaatcccagcactaagggaggctcagacagaaggatcatttgagcccaggagtttgagatcagcccaggcaacatagcgagacttcatctctactaaaaataaaataaaaaaattagccaggagtgg

SEQ ID NO: 442098 - DNA, 391 bp, Homo sapiens
aacaaagatatgtgtattatatataaaattaatgtggtaaccttttcatcttattctccttagaatccatcagtagaagaattattttgtacactatgtgtgaaagatcaaagaatatggggcagtcaccagttgtttacaacctggtttgcaagtggcataaaaaaatattagtttgtctgctgaataaaattaaacttatttttctctctgtagcatattaattgtattatagtatgccacagccacttccagtgcaatcctcctagtcttggaacagcagccaattccaggaattaagagaattaggttactttgcctagtggcacaaaaaataccaaggtattaaatcattggcttgtctgtttggggcacaatcagaaataaagtt

SEQ ID NO: 442099 - DNA, 127 bp, Homo sapiens
tactcataaattgtgtaatctattgtcaatctataagtcctttaaaagtgccacggttaagtaataatttatttgttttgtaggagaagatggtataaactggtccatcagtgacaaagacattgag

SEQ ID NO: 442100 - DNA, 432 bp, Homo sapiens
tcatgctcctatgagaatctaatgcagcagctgatttgacaggaggcggagctcaggctctaattctgactagcctgccggctgctcacctcctgctgtgtggcccagttcctaacaggccacgaactggtactgattgttccccagagtttggggaccccttgtcttgacagtatcatgcacaggtaggtacttttaagctgtttgatattattgtttctacttcgggagatgggaagataaatggaataaaatgagcaaagtggcagtgccattaaagatctgtggatatctgatttctcacagaattcacagaattacccttcattaaaagatgcaaatggcagttttatgaagtctttttgccctgttttgtgttgggtgttcagtacagatgcaatttttttttttttaaattttcgatacagggtt

SEQ ID NO: 442101 - DNA, 1116 bp, Homo sapiens
agagctgtgttgtccccggaagtgccttccctcccgggtctgcgcggacgcggcctccttacctcatttgtcctcgcccctccccgtccctctacgcgtttggttcccggttggtgcttcctgttcgcagctgcggcagtgagtatgtgtgtgacggacccccgccgcccgcggctcgggacccctgcctaccctccttcttgcccgccgggctgtggaactagcgcgtgccccctcgccggcctcgacgtctcccgtccgcccctcactcgtggcagggcgcagctcctggagaagatggtataaactggtccatcagtgacaaagacattgaggcccagatagctaataaccgaacacctggaagatggacccagcggtactattcagccaacaaaaacattatctgtagaaattgtgacaaacgtggtcatttatcaaaaaactgccccttaccacgaaaagttcgtcgctgcttcctgtgctccaggagaggacatctcctgtattcctgtccagcccccctttgcgaatactgtcctgtgcctaagatgttggaccactcatgtcttttcagacattcctgggataaacagtgtgaccgatgtcatatgctaggccactatacagatcttgcaccagaaatctggaggcagtatcacctaaagaccaaactgagacacccaaaagccgaagacccttcagaaccatagcttagcatattgtatcacgggcgcaaaggcctttggcccgaaggtccgacagagactttttaccggtccaaaatctcaataaatggcaacatgacgcccaattgaatacggagacaacaacacataaacagaaacacactccaaaaaagggtctcaaaacacaagacgataataaaccacgtaatacccgcacaatcaaggagagcgccacatcaccaaagagggcccaacaaagaacaacaagagagaacaaccagcgtgaaagcacggcaacacacacgagaagtaacagtccaacactcatgtataaaaaaagcagcagaaacaagaccagcgggacagaacagaatcaaacaggctctgcgtgaactcactggctctgcgctgtcgtctcaaacaaacc

SEQ ID NO: 442102 - DNA, 2679 bp, Homo sapiens
agagctgtgttgtccccggaagtgccttccctcccgggtctgcgcggacgcggcctccttacctcatttgtcctcgcccctccccgtccctctacgcgtttggttcccggttggtgcttcctgttcgcagctgcggcacttcaaggttactgactttttatgatgtttggtggctatgagactatagaagcatacgaagatgatctttatcgagatgagtcatctagtgaactgagtgttgatagtgaggtggaatttcaactctatagccaaattcattatgcccaagatcttgatgatgtcatcagggaggaagagcatgaagaaaagaactctgggaattcggaatcttcgagtagtaaaccaaatcagaagaagctaatcgtcctttcagatagtgaggtcatccagctgtcagatgggtcagaggtcatcactttgtctgatgaagacagtatttatagatgtaaaggaaagaatgttagagttcaagcacaagaaaatgcccatggtctttcttcttctcttcaatctaatgagctggttgataagaaatgcaagagtgatattgagaagcctaaatctgaagagagatcaggtgtaatccgagaggtcatgattatagaggtcagttcaagtgaagaggaagagagcaccatttcagaaggtgataatgtggaaagctggatgctactgggatgtgaagtagatgataaagatgatgatatccttctcaaccttgtgggatgtgaaaactctgttactgaaggagaagatggtataaactggtccatcagtgacaaagacattgaggcccagatagctaataaccgaacacctggaagatggacccagcggtactattcagccaacaaaaacattatctgtagaaattgtgacaaacgtggtcatttatcaaaaaactgccccttaccacgaaaagttcgtcgctgcttcctgtgctccaggagaggacatctcctgtattcctgtccagcccccctttgcgaatactgtcctgtgcctaagatgttggaccactcatgtcttttcagacattcctgggataaacagtgtgaccgatgtcatatgctaggccactatacagatgcttgcacagaaatctggaggcagtatcacctaacgaccaaacctggaccacccaaaaagccgaagaccccttcaagaccatcagccttagcatattgctatcactgcgcgcaaaaaggccattatggacacgaatgtccagaaagagaagtgtatgacccgtctccagtatctccattcatctgctactatgatgacaaatatgaaattcaggagagagaaaagagactaaaacaaaaaataaaagtactcaagaaaaatggggttatcccagagccatccaagctaccttatataaaagcagcaaatgagaacccccaccatgatataaggaagggccgtgcctcatggaaaagcaacaggtggcctcaagaaaataaagaaacacaaaaagaaatgaagaacaagaatagaaactgggagaagcacaggaaggctgacagacatcgtgaagtggatgaggattttcccaggggccccaaaacctactcttctcctggcagttttaaaacccagaagccttctaagccctttcaccgttcatcacattaccacacgtcaagagaagacaagtctcccaaggaaggcaagaggggcaagcagaagaaaaaggagaggtgctgggaagatgatgacaatgataacttatttcttattaagcagagaaaaaaaaagtcttaagccgtcaggcagcctctgatgtggcttttcattgttcatttggcctttgtgtctataaccttctggcactgtgtttattatctatgattaaataaagtgagtttttggtttggttttttaatttcagccattcctagagttactgaatatccatggagatctcaattctctgtgtccaacaggatattaggtaagaaagtacaaagataaacctggacttctcctattccaatatgtcatctttactcagaatcctagggataggtagaagaattcatcttttcaagaaagtgttttaaaaatactttgggaaaaaaactgcatcaaaggtaatttatcctcaaattaaatccttgcaggaagagaaattaacactaagaaaaagtcatcaatatttttcaactttttttttttttttttttactttggaaaggacaataactataaacctatatccagattttctttctgctgaagctgttgtcagaatcttcctttggacaaaacatcactagctgactataaaaacaaaagtgtcatcattgaagccctgaagaggcagggaattgagcttcagcaaaatacaggaaaagaactatccagtataaatgtcagaagacagatttcctaaacaagtaaaagagacatcaaaaattttaacataatcacaatgaaatcattttttaccacttttacagcggtgtttcaagcggactgtcactcagatctgcagagatgaatattactcaaaaaatttttttgttctcttgcatttttttcaactaccgcaaagctatacagatttttttgtacttgtggatcttttgtacttctcataacctaatgtcagactaagaaaaataaaatatctgagagtaaaaaaaaaaa

SEQ ID NO: 442103 - DNA, 1803 bp, Homo sapiens
agagctgtgttgtccccggaagtgccttccctcccgggtctgcgcggacgcggcctccttacctcatttgtcctcgcccctccccgtccctctacgcgtttggttcccggttggtgcttcctgttcgcagctgcggcacttcaaggttactgactttttatgatgtttggtggctatgagactatagaagcatacgaagatgatctttatcgagatgagtcatctagtgaactgagtgttgatagtgaggtggaatttcaactctatagccaaattcattatgcccaagatcttgatgatgtcatcagggaggaagagcatgaagaaaagaactctgggaattcggaatcttcgagtagtaaaccaaatcagaagaagctaatcgtcctttcagatagtgaggtcatccagctgtcagatgggtcagaggtcatcactttgtctgatgaagacagtatttatagatgtaaaggaaagaatgttagagttcaagcacaagaaaatgcccatggtctttcttcttctcttcaatctaatgagctggttgataagaaatgcaagagtgatattgagaagcctaaatctgaagagagatcaggtgtaatccgagaggtcatgattatagaggtcagttcaagtgaagaggaagagagcaccatttcagaaggtgataatgtggaaagctggatgctactgggatgtgaagtagatgataaagatgatgatatccttctcaaccttgtgggatgtgaaaactctgttactgaaggagaagatggtataaactggtccatcagtgacaaagacattgaggcccagatagctaataaccgaacacctggaagatggacccagcggtactattcagccaacaaaaacattatctgtagaaattgtgacaaacgtggtcatttatcaaaaaactgccccttaccacgaaaagttcgtcgctgcttcctgtgctccaggagaggacatctcctgtattcctgtccagcccccctttgcgaatactgtcctgtgcctaagatgttggaccactcatgtcttttcagacattcctgggataaacagtgtgaccgatgtcatatgctaggccactatacagatgcttgcacagaaatctggaggcagtatcacctaacgaccaaacctggaccacccaaaaagccgaagaccccttcaagaccatcagccttagcatattgctatcactgcgcgcaaaaaggccattatggacacgaatgtccagaaagagaagtgtatgacccgtctccagtatctccattcatctgctactatgatgacaaatatgaaattcaggagagagaaaagagactaaaacaaaaaataaaagtactcaagaaaaatggggttatcccagagccatccaagctaccttatataaaagcagcaaatgagaacccccaccatgatataaggaagggccgtgcctcatggaaaagcaacaggtggcctcaagaaaataaagaaacacaaaaagaaatgaagaacaagaatagaaactgggagaagcacaggaaggctgacagacatcgtgaagtggatgaggattttcccaggggccccaaaacctactcttctcctggcagttttaaaacccagaagccttctaagccctttcaccgttcatcacggccactcaataaccatgttggccaggctggtcttgaactcctgacttcaggtgatctgcccacctcagcctaccaaagtgctgaaatttgcaggcgtgagccaccatgcccttattgagtggccactcaatagggatctccagaa

SEQ ID NO: 442104 - DNA, 1710 bp, Homo sapiens
agagctgtgttgtccccggaagtgccttccctcccgggtctgcgcggacgcggcctccttacctcatttgtcctcgcccctccccgtccctctacgcgtttggttcccggttggtgcttcctgttcgcagctgcggcacttcaaggttactgactttttatgatgtttggtggctatgagactatagaagcatacgaagatgatctttatcgagatgagtcatctagtgaactgagtgttgatagtgaggtggaatttcaactctatagccaaattcattatgcccaagatcttgatgatgtcatcagggaggaagagcatgaagaaaagaactctgggaattcggaatcttcgagtagtaaaccaaatcagaagaagctaatcgtcctttcagatagtgaggtcatccagctgtcagatgggtcagaggtcatcactttgtctgatgaagacagtatttatagatgtaaaggaaagaatgttagagttcaagcacaagaaaatgcccatggtctttcttcttctcttcaatctaatgagctggttgataagaaatgcaagagtgatattgagaagcctaaatctgaagagagatcaggtgtaatccgagaggtcatgattatagaggtcagttcaagtgaagaggaagagagcaccatttcagaaggtgataatgtggaaagctggatgctactgggatgtgaagtagatgataaagatgatgatatccttctcaaccttgtgggatgtgaaaactctgttactgaaggagaagatggtataaactggtccatcagtgacaaagacattgaggcccagatagctaataaccgaacacctggaagatggacccagcggtactattcagccaacaaaaacattatctgtagaaattgtgacaaacgtggtcatttatcaaaaaactgccccttaccacgaaaagttcgtcgctgcttcctgtgctccaggagaggacatctcctgtattcctgtccagcccccctttgcgaatactgtcctgtgcctaagatgttggaccactcatgtcttttcagacattcctgggataaacagtgtgaccgatgtcatatgctaggccactatacagatgcttgcacagaaatctggaggcagtatcacctaacgaccaaacctggaccacccaaaaagccgaagaccccttcaagaccatcagccttagcatattgctatcactgcgcgcaaaaaggccattatggacacgaatgtccagaaagagaagtgtatgacccgtctccagtatctccattcatctgctactatgatgacaaatatgaaattcaggagagagaaaagagactaaaacaaaaaataaaagtactcaagaaaaatggggttatcccagagccatccaagctaccttatataaaagcagcaaatgagaacccccaccatgatataaggaagggccgtgcctcatggaaaagcaacaggtggcctcaagaaaataaagaaacacaaaaagaaatgaagaacaagaatagaaactgggagaagcacaggaaggctgacagacatcgtgaagtggatgaggattttcccaggggccccaaaacctactcttctcctggcagttttaaaacccagaagccttctaagccctttcaccgttcatcactagttgttcatcaatacttgactggcggggatccatctagaaagtcgacctgc

SEQ ID NO: 442105 - DNA, 2509 bp, Homo sapiens
agagctgtgttgtccccggaagtgccttccctcccgggtctgcgcggacgcggcctccttacctcatttgtcctcgcccctccccgtccctctacgcgtttggttcccggttggtgcttcctgttcgcagctgcggcacttcaaggttactgactttttatgatgtttggtggctatgagactatagaagcatacgaagatgatctttatcgagatgagtcatctagtgaactgagtgttgatagtgaggtggaatttcaactctatagccaaattcattatgcccaagatcttgatgatgtcatcagggaggaagagcatgaagaaaagaactctgggaattcggaatcttcgagtagtaaaccaaatcagaagaagctaatcgtcctttcagatagtgaggtcatccagctgtcagatgggtcagaggtcatcactttgtctgatgaagacagtatttatagatgtaaaggaaagaatgttagagttcaagcacaagaaaatgcccatggtctttcttcttctcttcaatctaatgagctggttgataagaaatgcaagagtgatattgagaagcctaaatctgaagagagatcaggtgtaatccgagaggtcatgattatagaggtcagttcaagtgaagaggaagagagcaccatttcagaaggtgataatgtggaaagctggatgctactgggatgtgaagtagatgataaagatgatgatatccttctcaaccttgtgggatgtgaaaactctgttactgaagaaagttcgtcgctgcttcctgtgctccaggagaggacatctcctgtattcctgtccagcccccctttgcgaatactgtcctgtgcctaagatgttggaccactcatgtcttttcagacattcctgggataaacagtgtgaccgatgtcatatgctaggccactatacagatgcttgcacagaaatctggaggcagtatcacctaacgaccaaacctggaccacccaaaaagccgaagaccccttcaagaccatcagccttagcatattgctatcactgcgcgcaaaaaggccattatggacacgaatgtccagaaagagaagtgtatgacccgtctccagtatctccattcatctgctactatgatgacaaatatgaaattcaggagagagaaaagagactaaaacaaaaaataaaagtactcaagaaaaatggggttatcccagagccatccaagctaccttatataaaagcagcaaatgagaacccccaccatgatataaggaagggccgtgcctcatggaaaagcaacaggtggcctcaagaaaataaagaaacacaaaaagaaatgaagaacaagaatagaaactgggagaagcacaggaaggctgacagacatcgtgaagtggatgaggattttcccaggggccccaaaacctactcttctcctggcagttttaaaacccagaagccttctaagccctttcaccgttcatcacattaccacacgtcaagagaagacaagtctcccaaggaaggcaagaggggcaagcagaagaaaaaggagaggtgctgggaagatgatgacaatgataacttatttcttattaagcagagaaaaaaaaagtcttaagccgtcaggcagcctctgatgtggcttttcattgttcatttggcctttgtgtctataaccttctggcactgtgtttattatctatgattaaataaagtgagtttttggtttggttttttaatttcagccattcctagagttactgaatatccatggagatctcaattctctgtgtccaacaggatattaggtaagaaagtacaaagataaacctggacttctcctattccaatatgtcatctttactcagaatcctagggataggtagaagaattcatcttttcaagaaagtgttttaaaaatactttgggaaaaaaactgcatcaaaggtaatttatcctcaaattaaatccttgcaggaagagaaattaacactaagaaaaagtcatcaatatttttcaactttttttttttttttttttactttggaaaggacaataactataaacctatatccagattttctttctgctgaagctgttgtcagaatcttcctttggacaaaacatcactagctgactataaaaacaaaagtgtcatcattgaagccctgaagaggcagggaattgagcttcagcaaaatacaggaaaagaactatccagtataaatgtcagaagacagatttcctaaacaagtaaaagagacatcaaaaattttaacataatcacaatgaaatcattttttaccacttttacagcggtgtttcaagcggactgtcactcagatctgcagagatgaatattactcaaaaaatttttttgttctcttgcatttttttcaactaccgcaaagctatacagatttttttgtacttgtggatcttttgtacttctcataacctaatgtcagactaagaaaaataaaatatctgagagtaaaaaaaaaaa

SEQ ID NO: 442106 - DNA, 2079 bp, Homo sapiens
tgtacccaccaaaaaaaaagagagagagagagaaagcgactttgttctgcaaacgttggcctaagctttgaaaaccatgagccattgagttttgtgaattcaagttagacagtaacagaggccaagactctaagcgaacaatatctgaaaaggaagtacacaaaaacaggagaagatggtataaactggtccatcagtgacaaagacattgaggcccagatagctaataaccgaacacctggaagatggacccagcggtactattcagccaacaaaaacattatctgtagaaattgtgacaaacgtggtcatttatcaaaaaactgccccttaccacgaaaagttcgtcgctgcttcctgtgctccaggagaggacatctcctgtattcctgtccagcccccctttgcgaatactgtcctgtgcctaagatgttggaccactcatgtcttttcagacattcctgggataaacagtgtgaccgatgtcatatgctaggccactatacagatgcttgcacagaaatctggaggcagtatcacctaacgaccaaacctggaccacccaaaaagccgaagaccccttcaagaccatcagccttagcatattgctatcactgcgcgcaaaaaggccattatggacacgaatgtccagaaagagaagtgtatgacccgtctccagtatctccattcatctgctactatgatgacaaatatgaaattcaggagagagaaaagagactaaaacaaaaaataaaagtactcaagaaaaatggggttatcccagagccatccaagctaccttatataaaagcagcaaatgagaacccccaccatgatataaggaagggccgtgcctcatggaaaagcaacaggtggcctcaagaaaataaagaaacacaaaaagaaatgaagaacaagaatagaaactgggagaagcacaggaaggctgacagacatcgtgaagtggatgaggattttcccaggggccccaaaacctactcttctcctggcagttttaaaacccagaagccttctaagccctttcaccgttcatcacattaccacacgtcaagagaagacaagtctcccaaggaaggcaagaggggcaagcagaagaaaaaggagaggtgctgggaagatgatgacaatgataacttatttcttattaagcagagaaaaaaaaagtcttaagccgtcaggcagcctctgatgtggcttttcattgttcatttggcctttgtgtctataaccttctggcactgtgtttattatctatgattaaataaagtgagtttttggtttggttttttaatttcagccattcctagagttactgaatatccatggagatctcaattctctgtgtccaacaggatattaggtaagaaagtacaaagataaacctggacttctcctattccaatatgtcatctttactcagaatcctagggataggtagaagaattcatcttttcaagaaagtgttttaaaaatactttgggaaaaaaactgcatcaaaggtaatttatcctcaaattaaatccttgcaggaagagaaattaacactaagaaaaagtcatcaatatttttcaactttttttttttttttttttactttggaaaggacaataactataaacctatatccagattttctttctgctgaagctgttgtcagaatcttcctttggacaaaacatcactagctgactataaaaacaaaagtgtcatcattgaagccctgaagaggcagggaattgagcttcagcaaaatacaggaaaagaactatccagtataaatgtcagaagacagatttcctaaacaagtaaaagagacatcaaaaattttaacataatcacaatgaaatcattttttaccacttttacagcggtgtttcaagcggactgtcactcagatctgcagagatgaatattactcaaaaaatttttttgttctcttgcatttttttcaactaccgcaaagctatacagatttttttgtacttgtggatcttttgtacttctcataacctaatgtcagactaagaaaaataaaatatctgagagtaaaaaaaaaaa

SEQ ID NO: 442107 - DNA, 2123 bp, Homo sapiens
acctattcccttgatgtctgcagtatcacctttcttgtagcttcacgtgtatgtggccaaaagaacaactcttttctaaaaggcctggagaacattatcagggtctccctctgttgcccaggctggagtgtggtggcgcgatcttggctcagcgcaacctgctggactcaagcaatcctcccacctcagccccccgagtagctgggactacaagagaagatggtataaactggtccatcagtgacaaagacattgaggcccagatagctaataaccgaacacctggaagatggacccagcggtactattcagccaacaaaaacattatctgtagaaattgtgacaaacgtggtcatttatcaaaaaactgccccttaccacgaaaagttcgtcgctgcttcctgtgctccaggagaggacatctcctgtattcctgtccagcccccctttgcgaatactgtcctgtgcctaagatgttggaccactcatgtcttttcagacattcctgggataaacagtgtgaccgatgtcatatgctaggccactatacagatgcttgcacagaaatctggaggcagtatcacctaacgaccaaacctggaccacccaaaaagccgaagaccccttcaagaccatcagccttagcatattgctatcactgcgcgcaaaaaggccattatggacacgaatgtccagaaagagaagtgtatgacccgtctccagtatctccattcatctgctactatgatgacaaatatgaaattcaggagagagaaaagagactaaaacaaaaaataaaagtactcaagaaaaatggggttatcccagagccatccaagctaccttatataaaagcagcaaatgagaacccccaccatgatataaggaagggccgtgcctcatggaaaagcaacaggtggcctcaagaaaataaagaaacacaaaaagaaatgaagaacaagaatagaaactgggagaagcacaggaaggctgacagacatcgtgaagtggatgaggattttcccaggggccccaaaacctactcttctcctggcagttttaaaacccagaagccttctaagccctttcaccgttcatcacattaccacacgtcaagagaagacaagtctcccaaggaaggcaagaggggcaagcagaagaaaaaggagaggtgctgggaagatgatgacaatgataacttatttcttattaagcagagaaaaaaaaagtcttaagccgtcaggcagcctctgatgtggcttttcattgttcatttggcctttgtgtctataaccttctggcactgtgtttattatctatgattaaataaagtgagtttttggtttggttttttaatttcagccattcctagagttactgaatatccatggagatctcaattctctgtgtccaacaggatattaggtaagaaagtacaaagataaacctggacttctcctattccaatatgtcatctttactcagaatcctagggataggtagaagaattcatcttttcaagaaagtgttttaaaaatactttgggaaaaaaactgcatcaaaggtaatttatcctcaaattaaatccttgcaggaagagaaattaacactaagaaaaagtcatcaatatttttcaactttttttttttttttttttactttggaaaggacaataactataaacctatatccagattttctttctgctgaagctgttgtcagaatcttcctttggacaaaacatcactagctgactataaaaacaaaagtgtcatcattgaagccctgaagaggcagggaattgagcttcagcaaaatacaggaaaagaactatccagtataaatgtcagaagacagatttcctaaacaagtaaaagagacatcaaaaattttaacataatcacaatgaaatcattttttaccacttttacagcggtgtttcaagcggactgtcactcagatctgcagagatgaatattactcaaaaaatttttttgttctcttgcatttttttcaactaccgcaaagctatacagatttttttgtacttgtggatcttttgtacttctcataacctaatgtcagactaagaaaaataaaatatctgagagtaaaaaaaaaaa

SEQ ID NO: 442108 - DNA, 2263 bp, Homo sapiens
ctcctgctgtgtggcccagttcctaacaggccacgaactggtactgattgttccccagagtttggggaccccttgtcttgacagtatcatgcacagtgccaagatttcactatgttgccccagtctggtctcgaactcctgggctcaagtgatcctcccacctcagcctcccagagtgctggaattaggtgtgagacaccatgcccagcccctgagtctgccttaactagctgctttatgcatcatccaggttttctggattcagtggaaaagacaaggtagtgtgtgcttattccatcttacttggaattggaactcctggtatatttggaaatcaacaaaaatgttaaaacgagaagatggtataaactggtccatcagtgacaaagacattgaggcccagatagctaataaccgaacacctggaagatggacccagcggtactattcagccaacaaaaacattatctgtagaaattgtgacaaacgtggtcatttatcaaaaaactgccccttaccacgaaaagttcgtcgctgcttcctgtgctccaggagaggacatctcctgtattcctgtccagcccccctttgcgaatactgtcctgtgcctaagatgttggaccactcatgtcttttcagacattcctgggataaacagtgtgaccgatgtcatatgctaggccactatacagatgcttgcacagaaatctggaggcagtatcacctaacgaccaaacctggaccacccaaaaagccgaagaccccttcaagaccatcagccttagcatattgctatcactgcgcgcaaaaaggccattatggacacgaatgtccagaaagagaagtgtatgacccgtctccagtatctccattcatctgctactatgatgacaaatatgaaattcaggagagagaaaagagactaaaacaaaaaataaaagtactcaagaaaaatggggttatcccagagccatccaagctaccttatataaaagcagcaaatgagaacccccaccatgatataaggaagggccgtgcctcatggaaaagcaacaggtggcctcaagaaaataaagaaacacaaaaagaaatgaagaacaagaatagaaactgggagaagcacaggaaggctgacagacatcgtgaagtggatgaggattttcccaggggccccaaaacctactcttctcctggcagttttaaaacccagaagccttctaagccctttcaccgttcatcacattaccacacgtcaagagaagacaagtctcccaaggaaggcaagaggggcaagcagaagaaaaaggagaggtgctgggaagatgatgacaatgataacttatttcttattaagcagagaaaaaaaaagtcttaagccgtcaggcagcctctgatgtggcttttcattgttcatttggcctttgtgtctataaccttctggcactgtgtttattatctatgattaaataaagtgagtttttggtttggttttttaatttcagccattcctagagttactgaatatccatggagatctcaattctctgtgtccaacaggatattaggtaagaaagtacaaagataaacctggacttctcctattccaatatgtcatctttactcagaatcctagggataggtagaagaattcatcttttcaagaaagtgttttaaaaatactttgggaaaaaaactgcatcaaaggtaatttatcctcaaattaaatccttgcaggaagagaaattaacactaagaaaaagtcatcaatatttttcaactttttttttttttttttttactttggaaaggacaataactataaacctatatccagattttctttctgctgaagctgttgtcagaatcttcctttggacaaaacatcactagctgactataaaaacaaaagtgtcatcattgaagccctgaagaggcagggaattgagcttcagcaaaatacaggaaaagaactatccagtataaatgtcagaagacagatttcctaaacaagtaaaagagacatcaaaaattttaacataatcacaatgaaatcattttttaccacttttacagcggtgtttcaagcggactgtcactcagatctgcagagatgaatattactcaaaaaatttttttgttctcttgcatttttttcaactaccgcaaagctatacagatttttttgtacttgtggatcttttgtacttctcataacctaatgtcagactaagaaaaataaaatatctgagagtaaaaaaaaaaa

SEQ ID NO: 442109 - DNA, 2006 bp, Homo sapiens
aagcagtggtatcaacgcagagggcccattacggccgggggaaaaccatgagccattgagttttgtgaattcaagttagacagtaacagaggccaagactctaagcgaacaatatctgaaaaggaagtacacaaaaacaggcccagatagctaataaccgaacacctggaagatggacccagcggtactattcagccaacaaaaacattatctgtagaaattgtgacaaacgtggtcatttatcaaaaaactgccccttaccacgaaaagttcgtcgctgcttcctgtgctccaggagaggacatctcctgtattcctgtccagcccccctttgcgaatactgtcctgtgcctaagatgttggaccactcatgtcttttcagacattcctgggataaacagtgtgaccgatgtcatatgctaggccactatacagatgcttgcacagaaatctggaggcagtatcacctaacgaccaaacctggaccacccaaaaagccgaagaccccttcaagaccatcagccttagcatattgctatcactgcgcgcaaaaaggccattatggacacgaatgtccagaaagagaagtgtatgacccgtctccagtatctccattcatctgctactatgatgacaaatatgaaattcaggagagagaaaagagactaaaacaaaaaataaaagtactcaagaaaaatggggttatcccagagccatccaagctaccttatataaaagcagcaaatgagaacccccaccatgatataaggaagggccgtgcctcatggaaaagcaacaggtggcctcaagaaaataaagaaacacaaaaagaaatgaagaacaagaatagaaactgggagaagcacaggaaggctgacagacatcgtgaagtggatgaggattttcccaggggccccaaaacctactcttctcctggcagttttaaaacccagaagccttctaagccctttcaccgttcatcacattaccacacgtcaagagaagacaagtctcccaaggaaggcaagaggggcaagcagaagaaaaaggagaggtgctgggaagatgatgacaatgataacttatttcttattaagcagagaaaaaaaaagtcttaagccgtcaggcagcctctgatgtggcttttcattgttcatttggcctttgtgtctataaccttctggcactgtgtttattatctatgattaaataaagtgagtttttggtttggttttttaatttcagccattcctagagttactgaatatccatggagatctcaattctctgtgtccaacaggatattaggtaagaaagtacaaagataaacctggacttctcctattccaatatgtcatctttactcagaatcctagggataggtagaagaattcatcttttcaagaaagtgttttaaaaatactttgggaaaaaaactgcatcaaaggtaatttatcctcaaattaaatccttgcaggaagagaaattaacactaagaaaaagtcatcaatatttttcaactttttttttttttttttttactttggaaaggacaataactataaacctatatccagattttctttctgctgaagctgttgtcagaatcttcctttggacaaaacatcactagctgactataaaaacaaaagtgtcatcattgaagccctgaagaggcagggaattgagcttcagcaaaatacaggaaaagaactatccagtataaatgtcagaagacagatttcctaaacaagtaaaagagacatcaaaaattttaacataatcacaatgaaatcattttttaccacttttacagcggtgtttcaagcggactgtcactcagatctgcagagatgaatattactcaaaaaatttttttgttctcttgcatttttttcaactaccgcaaagctatacagatttttttgtacttgtggatcttttgtacttctcataacctaatgtcagactaagaaaaataaaatatctgagagtaaaaaaaaaaa

SEQ ID NO: 442110 - DNA, 2244 bp, Homo sapiens
agagctgtgttgtccccggaagtgccttccctcccgggtctgcgcggacgcggcctccttacctcatttgtcctcgcccctccccgtccctctacgcgtttggttcccggttggtgcttcctgttcgcagctgcggcacttcaaggttactgactttttatgatgtttggtggctatgagactatagaagcatacgaagatgatctttatcgagatgagtcatctagtgaactgagtgttgatagtgaggtggaatttcaactctatagccaaattcattatgcccaagatcttgatgatgtcatcagggaggaagagcatgaagaaaagaactctgggaattcggaatcttcgagtagtaaaccaaatcagaagaagctaatcgtcctttcagatagtgaggtcatccagctgtcagatgggtcagaggtcatcactttgtctgatgaagacagtatttatagatgtaaaggaaagaatgttagagttcaagcacaagaaaatgcccatggtctttcttcttctcttcaatctaatgagctggttgataagaaatgcaagagtgatattgagaagcctaaatctgaagagagatcaggtgtaatccgagaggtcatgattatagaggtcagttcaagtgaagaggaagagagcaccatttcagaaggtgataatgtggaaagctggatgctactgggatgtgaagtagatgataaagatgatgatatccttctcaaccttgtgggatgtgaaaactctgttactgaaggagaagatggtataaactggtccatcagtgacaaagacattgaggcccagatagctaataaccgaacacctggaagatggacccagcggtactattcagccaacaaaaacattatctgtagaaattgtgacaaacgtggtcatttatcaaaaaactgccccttaccacgaaaagttcgtcgctgcttcctgtgctccaggagaggacatctcctgtattcctgtccagcccccctttgcgaatactgtcctgtgcctaagatgttggaccactcatgtcttttcagacattcctgggataaacagtgtgaccgatgtcatatgctaggccactatacagatgctgacagacatcgtgaagtggatgaggattttcccaggggccccaaaacctactcttctcctggcagttttaaaacccagaagccttctaagccctttcaccgttcatcacattaccacacgtcaagagaagacaagtctcccaaggaaggcaagaggggcaagcagaagaaaaaggagaggtgctgggaagatgatgacaatgataacttatttcttattaagcagagaaaaaaaaagtcttaagccgtcaggcagcctctgatgtggcttttcattgttcatttggcctttgtgtctataaccttctggcactgtgtttattatctatgattaaataaagtgagtttttggtttggttttttaatttcagccattcctagagttactgaatatccatggagatctcaattctctgtgtccaacaggatattaggtaagaaagtacaaagataaacctggacttctcctattccaatatgtcatctttactcagaatcctagggataggtagaagaattcatcttttcaagaaagtgttttaaaaatactttgggaaaaaaactgcatcaaaggtaatttatcctcaaattaaatccttgcaggaagagaaattaacactaagaaaaagtcatcaatatttttcaactttttttttttttttttttactttggaaaggacaataactataaacctatatccagattttctttctgctgaagctgttgtcagaatcttcctttggacaaaacatcactagctgactataaaaacaaaagtgtcatcattgaagccctgaagaggcagggaattgagcttcagcaaaatacaggaaaagaactatccagtataaatgtcagaagacagatttcctaaacaagtaaaagagacatcaaaaattttaacataatcacaatgaaatcattttttaccacttttacagcggtgtttcaagcggactgtcactcagatctgcagagatgaatattactcaaaaaatttttttgttctcttgcatttttttcaactaccgcaaagctatacagatttttttgtacttgtggatcttttgtacttctcataacctaatgtcagactaagaaaaataaaatatctgagagtaaaaaaaaaaa

SEQ ID NO: 442111 - DNA, 1585 bp, Homo sapiens
  misc_feature (1)..(1): n is a, c, g, or t
  misc_feature (24)..(24): n is a, c, g, or t
  misc_feature (102)..(102): n is a, c, g, or t
ngggcgatggtaccggcccccctngggtcgacgtatcgattagctggtatcgaattgcgccgcgtcgacggtgcgagagacgacgagggacccttcagaccntcgccttagctattgctatcatgcgcgcaaaaggccttatggacacgaatgtccagaaagagaagtgtatgacccgtctccagtatctccattcatctgctactatgatgacaaatatgaaattcaggagagagaaaagagactaaaacaaaaaataaaagtactcaagaaaaatggggttatcccagagccatccaagctaccttatataaaagcagcaaatgagaacccccaccatgatataaggaagggccgtgcctcatggaaaagcaacaggtggcctcaagaaaataaagaaacacaaaaagaaatgaagaacaagaatagaaactgggagaagcacaggaaggctgacagacatcgtgaagtggatgaggattttcccaggggccccaaaacctactcttctcctggcagttttaaaacccagaagccttctaagccctttcaccgttcatcacattaccacacgtcaagagaagacaagtctcccaaggaaggcaagaggggcaagcagaagaaaaaggagaggtgctgggaagatgatgacaatgataacttatttcttattaagcagagaaaaaaaaagtcttaagccgtcaggcagcctctgatgtggcttttcattgttcatttggcctttgtgtctataaccttctggcactgtgtttattatctatgattaaataaagtgagtttttggtttggttttttaatttcagccattcctagagttactgaatatccatggagatctcaattctctgtgtccaacaggatattaggtaagaaagtacaaagataaacctggacttctcctattccaatatgtcatctttactcagaatcctagggataggtagaagaattcatcttttcaagaaagtgttttaaaaatactttgggaaaaaaactgcatcaaaggtaatttatcctcaaattaaatccttgcaggaagagaaattaacactaagaaaaagtcatcaatatttttcaactttttttttttttttttttactttggaaaggacaataactataaacctatatccagattttctttctgctgaagctgttgtcagaatcttcctttggacaaaacatcactagctgactataaaaacaaaagtgtcatcattgaagccctgaagaggcagggaattgagcttcagcaaaatacaggaaaagaactatccagtataaatgtcagaagacagatttcctaaacaagtaaaagagacatcaaaaattttaacataatcacaatgaaatcattttttaccacttttacagcggtgtttcaagcggactgtcactcagatctgcagagatgaatattactcaaaaaatttttttgttctcttgcatttttttcaactaccgcaaagctatacagatttttttgtacttgtggatcttttgtacttctcataacctaatgtcagactaagaaaaataaaatatctgagagtaaaaaaaaaaa

SEQ ID NO: 442112 - DNA, 1703 bp, Homo sapiens
ctcctgctgtgtggcccagttcctaacaggccacgaactggtactgattgttccccagagtttggggaccccttgtcttgacagtatcatgcacagattgggattctcacttgagccagagaggcggaggttgcagtgagccaagattgcaccactgtgctccagcctggtgacagagcaagattccatcccccctaaaaaagaaaaaagattgggattctgcttaaggagaagatggtataaactggtccatcagtgacaaagacattgaggcccagatagctaataaccgaacacctggaagatggacccagcggtactattcagccaacaaaaacattatctgtagaaattgtgacaaacgtggtcatttatcaaaaaactgccccttaccacgaaaagttcgtcgctgcttcctgtgctccaggagaggacatctcctgtattcctgtccagcccccctttgcgaatactgtcctgtgcctaagatgttggaccactcatgtcttttcagacattcctgggataaacagtgtgaccgatgtcatatgctaggccactatacagatgctgacagacatcgtgaagtggatgaggattttcccaggggccccaaaacctactcttctcctggcagttttaaaacccagaagccttctaagccctttcaccgttcatcacattaccacacgtcaagagaagacaagtctcccaaggaaggcaagaggggcaagcagaagaaaaaggagaggtgctgggaagatgatgacaatgataacttatttcttattaagcagagaaaaaaaaagtcttaagccgtcaggcagcctctgatgtggcttttcattgttcatttggcctttgtgtctataaccttctggcactgtgtttattatctatgattaaataaagtgagtttttggtttggttttttaatttcagccattcctagagttactgaatatccatggagatctcaattctctgtgtccaacaggatattaggtaagaaagtacaaagataaacctggacttctcctattccaatatgtcatctttactcagaatcctagggataggtagaagaattcatcttttcaagaaagtgttttaaaaatactttgggaaaaaaactgcatcaaaggtaatttatcctcaaattaaatccttgcaggaagagaaattaacactaagaaaaagtcatcaatatttttcaactttttttttttttttttttactttggaaaggacaataactataaacctatatccagattttctttctgctgaagctgttgtcagaatcttcctttggacaaaacatcactagctgactataaaaacaaaagtgtcatcattgaagccctgaagaggcagggaattgagcttcagcaaaatacaggaaaagaactatccagtataaatgtcagaagacagatttcctaaacaagtaaaagagacatcaaaaattttaacataatcacaatgaaatcattttttaccacttttacagcggtgtttcaagcggactgtcactcagatctgcagagatgaatattactcaaaaaatttttttgttctcttgcatttttttcaactaccgcaaagctatacagatttttttgtacttgtggatcttttgtacttctcataacctaatgtcagactaagaaaaataaaatatctgagagtaaaaaaaaaaa

SEQ ID NO: 442113 - DNA, 1168 bp, Homo sapiens
agagctgtgttgtccccggaagtgccttccctcccgggtctgcgcggacgcggcctccttacctcatttgtcctcgcccctccccgtccctctacgcgtttggttcccggttggtgcttcctgttcgcagctgcggcacttcaaggttactgactttttatgatgtttggtggctatgagactatagaagcatacgaagatgatctttatcgagatgagtcatctagtgaactgagtgttgatagtgaggtggaatttcaactctatagccaaattcattatgcccaagatcttgatgatgtcatcagggaggaagagcatgaagaaaagaactctgggaattcggaatcttcgagtagtaaaccaaatcagaagaagctaatcgtcctttcagatagtgaggtcatccagctgtcagatgggtcagaggtcatcactttgtctgatgaagacagtatttatagatgtaaaggaaagaatgttagagttcaagcacaagaaaatgcccatggtctttcttcttctcttcaatctaatgagctggttgataagaaatgcaagagtgatattgagaagcctaaatctgaagagagatcaggtgtaatccgagaggtcatgattatagaggtcagttcaagtgaagaggaagagagcaccatttcagaaggtgataatgtggaaagctggatgctactgggatgtgaagtagatgataaagatgatgatatccttctcaaccttgtgggatgtgaaaactctgttactgaaggtaatacctagcaaatacagaaagagagataaagcaagcaagctgttttgaaagtgtctaatattggctgatgtagagctataggctgccagacaccctacttgaaggatcctgttggaacctgtggaaataatacttacaagaacgttgcagctaagctggtccgggtgcagtggtgttacaactaatggatcacaaccagtcacggatttctttgttccatctccattcccacttcttcacttgactagccttaaaaaggctcatgcctgtaatcccagcactaagggaggctcagacagaaggatcatttgagcccaggagtttgagatcagcccaggcaacatagcgagacttcatctctactaaaaataaaataaaaaaattagccaggagtgg

SEQ ID NO: 442114 - DNA, 2204 bp, Homo sapiens
gagatggccaattgtcaggctgtgatcctctccgtagaggatgacacagggcaccggatcatcatcgagtatctgctggaggccacccgcagccctgaggtgggcatgaggcaagctgctgccatcatcctcaacatctactgttcccgctcaaaggctgactacaccagccacctgcggagcctggtctcgggcctgatccgcctcttcaatgactccagccctgtggttctggaggagagctgggatgccctaaatgccatcactaagaagctggatgctggcaaccagttggcactcattgaagagctgcacaaggaaatccggctcatagggaacgagagcaaaggcgagcatgtgccaggattctgcctcccgaagaagggagtgacctccatccttccagtgttgcgggaaggagtcctgactggcagccctgagcagaaggaggaggcagccaaagccttaggcttggtaatccgcctgacctcggctgacgccctgaggccctccgtggtcagcatcactggccctctgatccgcatcctgggggacaggttcagctggaatgtgaaggcggctctgctcgagacactcagcctcttgttggctaaggttgggattgccctgaagcccttcctgccccagctgcagaccactttcaccaaagccctgcaggactccaaccggggggtgcgcctgaaggccgcagatgctctggggaagctcatttccatccacattaaggtggaccccctcttcacagagctgctcaatggcatccgcgccatggaggacccaggtgtcagggacaccatgctgcaggccctgaggtttgtgattcagggagcaggggccaaagtggatgccgtcatccggaaaaacatcgtctcactcctgctgagcatgctgggacacgatgaggacaacactcgcatctcctcagccgggtgcctaggggaactgtgtgcctttttgactgaagaggagcttagtgccgttctacagcagtgcttgctggcggacgtgtccggcattgactggatggttcggcacgggcggagcctggcactttccgtggctgtgaatgtggctcctggcagactttgtgccggcagatatagcagtgatgttcaggaaatgatcctgagcagtgccacggcggacaggatccccattgcggtgagcggggtccggggcatgggctttctcatgagacaccacatcgagacaggcggagggcagttgccggccaaactttccagcctgttcgttaagtgtctgcagaacccatccagcgacatcaggctggtggctgagaagatgatctggtgggcaaataaggacccactgcctcccctggacccccaggccatcaagcccatcctgaaggctcttcttgacaacaccaaggataagaacaccgtggtcagggcctacagcgaccaggcaattgtcaacctcctcaagatgcggcagggtgaagaggtgtttcagtccctctccaagatcctggatgtggccagtttggaggtgctgaacgaggttaaccgaaggtccctgaagaagctggccagccaggccgactccacggagcaggtggacgacaccatcctgacatgagaggcctgggccagcagcagcattgccgctccacatctttgctcaatgttttcatttttgaaaatacatttgttccaatggggagcttggaagatggcgttcccagaaagtattttaatatcaatagaccacagccaaagccttaaatcaaacccacacacaactgaaaattgcctcctccatctctcaccttttcctgtggagaagagaaggaaaagcacacgcatgcgcctcagcaaatggcagcccaggagctgtttgtccagtttagcatggctaggtctggaactataatagcagggtcagactgtgggttcctcttctcctgtgcttgagctctggtttgagagctggcgctaccaacctttttcctatatcccgagtggggcacagacggtggatctctgcccagtgtggtgtgtctggcttggcttttcaatattgtgaggtctgaatggatctgatccctgtcagatgaaaatgattcacagctctggcagttcccaagtctggggaggggtataggtttgaaaggctgtttgaaagaggaatgtttaataaaggctttgatttaatcttga

SEQ ID NO: 442115 - DNA, 2468 bp, Homo sapiens
  misc_feature (2304)..(2305): n is a, c, g, or t
  misc_feature (2313)..(2313): n is a, c, g, or t
  misc_feature (2321)..(2321): n is a, c, g, or t
gagatggccaattgtcaggctgtgatcctctccgtagaggatgacacagggcaccggatcatcatcgagtatctgctggaggccacccgcagccctgaggtgggcatgaggcaagctgctgccatcatcctcaacatctactgttcccgctcaaaggctgactacaccagccacctgcggagcctggtctcgggcctgatccgcctcttcaatgactccagccctgtggttctggaggagagctgggatgccctaaatgccatcactaagaagctggatgctggcaaccagttggcactcattgaagagctgcacaaggaaatccggctcatagggaacgagagcaaaggcgagcatgtgccaggattctgcctcccgaagaagggagtgacctccatccttccagtgttgcgggaaggagtcctgactggcagccctgagcagaaggaggaggcagccaaagccttaggcttggtaatccgcctgacctcggctgacgccctgaggccctccgtggtcagcatcactggccctctgatccgcatcctgggggacaggttcagctggaatgtgaaggcggctctgctcgagacactcagcctcttgttggctaaggttgggattgccctgaagcccttcctgccccagctgcagaccactttcaccaaagccctgcaggactccaaccggggggtgcgcctgaaggccgcagatgctctggggaagctcatttccatccacattaaggtggaccccctcttcacagagctgctcaatggcatccgcgccatggaggacccaggtgtcagggacaccatgctgcaggccctgaggtttgtgattcagggagcaggggccaaagtggatgccgtcatccggaaaaacatcgtctcactcctgctgagcatgctgggacacgatgaggacaacactcgcatctcctcagccgggtgcctaggggaactgtgtgcctttttgactgaagaggagcttagtgccgttctacagcagtgcttgctggcggacgtgtccggcattgactggatggttcggcacgggcggagcctggcactttccgtggctgtgaatgtggctcctggcagactttgtgccggcagatatagcagtgatgttcaggaaatgatcctgagcagtgccacggcggacaggatccccattgcggtgagcggggtccggggcatgggctttctcatgagacaccacatcgagacaggcggagggcagttgccggccaaactttccagcctgttcgttaagtgtctgcagaacccatccagcgacatcaggctggtggctgagaagatgatctggtgggcaaataaggacccactgcctcccctggacccccaggccatcaagcccatcctgaaggctcttcttgacaacaccaaggataagaacaccgtggtcagggcctacagcgaccaggcaattgtcaacctcctcaagatgcggcagggtgaagaggtgtttcagtccctctccaagatcctggatgtggccagtttggaggtgctgaacgaggttaaccgaaggtccctgaagaagctggccagccaggccgactccacggagcaggtggacgacaccatcctgacatgagaggcctgggccagcagcagcattgccgctccacatctttgctcaatgttttcatttttgaaaatacatttgttccaatggggagcttggaagatggcgttcccagaaagtattttaatatcaatagaccacagccaaagccttaaatcaaacccacacacaactgaaaattgcctcctccatctctcaccttttcctgtggagaagagaaggaaaagcacacgcatgcgcctcagcaaatggcagcccaggagctgtttgtccagtttagcatggctaggtctggaactataatagcagggtcagactgtgggttcctcttctcctgtgcttgagctctggtttgagagctggcgctaccaacctttttcctatatcccgagtggggcacagacggtggatctctgcccagtgtggtgtgtctggcttggcttttcaatattgtgaggtctgaatggatctgatccctgtcagatgaaaatgattcacagctctggcagttcccaagtctggggaggggtataggtttgaaaggctgtttgaaagaggaatgtttaataaaggctttgatttaatcttgaaaaaaaaaaaaaaaaaaaaaaaaaaaaaaaaaaaaaaaaaaaaaaaaaaaaaaaaaaaaaaaaaaaaaaaaaaaaaaaaaaaaaaaaaaaaaacattgtnncccacttngcccaacncttttttaaattctacaaattattcgaatcggccccaatttggggccaatttgccccaatcccccctaaggtggccccttttacaatccattgcccgttttttacacacggcttaccggcgctctgggtaacccctttcccctttgt

SEQ ID NO: 442116 - DNA, 1512 bp, Homo sapiens
tatccttggcgacagagcgaggccctgtctctaaaacaaacaaacaatactgaatttgcagtggtcccgtagccctgagtgtctctgctcaaagaacacagctgtaagcccggagtggttcatgagcaggctttccttactttccttaatgtgccactttggggagcttctgccaagatagcagggaggtccatgtgaatgtggcctggagttttccttgtgctctgggtcagcacactggtctccagcggggtgggcccatgggcctcatgggtgctggggacatgctgtaaaataccggttgatcccagtcgtgtccttccacccagcggacgtgtccggcattgactggatggttcggcacgggcggagcctggcactttccgtggctgtgaatgtggctcctggcagactttgtgccggcagatatagcagtgatgttcaggaaatgatcctgagcagtgccacggcggacaggatccccattgcggtgagcggggtccggggcatgggctttctcatgagacaccacatcgagacaggcggagggcagttgccggccaaactttccagcctgttcgttaagtgtctgcagaacccatccagcgacatcaggctggtggctgagaagatgatctggtgggcaaataaggacccactgcctcccctggacccccaggccatcaagcccatcctgaaggctcttcttgacaacaccaaggataagaacaccgtggtcagggcctacagcgaccaggcaattgtcaacctcctcaagatgcggcagggtgaagaggtgtttcagtccctctccaagatcctggatgtggccagtttggaggtgctgaacgaggttaaccgaaggtccctgaagaagctggccagccaggccgactccacggagcaggtggacgacaccatcctgacatgagaggcctgggccagcagcagcattgccgctccacatctttgctcaatgttttcatttttgaaaatacatttgttccaatggggagcttggaagatggcgttcccagaaagtattttaatatcaatagaccacagccaaagccttaaatcaaacccacacacaactgaaaattgcctcctccatctctcaccttttcctgtggagaagagaaggaaaagcacacgcatgcgcctcagcaaatggcagcccaggagctgtttgtccagtttagcatggctaggtctggaactataatagcagggtcagactgtgggttcctcttctcctgtgcttgagctctggtttgagagctggcgctaccaacctttttcctatatcccgagtggggcacagacggtggatctctgcccagtgtggtgtgtctggcttggcttttcaatattgtgaggtctgaatggatctgatccctgtcagatgaaaatgattcacagctctggcagttcccaagtctggggaggggtataggtttgaaaggctgtttgaaagaggaatgtttaataaaggctttgatttaatcttga

SEQ ID NO: 442117 - DNA, 1949 bp, Homo sapiens
gagatggccaattgtcaggctgtgatcctctccgtagaggatgacacagggcaccggatcatcatcgagtatctgctggaggccacccgcagccctgaggtgggcatgaggcaagctgctgccatcatcctcaacatctactgttcccgctcaaaggctgactacaccagccacctgcggagcctggtctcgggcctgatccgcctcttcaatgactccagccctgtggttctggaggagagctgggatgccctaaatgccatcactaagaagctggatgctggcaaccagttggcactcattgaagagctgcacaaggaaatccggctcatagggaacgagagcaaaggcgagcatgtgccaggattctgcctcccgaagaagggagtgacctccatccttccagtgttgcgggaaggagtcctgactggcagccctgagcagaaggaggaggcagccaaagccttaggcttggtaatccgcctgacctcggctgacgccctgaggccctccgtggtcagcatcactggccctctgatccgcatcctgggggacaggttcagctggaatgtgaaggcggctctgctcgagacactcagcctcttgttggctaaggttgggattgccctgaagcccttcctgccccagctgcagaccactttcaccaaagccctgcaggactccaaccggggggtgcgcctgaaggccgcagatgctctggggaagctcatttccatccacattaaggtggaccccctcttcacagagctgctcaatggcatccgcgccatggaggacccaggtgtcagggacaccatgctgcaggccctgaggtttgtgattcagggagcaggggccaaagtggatgccgtcatccggaaaaacatcgtctcactcctgctgagcatgctgggacacgatgaggacaacactcgcatctcctcagccgggtgcctaggggaactgtgtgcctttttgactgaagaggagcttagtgccgttctacagcagtgcttgctggcggacgtgtccggcattgactggatggttcggcacgggcggagcctggcactttccgtggctgtgaatgtggctcctggcagactttgtgccggcagatatagcagtgatgttcaggaaatgatcctgagcagtgccacggcggacaggatccccattgcggtgagcggggtccggggcatgggctttctcatgagacaccacatcgagacaggcggagggcagttgccggccaaactttccagcctgttcgttaagtgtctgcagaacccatccagcgacatcaggctggtggctgagaagatgatctggtgggcaaataaggacccactgcctcccctggacccccaggccatcaagcccatcctgaaggctcttcttgacaacaccaaggataagaacaccgtggtcagggcctacagcgaccaggcaattgtcaacctcctcaagatgcggcagggtgaagaggtgtttcagtccctctccaagatcctggatgtggccagtttggaggtgctgaacgaggttaaccgaaggtccctgaagaagctggccagccaggccgactccacggagcaggtggacgacaccatcctgacatgagaggcctgggccagcagcagcattgccgctccacatctttgctcaatgttttcatttttgaaaatacatttgttccaatggggagcttggaagatggcgttcccagaaagtattttaatatcaatagaccacagccaaagccttaaatcaaacccacacacaactgaaaattgcctcctccatctctcaccttttcctgtggagaagagaaggaaaagcacacgcatgcgcctcagcaaatggcattcccaagtctggggaggggtataggtttgaaaggctgtttgaaagaggaatgtttaataaaggctttgatttaatcttga

SEQ ID NO: 442118 - DNA, 1481 bp, Homo sapiens
gcagcccagattattggcaacatgtactccctgacagaccagaaggacttggctccgtacctgcccagcgtgacgcctggcctgaaagcatcgcttttggaccctgtgcctgaggtgcggaccgtatctgcaaaggcccttggggccatggtgaagggcatgggggagtcgtgctttgaggacttgctgccgtggctgatggagacactgacctatgagcagagctctgtggatcgctcaggcgctgcacaggggttggctgaggtcatggccggtttgggggtggagaagttggagaagttgatgccagaaatcgtggctacagccagcaaagtggacattgcaccccatgtccgagatggctacattatgatgtttaactacctgcccatcacctttggagacaagtttactccttatgtggggcccatcatcccctgtatcctcaaagctcttgctgatgagaatgagtttgtgcgtgacaccgccctgcgcgcgggccagcgggttatctccatgtacgctgagacagccatcgccctgctgctgccccagctagagcaaggcctctttgatgacctttggagaatcaggttcagctctgttcagctccttggggatctcctgtttcacatctcaggagtcactgggaagatgaccacagaaactgcctctgaggatgataactttggaactgcccagtccaacaaggcgatcatcactgccctgggggtagagcggcggaaccgggtgttggcagggctgtacatgggccgctcagacacccagctggtggtgcggcaggcgtccctgcatgtctggaagattgttgtctccaataccccccgcaccttgcgtgagatcctacccactctctttgggctcctgctgggtttcctggccagcacgtgtgcagataagagaacgattgcagcgagaacattgggagatcttgtgcggaagttaggggagaaaatcctccccgagatcatccccatccttgaggaaggcctgaggtctcagaagagcgatgagaggcagggtgtgtgcattggcctaagtgagatcatgaagtccaccagccgggatgccgtgctgtatttctctgaatccctcgtgcccacggcaagggaaggctttgtgtgacccactggaggaggtcagagaggcggcagccaagactttcgagcagctgcattccaccatcggccaccaggctctggaggacattctcccatttttactaaagcagctggatgacgaggaggtgtcagagtttgccttggatggtctgaagcaagtcatggctattaagagtcgtgtggtgctgccctaccttgtgcccaagctgacaacgccacctgtcaacacccgggtgctggctttcctttcgtcagtggctggtgatgccctcacccgtcatcttggcgtgatcctcccagcggtcatgctggccctgaaggaaaagcttgggaccccag

SEQ ID NO: 442119 - DNA, 320 bp, Homo sapiens
ctcccttctcttccctgtcaggacaacactcgcatctcctcagccgggtgcctaggggaactgtgtgcctttttgactgaagaggagcttagtgccgttctacagcagtgcttgctgggtaagtacactggagagttccccttcagggacctgggcctctcagccctagcgaagagtcgacgggcatctccctccctccctcagaggatcttttagcaactggactgtcctttccttgggaatccagcagttaaagcaaaatccaggccaggggtggtggcactcacctgtagtcccagctactcaggaggctgaggtgg

SEQ ID NO: 442120 - DNA, 2096 bp, Homo sapiens
catcactaagaagctggatgctggcatttagggcatcccaggctctcctccagaaccacagggctggagtcattgaagaggcggatcaggcccgagaccaggctccgcaggtggctggtgtagtcagcctttgagcgggatgccctaaatgccatcactaagaagctggatgctggcaaccagttggcactcattgaagagctgcacaaggaaatccggctcatagggaacgagagcaaaggcgagcatgtgccaggattctgcctcccgaagaagggagtgacctccatccttccagtgttgcgggaaggagtcctgactggcagccctgagcagaaggaggaggcagccaaagccttaggcttggtaatccgcctgacctcggctgacgccctgaggccctccgtggtcagcatcactggccctctgatccgcatcctgggggacaggttcagctggaatgtgaaggcggctctgctcgagacactcagcctcttgttggctaaggttgggattgccctgaagcccttcctgccccagctgcagaccactttcaccaaagccctgcaggactccaaccggggggtgcgcctgaaggccgcagatgctctggggaagctcatttccatccacattaaggtggaccccctcttcacagagctgctcaatggcatccgcgccatggaggacccaggtgtcagggacaccatgctgcaggccctgaggtttgtgattcagggagcaggggccaaagtggatgccgtcatccggaaaaacatcgtctcactcctgctgagcatgctgggacacgatgaggacaacactcgcatctcctcagccgggtgcctaggggaactgtgtgcctttttgactgaagaggagcttagtgccgttctacagcagtgcttgctggcggacgtgtccggcattgactggatggttcggcacgggcggagcctggcactttccgtggctgtgaatgtggctcctggcagactttgtgccggcagatatagcagtgatgttcaggaaatgatcctgagcagtgccacggcggacaggatccccattgcggtgagcggggtccggggcatgggctttctcatgagacaccacatcgagacaggcggagggcagttgccggccaaactttccagcctgttcgttaagtgtctgcagaacccatccagcgacatcaggctggtggctgagaagatgatctggtgggcaaataaggacccactgcctcccctggacccccaggccatcaagcccatcctgaaggctcttcttgacaacaccaaggataagaacaccgtggtcagggcctacagcgaccaggcaattgtcaacctcctcaagatgcggcagggtgaagaggtgtttcagtccctctccaagatcctggatgtggccagtttggaggtgctgaacgaggttaaccgaaggtccctgaagaagctggccagccaggccgactccacggagcaggtggacgacaccatcctgacatgagaggcctgggccagcagcagcattgccgctccacatctttgctcaatgttttcatttttgaaaatacatttgttccaatggggagcttggaagatggcgttcccagaaagtattttaatatcaatagaccacagccaaagccttaaatcaaacccacacacaactgaaaattgcctcctccatctctcaccttttcctgtggagaagagaaggaaaagcacacgcatgcgcctcagcaaatggcagcccaggagctgtttgtccagtttagcatggctaggtctggaactataatagcagggtcagactgtgggttcctcttctcctgtgcttgagctctggtttgagagctggcgctaccaacctttttcctatatcccgagtggggcacagacggtggatctctgcccagtgtggtgtgtctggcttggcttttcaatattgtgaggtctgaatggatctgatccctgtcagatgaaaatgattcacagctctggcagttcccaagtctggggaggggtataggtttgaaaggctgtttgaaagaggaatgtttaataaaggctttgatttaatcttga

SEQ ID NO: 442121 - DNA, 2526 bp, Homo sapiens
  misc_feature (2362)..(2363): n is a, c, g, or t
  misc_feature (2371)..(2371): n is a, c, g, or t
  misc_feature (2379)..(2379): n is a, c, g, or t
gagatggccaattgtcaggctgtgatcctctccgtagaggatgacacagggcaccggatcatcatcgagtatctgctggaggccacccgcagccctgaggtgggcatgaggcaagctgctgccatcatcctcaacatctactgttcccgctcaaaggctgactacaccagccacctgcggagcctggtctcgggcctgatccgcctcttcaatgactccagccctgtggttctggaggagagctgggatgccctaaatgccatcactaagaagctggatgctggcaaccagttggcactcattgaagagctgcacaaggaaatccggctcatagggaacgagagcaaaggcgagcatgtgccaggattctgcctcccgaagaagggagtgacctccatccttccagtgttgcgggaaggagtcctgactggcagccctgagcagaaggaggaggcagccaaagccttaggcttggtaatccgcctgacctcggctgacgccctgaggccctccgtggtcagcatcactggccctctgatccgcatcctgggggacaggttcagctggaatgtgaaggcggctctgctcgagacactcagcctcttgttggctaaggttgggattgccctgaagcccttcctgccccagctgcagaccactttcaccaaagccctgcaggactccaaccggggggtgcgcctgaaggccgcagatgctctggggaagctcatttccatccacattaaggtggaccccctcttcacagagctgctcaatggcatccgcgccatggaggacccaggtgtcagggacaccatgctgcaggccctgaggtttgtgattcagggagcaggggccaaagtggatgccgtcatccggaaaaacatcgtctcactcctgctgagcatgctgggacacgatgaggacaacactcgcatctcctcagccgggtgcctaggggaactgtgtgcctttttgactgaagaggagcttagtgccgttctacagcagtgcttgctggcggacgtgtccggcattgactggatggttcggcacgggcggagcctggcactttccgtggctgtgaatgtggctcctggcagactttgtgccggcagatatagcagtgatgttcaggaaatgatcctgagcagtgccacggcggacaggatccccattgcggtgagcggggtccggggcatgggctttctcatgagacaccacatcgagacaggcggagggcagttgccggccaaactttccagcctgttcgttaagtgtctgcagaacccatccagcgacatcaggctggtggctgagaagatgatctggtgggcaaataaggacccactgcctcccctggacccccaggccatcaagcccatcctgaaggctcttcttgacaacaccaaggataagaacaccgtggtcagggcctacagcgaccaggcaattgtcaacctcctcaagatgcggcagggtgaagaggtgtttcagtccctctccaagatcctggatgtggccagtttggaggtgctgaacgaggttaaccgaaggtccctgaagaagctggccagccaggccgactccacggagcaggtggacgacaccatcctgacatgagaggcctgggccagcagcagcattgccgctccacatctttgctcaatgttttcatttttgaaaatacatttgttccaatggggagcttggaagatggcgttcccagaaagtattttaatatcaatagaccacagccaaagccttaaatcaaacccacacacaactgaaaattgcctcctccatctctcaccttttcctgtggagaagagaaggaaaagcacacgcatgcgcctcagcaaatggcagcccaggagctgtttgtccagtttagcatggctaggtctggaactataatagcagggtcagactgtgggttcctcttctcctgtgcttgagctctggtttgagagctggcgctaccaacctttttcctatatcccgagtggggcacagacggtggatctctgcccagtgtggtgtgtctggcttggcttttcaatattgtgaggtctgaatggatctgatccctgtcagatgaaaatgattcacagctctggcagttcccaagtctggggaggggtataggtttgaaaggctgtttgaaagaggaatgtttaataaaggctttgatttaatcttgatataaacagatttttaaaaatctccacccattaaacatgaagcttcctgcatcaggaaaaaaaaaaaaaaaaaaaaaaaaaaaaaaaaaaaaaaaaaaaaaaaaaaaaaaaaaaaaaaaaaaaaaaaaaaaaaaaaaaaaaaaaaaaaaaacattgtnncccacttngcccaacncttttttaaattctacaaattattcgaatcggccccaatttggggccaatttgccccaatcccccctaaggtggccccttttacaatccattgcccgttttttacacacggcttaccggcgctctgggtaacccctttcccctttgt

SEQ ID NO: 442122 - DNA, 1145 bp, Homo sapiens
gagatggccaattgtcaggctgtgatcctctccgtagaggatgacacagggcaccggatcatcatcgagtatctgctggaggccacccgcagccctgaggtgggcatgaggcaagctgctgccatcatcctcaacatctactgttcccgctcaaaggctgactacaccagccacctgcggagcctggtctcgggcctgatccgcctcttcaatgactccagccctgtggttctggaggagagctgggatgccctaaatgccatcactaagaagctggatgctggcaaccagttggcactcattgaagagctgcacaaggaaatccggctcatagggaacgagagcaaaggcgagcatgtgccaggattctgcctcccgaagaagggagtgacctccatccttccagtgttgcgggaaggagtcctgactggcagccctgagcagaaggaggaggcagccaaagccttaggcttggtaatccgcctgacctcggctgacgccctgaggccctccgtggtcagcatcactggccctctgatccgcatcctgggggacaggttcagctggaatgtgaaggcggctctgctcgagacactcagcctcttgttggctaaggttgggattgccctgaagcccttcctgccccagctgcagaccactttcaccaaagccctgcaggactccaaccggggggtgcgcctgaaggccgcagatgctctggggaagctcatttccatccacattaaggtggaccccctcttcacagagctgctcaatggcatccgcgccatggaggacccaggtgtcagggacaccatgctgcaggccctgaggtttgtgattcagggagcaggggccaaagtggatgccgtcatccggaaaaacatcgtctcactcctgctgagcatgctgggacacgatgaggacaacactcgcatctcctcagccgggtgcctaggggaactgtgtgcctttttgactgaagaggagcttagtgccgttctacagcagtgcttgctggcggacgtgtcccggcttgactggttgttcggcccgggcgggcctggccctcccgggccgggatttggccccgggcgacttgggcccgggattatccggggtccgagaatcccaccggcccggga

SEQ ID NO: 442123 - DNA, 4868 bp, Homo sapiens
  misc_feature (1223)..(1223): n is a, c, g, or t
tcttggttgcataaacatgtttaatgatatagaaaatctattccaaatcaatcattaaaatctaaagcgaaaaatatattacattttaaatgaagggaaaacatctgattttattcaaggttgtggtgactctgttccgcaacttttaaatcaatttaaagttaattcaggtgccttttcaatcattgcagttacacatagggaatactgaaccgaaagatgacaaggcaattgtctgtgtccaaacttaagaaaaactatatttccctggacttttcatcccaacagatttcaaattctcctttccaaggagtatttgaccttcacatttcaggccctgtatctcttcatttcctataccaccatatgttagaaaactcaaactgggctacaagtatatatttctgttaactgactttaatgaattttggttgttttcaaaatctgcgatctgtccattgtgccaaccctgcattgcagggaagtcttagcctgtgattccagcttcgctcctgcaaagatagtcactacaggcaggtttaaattgtatttactcggagagaagagggggaagggaaccccctgccccctgccaacctgacaggccaggctgggtgacaagccccccgggtggctgcacctcccactcgccgacctgggcgctgtccttggtgctgccggcgccatagcgagcacaagcgccttaccttctgcccctgcggaagctgcggacgtcccccaaacgttaaaaacgccatatcccactttttatacaaataactaccccggcctgttctctttgtccccttcccgaagccttcaggcagaccgttccgcaaagtctttttttttgttttgttttgtcttctagacccagctcctcggcgctcatctccagctgctttaagacaaggggtgggggaaggggagggaggcaagaaaagatgagggtgggggaggggaaaagagggaatgcaaggggaaggagggaggagacggggagaaggaaagattggaagaaaaggatctccgaggaaggggctgagagaagggcagggtgaactggactaaaggccagagtaggaaggagaagaggggccaaaaaagaaggggatgaaattaagcacagaagatgggtaaagaaaaaagtatcagggaaagggcaaaataagagaaagccttgaggataagagggtagaaggctaaagaacaaggggaccacngggtcggggaagcgctgcctgaacggcgggacagtgacaaagaaagggcgctggcgatattcgcaccaagggtgcgaaacgcaatcgggaggtgagaaatggaaagaaggcgaatgcccggctacaagtagcctgggactgaaaggggacctgggggaggggctgggcccagggcagaaaagtccaggttcccatgcggcctgggcccacgtggagcgggcgctgaatcaccgttcagccgcccccctcccctcctccccgaccggtgcccgcagtccccgcctcctcggccgccgcctccacggggcggggccctggcccgggaccagcgccgcggctataaatgggctgcggcgaggccggcagaacgctgtgacagccacacgccccaaggcctccaagatgagctacacgttggactcgctgggcaacccgtccgcctaccggcgggtaaccgagacccgctcgagcttcagccgcgtcagcggctccccgtccagtggcttccgctcgcagtcgtggtcccgcggctcgcccagcaccgtgtcctcctcctataagcgcagcatgctcgccccgcgcctcgcttacagctcggccatgctcagctccgccgagagcagccttgacttcagccagtcctcgtccctgctcaacggcggctccggacccggcggcgactacaagctgtcccgctccaacgagaaggagcagctgcaggggctgaacgaccgctttgccggctacatagagaaggtgcactacctggagcagcagaataaggagattgaggcggagatccaggcgctgcggcagaagcaggcctcgcacgcccagctgggcgacgcgtacgaccaggagatccgcgagctgcgcgccaccctggagatggtgaaccacgagaaggctcaggtgcagctggactcggaccacctggaggaagacatccaccggctcaaggagcgctttgaggaggaggcgcggttgcgcgacgacactgaggcggccatccgcgcgctgcgcaaagacatcgaggaggcgtcgctggtcaaggtggagctggacaagaaggtgcagtcgctgcaggatgaggtggccttcctgcggagcaaccacgaggaggaggtggccgaccttctggcccagatccaggcatcgcacatcacggtggagcgcaaagactacctgaagacagacatctcgacggcgctgaaggaaatccgctcccagctcgaaagccactcagaccagaatatgcaccaggccgaagagtggttcaaatgccgctacgccaagctcaccgaggcggccgagcagaacaaggaggccatccgctccgccaaggaagagatcgccgagtaccggcgccagctgcagtccaagagcatcgagctagagtcggtgcgcggcaccaaggagtccctggagcggcagctcagcgacatcgaggagcgccacaaccacgacctcagcagctaccaggacaccatccagcagctggaaaatgagcttcggggcacaaagtgggaaatggctcgtcatttgcgcgaataccaggacctcctcaacgtcaagatggctctggatatagaaatcgctgcgtacagaaaactcctggagggtgaagagactagatttagcacatttgcaggaagcatcactgggccactgtatacacaccgacccccaatcacaatatccagtaagattcagaaaaccaaggtggaagctcccaagcttaaggtccaacacaaatttgtcgaggagatcatagaggaaaccaaagtggaggatgagaagtcagaaatggaagaggccctgacagccattacagaggaattggccgtttccatgaaggaagagaagaaagaagcagcagaagaaaaggaagaggaacccgaagctgaagaagaagaagtagctgccaaaaagtctccagtgaaagcaactgcacctgaagttaaagaagaggaaggggaaaaggaggaagaagaaggccaggaagaagaggaggaagaagatgagggagctaagtcagaccaagccgaagagggaggatccgagaaggaaggctctagtgaaaaagaggaaggtgagcaggaagaaggagaaacagaagctgaagctgaaggagaggaagccgaagctaaagaggaaaagaaagtggaggaaaagagtgaggaagtggctaccaaggaggagctggtggcagatgccaaggtggaaaagccagaaaaagccaagtctcctgtgccaaaatcaccagtggaagagaaaggcaagtctcctgtgcccaagtcaccagtggaagagaaaggcaagtctcctgtgcccaagtcaccagtggaagagaaaggcaagtctcctgtgccgaaatcaccagtggaagagaaaggcaagtctcctgtgtcaaaatcaccagtggaagagaaagccaaatctcctgtgccaaaatcaccagtggaagaggcaaagtcaaaagcagaagtggggaaaggtgaacagaaagaggaagaagaaaaggaagtcaaggaagctcccaaggaagagaaggtagagaaaaaggaagagaaaccaaaggatgtgccagagaagaagaaagctgagtcccctgtaaaggaggaagctgtggcagaggtggtcaccatcaccaaatcggtaaaggtgcacttggagaaagagaccaaagaagaggggaagccactgcagcaggagaaagagaaggagaaagcgggaggagagggaggaagtgaggaggaagggagtgataaaggtgccaagggatccaggaaggaagacatagctgtcaatggggaggtagaaggaaaagaggaggtagagcaggagaccaaggaaaaaggcagtgggagggaagaggagaaaggcgttgtcaccaatggcctagacttgagcccagcagatgaaaagaaggggggtgataaaagtgaggagaaagtggtggtgaccaaaacggtagaaaaaatcaccagtgaggggggagatggtgctaccaaatacatcactaaatctgtaaccgtcactcaaaaggttgaagagcatgaagagacctttgaggagaaactagtgtctactaaaaaggtagaaaaagtcacttcacacgccatagtaaaggaagtcacccagagtgactaagatttgagtccattgcaaaaggttaagccatatgacaatttcaaaatgcatgtgattggcagcttcaaaacagaacgggttctcccatgggggctccagacattgtattttactttgtgcaatatgaggggactgcatgcaagctcagggtgctccctcctcagtctttgggggattcaaatgcatgatattgtatgtacctgggaaatttgccgatttcctaagctgttggaagggggtcacttaaggggggatgtcttgagatgtattatgcaaagtaccaactgagccaaaaacaataaacgaaacacagaactcagccttaagaaagctatatatgaataattatgtttacctcactggtgcatttaaaatggacttttgttcatgggagaacctcgttgacatgcacagtttgcaatcttatgttgatcgatgttaaacgtcacagcagtacttgctcaataaaggtcatattggaaacatagtcaa

SEQ ID NO: 442124 - DNA, 4622 bp, Homo sapiens
  misc_feature (1223)..(1223): n is a, c, g, or t
tcttggttgcataaacatgtttaatgatatagaaaatctattccaaatcaatcattaaaatctaaagcgaaaaatatattacattttaaatgaagggaaaacatctgattttattcaaggttgtggtgactctgttccgcaacttttaaatcaatttaaagttaattcaggtgccttttcaatcattgcagttacacatagggaatactgaaccgaaagatgacaaggcaattgtctgtgtccaaacttaagaaaaactatatttccctggacttttcatcccaacagatttcaaattctcctttccaaggagtatttgaccttcacatttcaggccctgtatctcttcatttcctataccaccatatgttagaaaactcaaactgggctacaagtatatatttctgttaactgactttaatgaattttggttgttttcaaaatctgcgatctgtccattgtgccaaccctgcattgcagggaagtcttagcctgtgattccagcttcgctcctgcaaagatagtcactacaggcaggtttaaattgtatttactcggagagaagagggggaagggaaccccctgccccctgccaacctgacaggccaggctgggtgacaagccccccgggtggctgcacctcccactcgccgacctgggcgctgtccttggtgctgccggcgccatagcgagcacaagcgccttaccttctgcccctgcggaagctgcggacgtcccccaaacgttaaaaacgccatatcccactttttatacaaataactaccccggcctgttctctttgtccccttcccgaagccttcaggcagaccgttccgcaaagtctttttttttgttttgttttgtcttctagacccagctcctcggcgctcatctccagctgctttaagacaaggggtgggggaaggggagggaggcaagaaaagatgagggtgggggaggggaaaagagggaatgcaaggggaaggagggaggagacggggagaaggaaagattggaagaaaaggatctccgaggaaggggctgagagaagggcagggtgaactggactaaaggccagagtaggaaggagaagaggggccaaaaaagaaggggatgaaattaagcacagaagatgggtaaagaaaaaagtatcagggaaagggcaaaataagagaaagccttgaggataagagggtagaaggctaaagaacaaggggaccacngggtcggggaagcgctgcctgaacggcgggacagtgacaaagaaagggcgctggcgatattcgcaccaagggtgcgaaacgcaatcgggaggtgagaaatggaaagaaggcgaatgcccggctacaagtagcctgggactgaaaggggacctgggggaggggctgggcccagggcagaaaagtccaggttcccatgcggcctgggcccacgtggagcgggcgctgaatcaccgttcagccgcccccctcccctcctccccgaccggtgcccgcagtccccgcctcctcggccgccgcctccacggggcggggccctggcccgggaccagcgccgcggctataaatgggctgcggcgaggccggcagaacgctgtgacagccacacgccccaaggcctccaagatgagctacacgttggactcgctgggcaacccgtccgcctaccggcgggtaaccgagacccgctcgagcttcagccgcgtcagcggctccccgtccagtggcttccgctcgcagtcgtggtcccgcggctcgcccagcaccgtgtcctcctcctataagcgcagcatgctcgccccgcgcctcgcttacagctcggccatgctcagctccgccgagagcagccttgacttcagccagtcctcgtccctgctcaacggcggctccggacccggcggcgactacaagctgtcccgctccaacgagaaggagcagctgcaggggctgaacgaccgctttgccggctacatagagaaggtgcactacctggagcagcagaataaggagattgaggcggagatccaggcgctgcggcagaagcaggcctcgcacgcccagctgggcgacgcgtacgaccaggagatccgcgagctgcgcgccaccctggagatggtgaaccacgagaaggctcaggtgcagctggactcggaccacctggaggaagacatccaccggctcaaggagcgctttgaggaggaggcgcggttgcgcgacgacactgaggcggccatccgcgcgctgcgcaaagacatcgaggaggcgtcgctggtcaaggtggagctggacaagaaggtgcagtcgctgcaggatgaggtggccttcctgcggagcaaccacgaggaggaggtggccgaccttctggcccagatccaggcatcgcacatcacggtggagcgcaaagactacctgaagacagacatctcgacggcgctgaaggaaatccgctcccagctcgaaagccactcagaccagaatatgcaccaggccgaagagtggttcaaatgccgctacgccaagctcaccgaggcggccgagcagaacaaggaggccatccgctccgccaaggaagagatcgccgagtaccggcgccagctgcagtccaagagcatcgagctagagtcggtgcgcggcaccaaggagtccctggagcggcagctcagcgacatcgaggagcgccacaaccacgacctcagcagctaccaggacaccatccagcagctggaaaatgagcttcggggcacaaagtgggaaatggctcgtcatttgcgcgaataccaggacctcctcaacgtcaagatggctctggatatagaaatcgctgcgtacagaaaactcctggagggtgaagagactagatttagcacatttgcaggaagcatcactgggccactgtatacacaccgacccccaatcacaatatccagtaagattcagaaaaccaaggtggaagctcccaagcttaaggtccaacacaaatttgtcgaggagatcatagaggaaaccaaagtggaggatgagaagtcagaaatggaagaggccctgacagccattacagaggaattggccgtttccatgaaggaagagaagaaagaagcagcagaagaaaaggaagaggaacccgaagctgaagaagaagaagtagctgccaaaaagtctccagtgaaagcaactgcacctgaagttaaagaagaggaaggggaaaaggaggaagaagaaggccaggaagaagaggaggaagaagatgagggagctaagtcagaccaagccgaagagggaggatccgagaaggaaggctctagtgaaaaagaggaaggtgagcaggaagaaggagaaacagaagctgaagctgaaggagaggaagccgaagctaaagaggaaaagaaagtggaggaaaagagtgaggaagtggctaccaaggaggagctggtggcagatgccaaggtggaaaagccagaaaaagccaagtctcctgtgccaaaatcaccagtggaagagaaaggcaagtctcctgtgcccaagtcaccagtggaagagaaaggcaagtctcctgtgcccaagtcaccagtggaagagaaaggcaagtctcctgtgccgaaatcaccagtggaagagaaaggcaagtctcctgtgtcaaaatcaccagtggaagagaaagccaaatctcctgtgccaaaatcaccagtggaagaggcaaagtcaaaagcagaagtggggaaaggtgaacagaaagaggaagggagtgataaaggtgccaagggatccaggaaggaagacatagctgtcaatggggaggtagaaggaaaagaggaggtagagcaggagaccaaggaaaaaggcagtgggagggaagaggagaaaggcgttgtcaccaatggcctagacttgagcccagcagatgaaaagaaggggggtgataaaagtgaggagaaagtggtggtgaccaaaacggtagaaaaaatcaccagtgaggggggagatggtgctaccaaatacatcactaaatctgtaaccgtcactcaaaaggttgaagagcatgaagagacctttgaggagaaactagtgtctactaaaaaggtagaaaaagtcacttcacacgccatagtaaaggaagtcacccagagtgactaagatttgagtccattgcaaaaggttaagccatatgacaatttcaaaatgcatgtgattggcagcttcaaaacagaacgggttctcccatgggggctccagacattgtattttactttgtgcaatatgaggggactgcatgcaagctcagggtgctccctcctcagtctttgggggattcaaatgcatgatattgtatgtacctgggaaatttgccgatttcctaagctgttggaagggggtcacttaaggggggatgtcttgagatgtattatgcaaagtaccaactgagccaaaaacaataaacgaaacacagaactcagccttaagaaagctatatatgaataattatgtttacctcactggtgcatttaaaatggacttttgttcatgggagaacctcgttgacatgcacagtttgcaatcttatgttgatcgatgttaaacgtcacagcagtacttgctcaataaaggtcatattggaaacatagtcaa

SEQ ID NO: 442125 - DNA, 2665 bp, Homo sapiens
  misc_feature (91)..(91): n is a, c, g, or t
aagcggcccccttcacttggtactcagacttctccttcctgccatcatgtgaagaagaatgtggcttccccttcctccatgattataagtnacctggggcctcttcagccctgcagaactgagtcagttaaatctctttcctttataaattacccggtctcagactgttccttacaacagcattgagaatggactaatacaagactacagaggaaaaaaaaattatatagctcgtgccgaattcggcacgctcgaaagccactcagaccagaatatgcaccaggccgaagagtggttcaaatgccgctacgccaagctcaccgaggcggccgagcagaacaaggaggccatccgctccgccaaggaagagatcgccgagtaccggcgccagctgcagtccaagagcatcgagctagagtcggtgcgcggcaccaaggagtccctggagcggcagctcagcgacatcgaggagcgccacaaccacgacctcagcagctaccaggacaccatccagcagctggaaaatgagcttcggggcacaaagtgggaaatggctcgtcatttgcgcgaataccaggacctcctcaacgtcaagatggctctggatatagaaatcgctgcgtacagaaaactcctggagggtgaagagactagatttagcacatttgcaggaagcatcactgggccactgtatacacaccgacccccaatcacaatatccagtaagattcagaaaaccaaggtggaagctcccaagcttaaggtccaacacaaatttgtcgaggagatcatagaggaaaccaaagtggaggatgagaagtcagaaatggaagaggccctgacagccattacagaggaattggccgtttccatgaaggaagagaagaaagaagcagcagaagaaaaggaagaggaacccgaagctgaagaagaagaagtagctgccaaaaagtctccagtgaaagcaactgcacctgaagttaaagaagaggaaggggaaaaggaggaagaagaaggccaggaagaagaggaggaagaagatgagggagctaagtcagaccaagccgaagagggaggatccgagaaggaaggctctagtgaaaaagaggaaggtgagcaggaagaaggagaaacagaagctgaagctgaaggagaggaagccgaagctaaagaggaaaagaaagtggaggaaaagagtgaggaagtggctaccaaggaggagctggtggcagatgccaaggtggaaaagccagaaaaagccaagtctcctgtgccaaaatcaccagtggaagagaaaggcaagtctcctgtgcccaagtcaccagtggaagagaaaggcaagtctcctgtgcccaagtcaccagtggaagagaaaggcaagtctcctgtgccgaaatcaccagtggaagagaaaggcaagtctcctgtgtcaaaatcaccagtggaagagaaagccaaatctcctgtgccaaaatcaccagtggaagaggcaaagtcaaaagcagaagtggggaaaggtgaacagaaagaggaagaagaaaaggaagtcaaggaagctcccaaggaagagaaggtagagaaaaaggaagagaaaccaaaggatgtgccagagaagaagaaagctgagtcccctgtaaaggaggaagctgtggcagaggtggtcaccatcaccaaatcggtaaaggtgcacttggagaaagagaccaaagaagaggggaagccactgcagcaggagaaagagaaggagaaagcgggaggagagggaggaagtgaggaggaagggagtgataaaggtgccaagggatccaggaaggaagacatagctgtcaatggggaggtagaaggaaaagaggaggtagagcaggagaccaaggaaaaaggcagtgggagggaagaggagaaaggcgttgtcaccaatggcctagacttgagcccagcagatgaaaagaaggggggtgataaaagtgaggagaaagtggtggtgaccaaaacggtagaaaaaatcaccagtgaggggggagatggtgctaccaaatacatcactaaatctgtaaccgtcactcaaaaggttgaagagcatgaagagacctttgaggagaaactagtgtctactaaaaaggtagaaaaagtcacttcacacgccatagtaaaggaagtcacccagagtgactaagatttgagtccattgcaaaaggttaagccatatgacaatttcaaaatgcatgtgattggcagcttcaaaacagaacgggttctcccatgggggctccagacattgtattttactttgtgcaatatgaggggactgcatgcaagctcagggtgctccctcctcagtctttgggggattcaaatgcatgatattgtatgtacctgggaaatttgccgatttcctaagctgttggaagggggtcacttaaggggggatgtcttgagatgtattatgcaaagtaccaactgagccaaaaacaataaacgaaacacagaactcagccttaagaaagctatatatgaataattatgtttacctcactggtgcatttaaaatggacttttgttcatgggagaacctcgttgacatgcacagtttgcaatcttatgttgatcgatgttaaacgtcacagcagtacttgctcaataaaggtcatattggaaacatagtcaa

SEQ ID NO: 442126 - DNA, 2513 bp, Homo sapiens
actagttctagctcgcgagcggcctctcgcgatctagaactagcccacgcgtcctgaagacagacatctcgacggcgctgaaggaaatccgctcccagctcgaaagccactcagaccagaatatgcaccaggccgaagagtggttcaaatgccgctacgccaagctcaccgaggcggccgagcagaacaaggaggccatccgctccgccaaggaagagatcgccgagtaccggcgccagctgcagtccaagagcatcgagctagagtcggtgcgcggcaccaaggagtccctggagcggcagctcagcgacatcgaggagcgccacaaccacgacctcagcagctaccaggacaccatccagcagctggaaaatgagcttcggggcacaaagtgggaaatggctcgtcatttgcgcgaataccaggacctcctcaacgtcaagatggctctggatatagaaatcgctgcgtacagaaaactcctggagggtgaagagactagatttagcacatttgcaggaagcatcactgggccactgtatacacaccgacccccaatcacaatatccagtaagattcagaaaaccaaggtggaagctcccaagcttaaggtccaacacaaatttgtcgaggagatcatagaggaaaccaaagtggaggatgagaagtcagaaatggaagaggccctgacagccattacagaggaattggccgtttccatgaaggaagagaagaaagaagcagcagaagaaaaggaagaggaacccgaagctgaagaagaagaagtagctgccaaaaagtctccagtgaaagcaactgcacctgaagttaaagaagaggaaggggaaaaggaggaagaagaaggccaggaagaagaggaggaagaagatgagggagctaagtcagaccaagccgaagagggaggatccgagaaggaaggctctagtgaaaaagaggaaggtgagcaggaagaaggagaaacagaagctgaagctgaaggagaggaagccgaagctaaagaggaaaagaaagtggaggaaaagagtgaggaagtggctaccaaggaggagctggtggcagatgccaaggtggaaaagccagaaaaagccaagtctcctgtgccaaaatcaccagtggaagagaaaggcaagtctcctgtgcccaagtcaccagtggaagagaaaggcaagtctcctgtgcccaagtcaccagtggaagagaaaggcaagtctcctgtgccgaaatcaccagtggaagagaaaggcaagtctcctgtgtcaaaatcaccagtggaagagaaagccaaatctcctgtgccaaaatcaccagtggaagaggcaaagtcaaaagcagaagtggggaaaggtgaacagaaagaggaagaagaaaaggaagtcaaggaagctcccaaggaagagaaggtagagaaaaaggaagagaaaccaaaggatgtgccagagaagaagaaagctgagtcccctgtaaaggaggaagctgtggcagaggtggtcaccatcaccaaatcggtaaaggtgcacttggagaaagagaccaaagaagaggggaagccactgcagcaggagaaagagaaggagaaagcgggaggagagggaggaagtgaggaggaagggagtgataaaggtgccaagggatccaggaaggaagacatagctgtcaatggggaggtagaaggaaaagaggaggtagagcaggagaccaaggaaaaaggcagtgggagggaagaggagaaaggcgttgtcaccaatggcctagacttgagcccagcagatgaaaagaaggggggtgataaaagtgaggagaaagtggtggtgaccaaaacggtagaaaaaatcaccagtgaggggggagatggtgctaccaaatacatcactaaatctgtaaccgtcactcaaaaggttgaagagcatgaagagacctttgaggagaaactagtgtctactaaaaaggtagaaaaagtcacttcacacgccatagtaaaggaagtcacccagagtgactaagatttgagtccattgcaaaaggttaagccatatgacaatttcaaaatgcatgtgattggcagcttcaaaacagaacgggttctcccatgggggctccagacattgtattttactttgtgcaatatgaggggactgcatgcaagctcagggtgctccctcctcagtctttgggggattcaaatgcatgatattgtatgtacctgggaaatttgccgatttcctaagctgttggaagggggtcacttaaggggggatgtcttgagatgtattatgcaaagtaccaactgagccaaaaacaataaacgaaacacagaactcagccttaagaaagctatatatgaataattatgtttacctcactggtgcatttaaaatggacttttgttcatgggagaacctcgttgacatgcacagtttgcaatcttatgttgatcgatgttaaacgtcacagcagtacttgctcaataaaggtcatattggaaacatagtcaa

SEQ ID NO: 442127 - DNA, 575 bp, Homo sapiens
catgtttcaccacgacatactggtggttcaaacatgcgcatgtttcacacgccatagtaaaggaagtcacccagagtgactaagatttgagtccattgcaaaaggttaagccatatgacaatttcaaaatgcatgtgattggcagcttcaaaacagaacgggttctcccatgggggctccagacattgtattttactttgtgcaatatgaggggactgcatgcaagctcagggtgctccctcctcagtctttgggggattcaaatgcatgatattgtatgtacctgggaaatttgccgatttcctaagctgttggaagggggtcacttaaggggggatgtcttgagatgtattatgcaaagtaccaactgagccaaaaacaataaacgaaacacagaactcagccttaagaaagctatatatgaataattatgtttacctcactggtgcatttaaaatggacttttgttcatgggagaacctcgttgacatgcacagtttgcaatcttatgttgatcgatgttaaacgtcacagcagtacttgctcaataaaggtcatattggaaacatagtcaa

SEQ ID NO: 442128 - DNA, 5223 bp, Homo sapiens
  misc_feature (1223)..(1223): n is a, c, g, or t
tcttggttgcataaacatgtttaatgatatagaaaatctattccaaatcaatcattaaaatctaaagcgaaaaatatattacattttaaatgaagggaaaacatctgattttattcaaggttgtggtgactctgttccgcaacttttaaatcaatttaaagttaattcaggtgccttttcaatcattgcagttacacatagggaatactgaaccgaaagatgacaaggcaattgtctgtgtccaaacttaagaaaaactatatttccctggacttttcatcccaacagatttcaaattctcctttccaaggagtatttgaccttcacatttcaggccctgtatctcttcatttcctataccaccatatgttagaaaactcaaactgggctacaagtatatatttctgttaactgactttaatgaattttggttgttttcaaaatctgcgatctgtccattgtgccaaccctgcattgcagggaagtcttagcctgtgattccagcttcgctcctgcaaagatagtcactacaggcaggtttaaattgtatttactcggagagaagagggggaagggaaccccctgccccctgccaacctgacaggccaggctgggtgacaagccccccgggtggctgcacctcccactcgccgacctgggcgctgtccttggtgctgccggcgccatagcgagcacaagcgccttaccttctgcccctgcggaagctgcggacgtcccccaaacgttaaaaacgccatatcccactttttatacaaataactaccccggcctgttctctttgtccccttcccgaagccttcaggcagaccgttccgcaaagtctttttttttgttttgttttgtcttctagacccagctcctcggcgctcatctccagctgctttaagacaaggggtgggggaaggggagggaggcaagaaaagatgagggtgggggaggggaaaagagggaatgcaaggggaaggagggaggagacggggagaaggaaagattggaagaaaaggatctccgaggaaggggctgagagaagggcagggtgaactggactaaaggccagagtaggaaggagaagaggggccaaaaaagaaggggatgaaattaagcacagaagatgggtaaagaaaaaagtatcagggaaagggcaaaataagagaaagccttgaggataagagggtagaaggctaaagaacaaggggaccacngggtcggggaagcgctgcctgaacggcgggacagtgacaaagaaagggcgctggcgatattcgcaccaagggtgcgaaacgcaatcgggaggtgagaaatggaaagaaggcgaatgcccggctacaagtagcctgggactgaaaggggacctgggggaggggctgggcccagggcagaaaagtccaggttcccatgcggcctgggcccacgtggagcgggcgctgaatcaccgttcagccgcccccctcccctcctccccgaccggtgcccgcagtccccgcctcctcggccgccgcctccacggggcggggccctggcccgggaccagcgccgcggctataaatgggctgcggcgaggccggcagaacgctgtgacagccacacgccccaaggcctccaagatgagctacacgttggactcgctgggcaacccgtccgcctaccggcgggtaaccgagacccgctcgagcttcagccgcgtcagcggctccccgtccagtggcttccgctcgcagtcgtggtcccgcggctcgcccagcaccgtgtcctcctcctataagcgcagcatgctcgccccgcgcctcgcttacagctcggccatgctcagctccgccgagagcagccttgacttcagccagtcctcgtccctgctcaacggcggctccggacccggcggcgactacaagctgtcccgctccaacgagaaggagcagctgcaggggctgaacgaccgctttgccggctacatagagaaggtgcactacctggagcagcagaataaggagattgaggcggagatccaggcgctgcggcagaagcaggcctcgcacgcccagctgggcgacgcgtacgaccaggagatccgcgagctgcgcgccaccctggagatggtgaaccacgagaaggctcaggtgcagctggactcggaccacctggaggaagacatccaccggctcaaggagcgctttgaggaggaggcgcggttgcgcgacgacactgaggcggccatccgcgcgctgcgcaaagacatcgaggaggcgtcgctggtcaaggtggagctggacaagaaggtgcagtcgctgcaggatgaggtggccttcctgcggagcaaccacgaggaggaggtggccgaccttctggcccagatccaggcatcgcacatcacggtggagcgcaaagactacctgaagacagacatctcgacggcgctgaaggaaatccgctcccagctcgaaagccactcagaccagaatatgcaccaggccgaagagtggttcaaatgccgctacgccaagctcaccgaggcggccgagcagaacaaggaggccatccgctccgccaaggaagagatcgccgagtaccggcgccagctgcagtccaagagcatcgagctagagtcggtgcgcggcaccaaggagtccctggagcggcagctcagcgacatcgaggagcgccacaaccacgacctcagcagctaccaggacaccatccagcagctggaaaatgagcttcggggcacaaagtgggaaatggctcgtcatttgcgcgaataccaggacctcctcaacgtcaagatggctctggatatagaaatcgctgcgtacagaaaactcctggagggtgaagagactagatttagcacatttgcaggaagcatcactgggccactgtatacacaccgacccccaatcacaatatccagtaagattcagaaaaccaaggtggaagctcccaagcttaaggtccaacacaaatttgtcgaggagatcatagaggaaaccaaagtggaggatgagaagtcagaaatggaagaggccctgacagccattacagaggaattggccgtttccatgaaggaagagaagaaagaagcagcagaagaaaaggaagaggaacccgaagctgaagaagaagaagtagctgccaaaaagtctccagtgaaagcaactgcacctgaagttaaagaagaggaaggggaaaaggaggaagaagaaggccaggaagaagaggaggaagaagatgagggagctaagtcagaccaagccgaagagggaggatccgagaaggaaggctctagtgaaaaagaggaaggtgagcaggaagaaggagaaacagaagctgaagctgaaggagaggaagccgaagctaaagaggaaaagaaagtggaggaaaagagtgaggaagtggctaccaaggaggagctggtggcagatgccaaggtggaaaagccagaaaaagccaagtctcctgtgccaaaatcaccagtggaagagaaaggcaagtctcctgtgcccaagtcaccagtggaagagaaaggcaagtctcctgtgcccaagtcaccagtggaagagaaaggcaagtctcctgtgccgaaatcaccagtggaagagaaaggcaagtctcctgtgtcaaaatcaccagtggaagagaaagccaaatctcctgtgccaaaatcaccagtggaagaggcaaagtcaaaagcagaagtggggaaaggtgaacagaaagaggaagaagaaaaggaagtcaaggaagctcccaaggaagagaaggtagagaaaaaggaagagaaaccaaaggatgtgccagagaagaagaaagctgagtcccctgtaaaggaggaagctgtggcagaggtggtcaccatcaccaaatcggtaaaggtgcacttggagaaagagaccaaagaagaggggaagccactgcagcaggagaaagagaaggagaaagcgggaggagagggaggaagtgaggaggaagggagtgataaaggtgccaagggatccaggaaggaagacatagctgtcaatggggaggtagaaggaaaagaggaggtagagcaggagaccaaggaaaaaggcagtgggagggaagaggagaaaggcgttgtcaccaatggcctagacttgagcccagcagatgaaaagaaggggggtgataaaagtgaggagaaagtggtggtgaccaaaacggtagaaaaaatcaccagtgaggggggagatggtgctaccaaatacatcactaaatctgtaaccgtcactcaaaaggttgaagagcatgaagagacctttgaggagaaactagtgtctactaaaaaggtagaaaaagtcacttcacacgccatagtaaaggaagtcacccagagtgactaagatttgagtccattgcaaaaggttaagccatatgacaatttcaaaatgcatgtgattggcagcttcaaaacagaacgggttctcccatgggggctccagacattgtattttactttgtgcaatatgaggggactgcatgcaagctcagggtgctccctcctcagtctttgggggattcaaatgcatgatattgtatgtacctgggaaatttgccgatttcctaagctgttggaagggggtcacttaaggggggatgtcttgagatgtattatgcaaagtaccaactgagccaaaaacaataaacgaaacacagaactcagccttaagaaagctatatatgaataattatgtttacctcactggtgcatttaaaatggacttttgttcatgggagaacctcgttgacatgcacagtttgcaatcttatgttgatcgatgttaaacgtcacagcagtacttgctcaataaaggtcatattggaaacatagtcaaaaaaaaaaaaaaaaaaaaaaaaaaaaaaaaaaacaaattcattggccaacctttaacatcgggggggctgggaaaacccaggctttaccaaatttaatcgatttgcagtacattcccctgtcgtcaacatggcgtaagaccggaaaagatcgtgccttgatacgacctttaccaacacttggatccacaactggactgtgctaatgggcgaatttgtaagcggataaaaatttgggctaaaaattcgcgtttcaaaacttttgggataatcctgaaccatgtttttacgccaataggccttctttattaatccatatataaatcaaccagaatagggccgtggggttctttttgc

SEQ ID NO: 442129 - DNA, 4547 bp, Homo sapiens
  misc_feature (1223)..(1223): n is a, c, g, or t
tcttggttgcataaacatgtttaatgatatagaaaatctattccaaatcaatcattaaaatctaaagcgaaaaatatattacattttaaatgaagggaaaacatctgattttattcaaggttgtggtgactctgttccgcaacttttaaatcaatttaaagttaattcaggtgccttttcaatcattgcagttacacatagggaatactgaaccgaaagatgacaaggcaattgtctgtgtccaaacttaagaaaaactatatttccctggacttttcatcccaacagatttcaaattctcctttccaaggagtatttgaccttcacatttcaggccctgtatctcttcatttcctataccaccatatgttagaaaactcaaactgggctacaagtatatatttctgttaactgactttaatgaattttggttgttttcaaaatctgcgatctgtccattgtgccaaccctgcattgcagggaagtcttagcctgtgattccagcttcgctcctgcaaagatagtcactacaggcaggtttaaattgtatttactcggagagaagagggggaagggaaccccctgccccctgccaacctgacaggccaggctgggtgacaagccccccgggtggctgcacctcccactcgccgacctgggcgctgtccttggtgctgccggcgccatagcgagcacaagcgccttaccttctgcccctgcggaagctgcggacgtcccccaaacgttaaaaacgccatatcccactttttatacaaataactaccccggcctgttctctttgtccccttcccgaagccttcaggcagaccgttccgcaaagtctttttttttgttttgttttgtcttctagacccagctcctcggcgctcatctccagctgctttaagacaaggggtgggggaaggggagggaggcaagaaaagatgagggtgggggaggggaaaagagggaatgcaaggggaaggagggaggagacggggagaaggaaagattggaagaaaaggatctccgaggaaggggctgagagaagggcagggtgaactggactaaaggccagagtaggaaggagaagaggggccaaaaaagaaggggatgaaattaagcacagaagatgggtaaagaaaaaagtatcagggaaagggcaaaataagagaaagccttgaggataagagggtagaaggctaaagaacaaggggaccacngggtcggggaagcgctgcctgaacggcgggacagtgacaaagaaagggcgctggcgatattcgcaccaagggtgcgaaacgcaatcgggaggtgagaaatggaaagaaggcgaatgcccggctacaagtagcctgggactgaaaggggacctgggggaggggctgggcccagggcagaaaagtccaggttcccatgcggcctgggcccacgtggagcgggcgctgaatcaccgttcagccgcccccctcccctcctccccgaccggtgcccgcagtccccgcctcctcggccgccgcctccacggggcggggccctggcccgggaccagcgccgcggctataaatgggctgcggcgaggccggcagaacgctgtgacagccacacgccccaaggcctccaagatgagctacacgttggactcgctgggcaacccgtccgcctaccggcgggtaaccgagacccgctcgagcttcagccgcgtcagcggctccccgtccagtggcttccgctcgcagtcgtggtcccgcggctcgcccagcaccgtgtcctcctcctataagcgcagcatgctcgccccgcgcctcgcttacagctcggccatgctcagctccgccgagagcagccttgacttcagccagtcctcgtccctgctcaacggcggctccggacccggcggcgactacaagctgtcccgctccaacgagaaggagcagctgcaggggctgaacgaccgctttgccggctacatagagaaggtgcactacctggagcagcagaataaggagattgaggcggagatccaggcgctgcggcagaagcaggcctcgcacgcccagctgggcgacgcgtacgaccaggagatccgcgagctgcgcgccaccctggagatggtgaaccacgagaaggctcaggtgcagctggactcggaccacctggaggaagacatccaccggctcaaggagcgctttgaggaggaggcgcggttgcgcgacgacactgaggcggccatccgcgcgctgcgcaaagacatcgaggaggcgtcgctggtcaaggtggagctggacaagaaggtgcagtcgctgcaggatgaggtggccttcctgcggagcaaccacgaggaggaggtggccgaccttctggcccagatccaggcatcgcacatcacggtggagcgcaaagactacctgaagacagacatctcgacggcgctgaaggaaatccgctcccagctcgaaagccactcagaccagaatatgcaccaggccgaagagtggttcaaatgccgctacgccaagctcaccgaggcggccgagcagaacaaggaggccatccgctccgccaaggaagagatcgccgagtaccggcgccagctgcagtccaagagcatcgagctagagtcggtgcgcggcaccaaggagtccctggagcggcagctcagcgacatcgaggagcgccacaaccacgacctcagcagctaccaggacaccatccagcagctggaaaatgagcttcggggcacaaagtgggaaatggctcgtcatttgcgcgaataccaggacctcctcaacgtcaagatggctctggatatagaaatcgctgcgtacagaaaactcctggagggtgaagagactagatttagcacatttgcaggaagcatcactgggccactgtatacacaccgacccccaatcacaatatccagtaagattcagaaaaccaaggtggaagctcccaagcttaaggtccaacacaaatttgtcgaggagatcatagaggaaaccaaagtggaggatgagaagtcagaaatggaagaggccctgacagccattacagaggaattggccgtttccatgaaggaagagaagaaagaagcagcagaagaaaaggaagaggaacccgaagctgaagaagaagaagtagctgccaaaaagtctccagtgaaagcaactgcacctgaagttaaagaagaggaaggggaaaaggaggaagaagaaggccaggaagaagaggaggaagaagatgagggagctaagtcagaccaagccgaagagggaggatccgagaaggaaggctctagtgaaaaagaggaaggtgagcaggaagaaggagaaacagaagctgaagctgaaggagaggaagccgaagctaaagaggaaaagaaagtggaggaaaagagtgaggaagtggctaccaaggaggagctggtggcagatgccaaggtggaaaagccagaaaaagccaagtctcctgtgccaaaatcaccagtggaagagaaaggcaagtctcctgtgcccaagtcaccagtggaagagaaaggcaagtctcctgtgcccaagtcaccagtggaagagaaaggcaagtctcctgtgccgaaatcaccagtggaagagaaaggcaagtctcctgtgtcaaaatcaccagtggaagagaaagccaaatctcctgtgccaaaatcaccagtggaagaggcaaagtcaaaagcagaagtggggaaaggtgaacagaaagaggaagaagaaaaggaagtcaaggaagctcccaaggaagagaaggtagagaaaaaggaagagaaaccaaaggatgtgccagagaagaagaaagctgagtcccctgtaaaggaggaagctgtggcagaggtggtcaccatcaccaaatcggtaaaggtgcacttggagaaagagaccaaagaagaggggaagccactgcagcaggagaaagagaaggagaaagcgggaggagagggaggaagtgaggaggaagggagtgataaaggtgccaagggatccaggaaggaagacatagctgtcaatggggaggtagaaggaaaagaggaggtagagcaggagaccaaggaaaaaggcagtgggagggaagaggagaaaggcgttgtcaccaatggcctagacttgagcccagcagatgaaaagaaggggggtgataaaagtgaggagaaagtggtggtgaccaaaacggtagaaaaaatcaccagtgaggggggagatggtgctaccaaatacatcactaaatctgtaaccgtcactcaaaaggttgaagagcatgaagagacctttgaggagaaactagtgtctactaaaaaggtagaaaaagtcacttcacacgccatagtaaaggaagtcacccagagtgactaagatttgagtccattgcaaaaggttaagccatatgacaatttcaaaatgcatgtgattggcagcttcaaaacagaacctcgttgacatgcacagtttgcaatcttatgttgatcgatgttaaacgtcacagcagtacttgctcaataaaggtcatattggaaacatagtcaa

SEQ ID NO: 442130 - DNA, 1351 bp, Homo sapiens
cgctgcagtggttgctgggcgaccacggagagaaagccgggacttgaggtgggaaccccggctggcgtccggtagggggaggttcccggggaagcccgcggaaggcgaggtgcctggcctgccatgtaggggctcgttccaagccgcagaccccaccgccctccctctccccggggcccatggcggtggccgtgcccccgggtcgggccgcaggctcaggctgggcctggaggccagtggcgcgggacgcgcttttggctagagctttccattcatgcaccgaactgcggggacggttctatctcgtaggtggtctcctagcaggaggagcgagagagcccagcagcgatacggtggttttcgacccagctaggggccaggccgtacgattgggagcccggggcagccccccgcgcagtcaccacgacgcggcacccgtggacgggcgttggctctgcgtggtgggcggctgggacgggtctcgccgcttggccacagtgaccgcactggacacagagcgcggtgtgtgggaggcgtggacagggacccctggtgactgcccccccgccggcctcagtagtcacacctgcacccgaatctctgaccgagagctgcaggtggctggccgggagggcggtatccacactcagcgacgctatggaagcatctacacattaaggctggaccccagcgcccgcacctattgctacaagcaagaaggctgccacacagcctcacgctcaggtcactgtgcggccctgctccaaactcctggaccccatccaggtcatcagctattgctctttggaggttgcaacttagctgaaccagaagtagctgggcattggagtcatgggaaaattaaggaggaaccacctgttgctcctcatttgatggaacagcttgcaaggcttgtgagcagtgggcaggggtcccagaaggggccccatggactacggcatcactcatgttctgtggtcgggccctttgctgtgctgtttggtggagaaactctgaccagagctagagacaccatctgcaatgatctctacatctatgatactcgcacatctcctcctttgtggttccacttcccctgtgcagatcgtgggatgaaacgcatgggccatcgcacctgcctttggaatgatcagctttacctggttgggggttttggtgaggatggcaggacagccagtccacaggtttgcatcctggactttatctaaatagtgccaagacacatcactaagcctcgttttgttttgctttgttgcaaacctataaagcgttatcaccagagctatctgcttcacttcaaatgcttattaaatttcaatctgagactcaa

SEQ ID NO: 442131 - DNA, 930 bp, Homo sapiens
cgctgcagtggttgctgggcgaccacggagagaaagccgggacttgaggtggtctcctagcaggaggagcgagagagcccagcagcgatacggtggttttcgacccagctaggggccaggccgtacgattgggagcccggggcagccccccgcgcagtcaccacgacgcggcacccgtggacgggcgttggctctgcgtggtgggcggctgggacgggtctcgccgcttggccacagtgaccgcactggacacagagcgcggtgtgtgggaggcgtggacagggacccctggtgactgcccccccgccggcctcagtagtcacacctgcacccgaatctctgaccgagagctgcaggtggctggccgggagggcggtatccacactcagcgacgctatggaagcatctacacattaaggctggaccccagcgcccgcacctattggaggaaccacctgttgctcctcatttgatggaacagcttgcaaggcttgtgagcagtgggcaggggtcccagaaggggccccatggactacggcatcactcatgttctgtggtcgggccctttgctgtgctgtttggtggagaaactctgaccagagctagagacaccatctgcaatgatctctacatctatgatactcgcacatctcctcctttgtggttccacttcccctgtgcagatcgtgggatgaaacgcatgggccatcgcacctgcctttggaatgatcagctttacctggttgggggttttggtgaggatggcaggacagccagtccacaggtttgcatcctggactttatctaaatagtgccaagacacatcactaagcctcgttttgttttgctttgttgcaaacctataaagcgttatcaccagagctatctgcttcacttcaaatgcttattaaatttcaatctgagactcaa

SEQ ID NO: 442132 - DNA, 1373 bp, Homo sapiens
cgctgcagtggttgctgggcgaccacggagagaaagccgggacttgaggtggtctcctagcaggaggagcgagagagcccagcagcgatacggtggttttcgacccagctaggggccaggccgtacgattgggagcccggggcagccccccgcgcagtcaccacgacgcggcacccgtggacgggcgttggctctgcgtggtgggcggctgggacgggtctcgccgcttggccacagtgaccgcactggacacagagcgcggtgtgtgggaggcgtggacagggacccctggtgactgcccccccgccggcctcagtagtcacacctgcacccgaatctctgaccgagagctgcaggtggctggccgggagggcggtatccacactcagcgacgctatggaagcatctacacattaaggctggaccccagcgcccgcacctattggtatggcaccctccgcccaaaacctttcactctcatccacactctcgaaaaacaaaagcctaagcagatttctcaggcaatttatccacctcctcactctagcaccctccttccaggggaacctaccatgtttaagctagctgagctctctacagtattaccctccctcttatcccacctaccgcactgccccatgcctcttctccatccatccttggcaagggcggtggcacttacattttccagaaaacccactcagccctgaatttctgcatgtccacagctacaagcaagaaggctgccacacagcctcacgctcaggtcactgtgcggccctgctccaaactcctggaccccatccaggtcatcagctattgctctttggaggttgcaacttagctgaaccagaagtagctgggcattggagtcatgggaaaattaaggaggaaccacctgttgctcctcatttgatggaacagcttgcaaggcttgtgagcagtgggcaggggtcccagaaggggccccatggactacggcatcactcatgttctgtggtcgggccctttgctgtgctgtttggtggagaaactctgaccagagctagagacaccatctgcaatgatctctacatctatgatactcgcacatctcctcctttgtggttccacttcccctgtgcagatcgtgggatgaaacgcatgggccatcgcacctgcctttggaatgatcagctttacctggttgggggttttggtgaggatggcaggacagccagtccacaggtttgcatcctggactttatctaaatagtgccaagacacatcactaagcctcgttttgttttgctttgttgcaaacctataaagcgttatcaccagagctatctgcttcacttcaaatgcttattaaatttcaatctgagactcaa

SEQ ID NO: 442133 - DNA, 1615 bp, Homo sapiens
cgctgcagtggttgctgggcgaccacggagagaaagccgggacttgaggtgggaaccccggctggcgtccggtagggggaggttcccggggaagcccgcggaaggcgaggtgcctggcctgccatgtaggggctcgttccaagccgcagaccccaccgccctccctctccccggggcccatggcggtggccgtgcccccgggtcgggccgcaggctcaggctgggcctggaggccagtggcgcgggacgcgcttttggctagagctttccattcatgcaccgaactgcggggacggttctatctcgtaggtggtctcctagcaggaggagcgagagagcccagcagcgatacggtggttttcgacccagctaggggccaggccgtacgattgggagcccggggcagccccccgcgcagtcaccacgacgcggcacccgtggacgggcgttggctctgcgtggtgggcggctgggacgggtctcgccgcttggccacagtgaccgcactggacacagagcgcggtgtgtgggaggcgtggacagggacccctggtgactgcccccccgccggcctcagtagtcacacctgcacccgaatctctgaccgagagctgcaggtggctggccgggagggcggtatccacactcagcgacgctatggaagcatctacacattaaggctggaccccagcgcccgcacctattgctacaagcaagaaggctgccacacagcctcacgctcaggtcactgtgcggccctgctccaaactcctggaccccatccaggtcatcagctattgctctttggaggttgcaacttagctgaaccagaagtagctgggcattggagtcatgggaaaattaaggaggaaccacctgttgctcctcatttgatggaacagcttgcaaggcttgtgagcagtgggcaggggtcccagaaggggccccatggactacggcatcactcatgttctgtggtcgggccctttgctgtgctgtttggtggagaaactctgaccagagctagagacaccatctgcaatgatctctacatctatgatactcgtgagagccagactaatggctgaagggggggaaggtgggaagatgggggaacctgaagactacagaaagaggatggagtgatggggtagggaggaggaaaaattagttgacaggagttaaaggagtacacagaatattaagcatttgaagaggcctacaaatcaagtgagcagaaaaacaatgggcaagcccttggtcatgttgaattctgtgaatgacaaagtgctactgcctcaataaccaccctctgcccgtatccaacaggcacatctcctcctttgtggttccacttcccctgtgcagatcgtgggatgaaacgcatgggccatcgcacctgcctttggaatgatcagctttacctggttgggggttttggtgaggatggcaggacagccagtccacaggtttgcatcctggactttatctaaatagtgccaagacacatcactaagcctcgttttgttttgctttgttgcaaacctataaagcgttatcaccagagctatctgcttcacttcaaatgcttattaaatttcaatctgagactcaa

SEQ ID NO: 442134 - DNA, 267 bp, Homo sapiens
tctgcatgtccacagctacaagcaagaaggctgccacacagcctcacgctcaggtcactgtgcggccctgctccaaactcctggaccccatccaggtcatcagctattgctctttggaggttgcaacttagctgaaccagaagtagctgggcattggagtcatgggaaaattaaggtattagctcctcacacatcttgtttaggatgggaagaggctaaaattgtgatgcccaggtctcttcggacagtcctttctttctccccaag

SEQ ID NO: 442135 - DNA, 982 bp, Homo sapiens
cgctgcagtggttgctgggcgaccacggagagaaagccgggacttgaggtggtctcctagcaggaggagcgagagagcccagcagcgatacggtggttttcgacccagctaggggccaggccgtacgattgggagcccggggcagccccccgcgcagtcaccacgacgcggcacccgtggacgggcgttggctctgcgtggtgggcggctgggacgggtctcgccgcttggccacagtgaccgcactggacacagagcgcggtgtgtgggaggcgtggacagggacccctggtgactgcccccccgccggcctcagtagtcacacctgcacccgaatctctgaccgagagctgcaggtggctggccgggagggcggtatccacactcagcgacgctatggaagcatctacacattaaggctggaccccagcgcccgcacctattggaggaaccacctgttgctcctcatttgatggaacagcttgcaaggcttgtgagcagtgggcaggggtcccagaaggggccccatggactacggcatcactcatgttctgtggtcgggccctttgctgtgctgtttggtggagaaactctgaccagagctagagacaccatctgcaatgatctctacatctatgatactcgcacatctcctcctttgtggttccacttcccctgtgcagatcgtgggatgaaacgcatgggccatcgcacctgcctttggaatgatcagctttacctggttgggggttttggtgaggatggcaggacagccagtccacaggtttgcatcctggactttatctaaatagtgccaagacacatcactaagcctcgttttgttttgctttgttgcaaacctataaagcgttatcaccagagctatctgcttcacttcaaatgcttattaaatttcaatctgagactcaaaaaaaaaattttccagagcgggaacgggccaaagggcggaacttaagggggc

SEQ ID NO: 442136 - DNA, 1090 bp, Homo sapiens
cgctgcagtggttgctgggcgaccacggagagaaagccgggacttgaggtggtctcctagcaggaggagcgagagagcccagcagcgatacggtggttttcgacccagctaggggccaggccgtacgattgggagcccggggcagccccccgcgcagtcaccacgacgcggcacccgtggacgggcgttggctctgcgtggtgggcggctgggacgggtctcgccgcttggccacagtgaccgcactggacacagagcgcggtgtgtgggaggcgtggacagggacccctggtgactgcccccccgccggcctcagtagtcacacctgcacccgaatctctgaccgagagctgcaggtggctggccgggagggcggtatccacactcagcgacgctatggaagcatctacacattaaggctggaccccagcgcccgcacctattgctacaagcaagaaggctgccacacagcctcacgctcaggtcactgtgcggccctgctccaaactcctggaccccatccaggtcatcagctattgctctttggaggttgcaacttagctgaaccagaagtagctgggcattggagtcatgggaaaattaaggaggaaccacctgttgctcctcatttgatggaacagcttgcaaggcttgtgagcagtgggcaggggtcccagaaggggccccatggactacggcatcactcatgttctgtggtcgggccctttgctgtgctgtttggtggagaaactctgaccagagctagagacaccatctgcaatgatctctacatctatgatactcgcacatctcctcctttgtggttccacttcccctgtgcagatcgtgggatgaaacgcatgggccatcgcacctgcctttggaatgatcagctttacctggttgggggttttggtgaggatggcaggacagccagtccacaggtttgcatcctggactttatctaaatagtgccaagacacatcactaagcctcgttttgttttgctttgttgcaaacctataaagcgttatcaccagagctatctgcttcacttcaaatgcttattaaatttcaatctgagactcaa

SEQ ID NO: 442137 - DNA, 1370 bp, Homo sapiens
cgctgcagtggttgctgggcgaccacggagagaaagccgggacttgaggtgggaaccccggctggcgtccggtagggggaggttcccggggaagcccgcggaaggcgaggtgcctggcctgccatgtaggggctcgttccaagccgcagaccccaccgccctccctctccccggggcccatggcggtggccgtgcccccgggtcgggccgcaggctcaggctgggcctggaggccagtggcgcgggacgcgcttttggctagagctttccattcatgcaccgaactgcggggacggttctatctcgtaggtggtctcctagcaggaggagcgagagagcccagcagcgatacggtggttttcgacccagctaggggccaggccgtacgattgggagcccggggcagccccccgcgcagtcaccacgacgcggcacccgtggacgggcgttggctctgcgtggtgggcggctgggacgggtctcgccgcttggccacagtgaccgcactggacacagagcgcggtgtgtgggaggcgtggacagggacccctggtgactgcccccccgccggcctcagtagtcacacctgcacccgaatctctgaccgagagctgcaggtggctggccgggagggcggtatccacactcagcgacgctatggaagcatctacacattaaggctggaccccagcgcccgcacctattgctacaagcaagaaggctgccacacagcctcacgctcaggtcactgtgcggccctgctccaaactcctggaccccatccaggtcatcagctattgctctttggaggttgcaacttagctgaaccagaagtagctgggcattggagtcatgggaaaattaagtcctttctttctccccaaggaggaaccacctgttgctcctcatttgatggaacagcttgcaaggcttgtgagcagtgggcaggggtcccagaaggggccccatggactacggcatcactcatgttctgtggtcgggccctttgctgtgctgtttggtggagaaactctgaccagagctagagacaccatctgcaatgatctctacatctatgatactcgcacatctcctcctttgtggttccacttcccctgtgcagatcgtgggatgaaacgcatgggccatcgcacctgcctttggaatgatcagctttacctggttgggggttttggtgaggatggcaggacagccagtccacaggtttgcatcctggactttatctaaatagtgccaagacacatcactaagcctcgttttgttttgctttgttgcaaacctataaagcgttatcaccagagctatctgcttcacttcaaatgcttattaaatttcaatctgagactcaa

SEQ ID NO: 442138 - DNA, 1403 bp, Homo sapiens
cgctgcagtggttgctgggcgaccacggagagaaagccgggacttgaggtgggaaccccggctggcgtccggtagggggaggttcccggggaagcccgcggaaggcgaggtgcctggcctgccatgtaggggctcgttccaagccgcagaccccaccgccctccctctccccggggcccatggcggtggccgtgcccccgggtcgggccgcaggctcaggctgggcctggaggccagtggcgcgggacgcgcttttggctagagctttccattcatgcaccgaactgcggggacggttctatctcgtaggtggtctcctagcaggaggagcgagagagcccagcagcgatacggtggttttcgacccagctaggggccaggccgtacgattgggagcccggggcagccccccgcgcagtcaccacgacgcggcacccgtggacgggcgttggctctgcgtggtgggcggctgggacgggtctcgccgcttggccacagtgaccgcactggacacagagcgcggtgtgtgggaggcgtggacagggacccctggtgactgcccccccgccggcctcagtagtcacacctgcacccgaatctctgaccgagagctgcaggtggctggccgggagggcggtatccacactcagcgacgctatggaagcatctacacattaaggctggaccccagcgcccgcacctattgctacaagcaagaaggctgccacacagcctcacgctcaggtcactgtgcggccctgctccaaactcctggaccccatccaggtcatcagctattgctctttggaggttgcaacttagctgaaccagaagtagctgggcattggagtcatgggaaaattaaggaggaaccacctgttgctcctcatttgatggaacagcttgcaaggcttgtgagcagtgggcaggggtcccagaaggggccccatggactacggcatcactcatgttctgtggtcgggccctttgctgtgctgtttggtggagaaactctgaccagagctagagacaccatctgcaatgatctctacatctatgatactcgcacatctcctcctttgtggttccacttcccctgtgcagatcgtgggatgaaacgcatgggccatcgcacctgcctttggaatgatcagctttacctggttgggggttttggtgaggatggcaggacagccagtccacaggtttgcatcctggactttatctaaatagtgccaagacacatcactaagcctcgttttgttttgctttgttgcaaacctataaagcgttatcaccagagctatctgcttcacttcaaatgcttattaaatttcaatctgagactcaaaaaaaaaattttccagagcgggaacgggccaaagggcggaacttaagggggc

SEQ ID NO: 442139 - DNA, 357 bp, Homo sapiens
acaggaaggggcggaggcctcggtgagaaaggattgcgatattctggaccgggagttgggtccgcggggcggtggagcaacaagctcccctagctccctttgacccactctcccccatccggcccactgcaggtctggttcaagaaccgccgcgccaaatgccgccagcagcagcagagcgggagcggaaccaagagccgcccagccaagaagaagtcctctccagtgcgggagagctcgggctccgaaagcagtggccaattcacgccgccagctgtgtccagctctgcctcgtcctctagctcggcgtccagctcttccgccaacccagcggctgcagcggctgcgggactaggt

SEQ ID NO: 442140 - DNA, 2137 bp, Homo sapiens
atcacctaaacaaccgagcaagacaagccactccgacaaggttggctgcccggcgggtctctgtgagagatccaggtagatggtgaacggccccggcagctgagggcaggccaggcccccagacgcatcagaccctgaaggactgcgtggtgggagccctgcaccgctcctggccccgggccccctggatccgtcggggcgcctccacccagctgttagcatgatgtcttacctcaaacaacccccatacggcatgaacgggctgggcctggccgggcccgccatggacctcctgcacccatccgtgggctatccggccactccgcggaagcagcggcgggagcgcaccaccttcacgcgttcacagctggacgtgctcgaggcgctcttcgccaagactcgctaccctgacatcttcatgcgggaggaggtggcgctcaagatcaacctgccggagtctagagtccaggtctggttcaagaaccgccgcgccaaatgccgccagcagcagcagagcgggagcggaaccaagagccgcccagccaagaagaagtcctctccagtgcgggagagctcgggctccgaaagcagtggccaattcacgccgccagctgtgtccagctctgcctcgtcctctagctcggcgtccagctcttccgccaacccagcggctgcagcggctgcgggactaggtgggaacccggtggcggccgcgtcgtcgctgagtacaccagctgcctcatctatctggagcccggcctccatctcgccaggctcagcgcccgcgtccgtgtcggtgccggagccattggccgcgcctagcaacacctcgtgtatgcagcgctccgtagctgcaggcgccgccaccgcagcagcctcttatcccatgtcctacggccagggcggcagctacggccaaggctaccctacgccctcctcttcctactttggcggcgtggactgcagctcatacctagcgcccatgcactcacatcaccacccgcaccagctcagccccatggcaccctcctccatggcgggccaccatcatcaccacccacatgcgcaccacccgttgagccagtcctcaggccaccaccaccaccatcaccaccaccaccaccaaggctacggtggctctgggcttgccttcaactctgccgactgcttggattacaaggagcctggcgccgctgctgcttcctccgcctggaaactcaacttcaactcccccgactgtctggactataaggaccaagcctcatggcggttccaggtcttgtgagcccaggaatgaaagaggagaagaaacgcaactacctgcgccctccgtggtcccgatcctgttgctgctgctgcaccgcccgcctttgcctcgtcttctccaaaactgaattttcaccccccaaaaagatgtccattgcctgcactgccgcccccatttttgtgccacttgcttggggggatgtgcaaacccaccctgccccttggatggggggaccggtgcttcggcttggcctacacattctatacaggagagatgtattatttccccccttcagcccctactaaactcttaagcctccccttccagtctttctggacagctattaagcacttgcagccttcggaggctctgcgctctgatccgctgtttgagcccaacactttaatttattctttctggacactggagtcactaactggcgtgtttctgcccattggagcacccgcacactactccaaatcaaaaccactaagagttcctcccgcgcagactgctgccccttcagctgccctcgattttgctccacgcctgccggccagagcctcccggcgtttcttccgccccagcggagtgcgctggggcgcgccagggctaggcccgccggaggagcgcgtccccagccttccgcgcacagagccgcatcccgccccgccctgcgctggactggttcaagcttccgcctcggcgggaacgctgtacatagtcaggtccgttccagggaccacttaaactttttagttgctgttggttggttgaactgaacatatcttgtcttagcacccaggaaacagaactttaagatatatacagcacatatatatatatatacatatatatatacacatatat

SEQ ID NO: 442141 - DNA, 2386 bp, Homo sapiens
  misc_feature (249)..(249): n is a, c, g, or t
  misc_feature (1088)..(1088): n is a, c, g, or t
agagctgctgcatccagtgatgtttctgcctacttatctttttgttggcattgttgggtgggatgaattcctaaagaatacaccaagattttctcagtgtttttgttaggagaaggggaagttgagagttaacctcatttatttttcttacagtgtagagataattcagttatgtagcgaaaggacagggctcttaaacagaggaagatagccatgggtgtaggaagattcgtctttgttcagaaatantgtcctctttgcatctctcctaacagttggtgctagcaatcccctactctgtctggcctctggatctagcttgaagttctggattcatttccttcttccttgtacctcagcctgagccttctgtcacccaaagggctccagctggtttttcactcaggcctcactttatcttccaaggtatgtttaggggaagttgtaggcagaattatgtctctcacttccttacttgggcataatgggcagatcctcattaaatattgattggatgaatgttcctagtgaactccctttttaaaaatggtgtttggcagtgggtcggcatttgtttttactcccctctcaccagactgtttgctgtcagacaccttgccatatgtatatggaatgtttttctagttcctagccattttgtaggagtttttaaattatattttttggttgtttcaatgggcagttaggagaaggaggaagtcagatgttttcagttgccatgttcatataggaaactacagattattttaatacttttacaaaattgtattatttcaagacttattgagatgttggtcaagtcttatgctgtaataatacatatatagaaggcagtagtttaaatagcacatttaaaaccagtaatctgggctggacgttgtggcacacacctataatctcaacactttgggaggccaaggcgagtggatcgcttgagctcagaagttcaacaccagcctgggcgacatggcaaaacctcatctatgcagaaaaatacaaaaattagcggactgtgatggtgtatacctgtagtccctgttacttgggaggctgacgtgggaggattncttgagcccaggaggttgaggctgcagtgagctgagatcacgccactgcactccagcctgggcgacagcgagaccctgtctcaaaataaataagtaaaaccagcaatctttgttggtgggtagagattggactgtagtaaaaagagcattagctcataggttggaggattacaattgtaataaaatttttctttttttatgttgagacgttcacaacatgccaacattttttgtccatacgtggcaaccttagtataaattgctgtcagatatcatgtttgtgtattagtcaagagttctccagagatgcagaaccagaaagatacatacacagtcataccttgtttaacgatgggaatacgttctgagaaatgagtcatgaggttattttgtcattgtgtgaacatcagagtgtacttacacaaacctagatggtaaacctgttacacactttgactatatggtatagcctgttgcttctaggctacctgtatagcgtattactgtactgaatagtgtatgcaaatgtaacacagtgatgagtatttgtgtatctaaatgtagaaaagatgcagcaaaattacagtattaaaatctcatgggaccacatttgtttattaggttcattgttggccaaaacataattatgcagcatgtgactatatatagattgattgatagatacataaatacatgagaggggatttattaggggaattgactgatgtgattatgggggctgagaaatcctgtaagaggttgtctgcaaactagagaccctgggatgctggtagtatgattcagtccaagtccaaacgcctcagaaccagagaacccaatggtccaattctcagtctgaggttaaaggcctggctaaagcagggctgctgggctaagtcctggagtcctaaggctagagagcctggagttctgatgtccaagggcaggaggaagagagtatccttgctccaagagagaggcaggggaaatccttttctctccttttttgttctgtcaaggcccctggccggttggatggtgcccacccacactgaggcaaatctgccccactcagtctactgactcacatcctggtctctggaaacaccctcacagacaaacccagaagtaatgttttactggttttctaggtattccttaatccagtcaagttgatacctaaaattaaccatcacagattgcttccccatgcaacaagttgaacataattgaagacatagtagactctctagagaaacttaaaatttgagggcaaataacaaaccccaaactaccta

SEQ ID NO: 442142 - DNA, 567 bp, Homo sapiens
atgtgaagtgtaattgaacagtttttgtcgtcaaaagttttaaaatcttggtcttcatttccagatatcatctcttcttttgatcactgttcctgattgtgacattgtgcaagtgttaaattgtgtgccttttgttcctgaagaaagaggtatggtaaagattgaaatactggagtatatagtctattaagtagtaagttggtatgttttaatattggactaaataaagtaaaatataggttaagtatcccaaatccaaaaatccagaatgcaaaattttttgagtgctgacatgatggtcaaaggaaatgctctttggaacattttggattttgaatttttggatttgagatgctcaactggtataatgcaaatactctaaaatcctaaaaaagaaaaagaaaaaaagaatgaaacccttctgttcccaagcatttcaaataagagacactcaacctgtagttttacatatacatgagttttcataagttatataagttatagttttattttattttttggctaaaataaaatacttaaacatgagttttcattttaatctaagca

SEQ ID NO: 442143 - DNA, 996 bp, Homo sapiens
  misc_feature (778)..(778): n is a, c, g, or t
  misc_feature (780)..(780): n is a, c, g, or t
  misc_feature (785)..(785): n is a, c, g, or t
gagaccattcccagtcagcaagggcttgggaagtgcatacagttcctgctcctggtgtctactctgaagagcacagagtagacgtttgtctgccatttcaccggcagtaagatcagcagctgctggtgagcaaagaggtagtagtgggtcactggactggtgggcgccggggccgcgcgctagatggagaggtcagcggcgaacccagctccatggcctagtctcgtcagaccgagcgcggaccctgccggcctccgttctcttccgcttgtctcagatatcatctcttcttttgatcactgttcctgattgtgacattgtgcaagtgttaaattgtgtgccttttgttcctgaagaaagaggtcctgggatctttgaaatgctaagattcttggataccacagtatcataaaattcctctaaatgcattggtgctagcaatcccctactctgtctggcctctggatctagcttgaagttctggattcatttccttcttccttgtacctcagcctgagccttctgtcacccaaagggctccagctggtttttcactcaggcctcactttatcttccaagatgaaggaactgagacacagaggttgagacttgtctaaagtaacatgaccagtaagtgcttgaattaatgcagatgaggaaactgaggtccagagaagttgaagttttcccaaggtcacacagcagagctggaactagagcttgcatttcctgacttccagattagtgttatttttacttcaaactattacttcttggngngtatnggggaacatcgtttatcgaagatgggcctaccagtatcgtccggttaatcacgatactcagcgtttcgacaaaagactgggcttcgggaatctgccctggcggcaccgctttggtggtaaacactctttaaaagttcgggacaggcccgtgggggcaaaccaaggctcctcgcccagcgcgggccattccggctgcgggaggcctcccgcg

SEQ ID NO: 442144 - DNA, 371 bp, Homo sapiens
tagtggtagctgtgatttatatggcactttaaaggatatttttacatatattttctcattttatcttcacaacaaccttgtgaaagacataggggaagtactaatttttccccccattttacagatgaaggaactgagacacagaggttgagacttgtctaaagtaacatgaccagtaagtgcttgaattaatgcaggtaggtagtgatgggtatgttctaatctgccaagggcttttccttgctgtcatctggcttgagttctgaggatataaattcatatagccaaaatggtagggaaccagaaaggtaatgagtagatggactttaggactacactagggaaatggtgctgctgttctttttaatttc

SEQ ID NO: 442145 - DNA, 334 bp, Homo sapiens
gcggccgcctactactactactactgctcgaattcaagcttctaacgatgtacggggacatgatggtcaaaggaaatgctctttggaacattttggattttgaatttttggatttgagatgctcaactggtataatgcaaatactctaaaatcctaaaaaagaaaaagaaaaaaagaatgaaacccttctgttcccaagcatttcaaataagagacactcaacctgtagttttacatatacatgagttttcataagttatataagttatagttttattttattttttggctaaaataaaatacttaaacatgagttttcattttaatctaagca

SEQ ID NO: 442146 - DNA, 8049 bp, Homo sapiens
gagaccattcccagtcagcaagggcttgggaagtgcatacagttcctgctcctggtgtctactctgaagagcacagagtagacgtttgtctgccatttcaccggcagtaagatcagcagctgctggtgagcaaagaggtagtagtgggtcactggactggtgggcgccggggccgcgcgctagatggagaggtcagcggcgaacccagctccatggcctagtctcgtcagaccgagcgcggaccctgccggcctccgttctcttccgcttgtctcaggtaaagcgcagatccctccgccgcagcgtgcgctcccggtagcgctgcgatcagcttttcggcaatacccggatggaagtgtaatggccgccatcagggactcgcaggcaatgggtactacgacaggtattccccgtcagcgggactgcccagaccttttaggatgtcagaacttctagagggccacccagcaggcaaacggcgagtttgtggaccgtcagggtcccccaaacaggtccagggatccgcctcttgtgagaggaagcgcgagttaaatagtcccggccattcagcgcttccgcttaacttgccgcaaagtttttctggagaagtcggggtttttttgccgagcgcttttgccgactgctagagcttacccttactttcttaacctggggttgttttacttccgggctttttgaactctacactctcctacattctaggagctgggtgggagtaggagacggtgtgcctccgcgctccccgcggggcagccgaaccccggaggaaggggcggatcgggcgcggtgtttggggcgaagctgggcgcgcggcgctcgaagcactcactcggcgggtttcgtggttggtggagacagcaagggcgccccgcagaccgcacccctcgagctataggttcgcaggcccgactcgacggcgtccctattgctggcccagcgtatggtcattgggggccatttcttgcagagatgccctgctccctgacgcgctcgctcttctccagagttggccaaaggtgctcttccccgcagaccctaaccacacccagtggcagttggatttctttgtaactggctttctcacatatatcatctcttcttttgatcactgttcctgattgtgacattgtgcaagtgttaaattgtgtgccttttgttcctgaagaaagaggtcctgggatctttgaaatgctaagattcttggataccacagtatcataaaattcctctaaatgcattggtgctagcaatcccctactctgtctggcctctggatctagcttgaagttctggattcatttccttcttccttgtacctcagcctgagccttctgtcacccaaagggctccagctggtttttcactcaggcctcactttatcttccaagatgaaggaactgagacacagaggttgagacttgtctaaagtaacatgaccaatgaggaaactgaggtccagagaagttgaagttttcccaaggtcacacagcagagctggaactagagcttgcatttcctgacttccagattagtgttatttttacttcaaactattacttcttgataacttcaagagttttcagaaaaaaagaaattgggacttttttggttaaatcatgccatctgaacagaaacagttattttgtgatgaaaaacaaactactttaaaaaaagattatgatgtgaaaaatgagatagttgataggtcggcacctaaaccaaaaatttcaggaagtattcattatgcactaaaaaatgtgaaaattgatttgccaaaaataaatattccaaatgaagtcctattgaaacatgaagttgacaaatacagaaaattatttcagagtaaacagcagactgcaagaaaatctatcagtataaagactgtaagctgtgtagaggagtgtacattgcttcataagtctgagagagctgaagaagagggtgtaaaaatgtctgcaaaaatactcaatttcagctgtttaaaatgccgagacaacactcgatatagcccaaatgatttgcagaaacactttcaaatgtggcaccatggcgaattaccttcatatccttgtgaaatgtgcaacttttcagcaaatgactttcaggtatttaaacaacacagacgaacccatagaagcactttagtaaaatgtgacatttgtaacaatgagagtgtatatactttactgaacttgacaaagcatttcacatccacacattgtgttaatggtaattttcaatgtgaaaagtgtaagttctccacccaggatgttggcacatttgttcagcacattcatagacataatgaaattcattataagtgtggtaaatgtcatcatgtatgttttaccaaaggagagcttcagaagcaccttcatattcattctggtacttttcccttcacttgtcaatattgtagctatggtgccaccaggagagaacaccttgtaagacatgttataactttgcacaaagaacatttatatgcaaaagaaaaactggaaaaagacaaatatgaaaaaagaatggcaaagacttctgcaggacttaagctaatactgaaaagatataaaataggtgcatcaaggaagacgttctggaaacgtaagaaaattaacagtggaagtgacagaagtatagaaaagaacactcaagtgcttaagaaaatgaacaaaacacagactaaatctgaagaccagagccatgttgttcaagagcatttaagtgaagaaaaggatgaaagactacactgtgagaataatgataaagcccctgaatcagagtcagagaagccaactcctctgtccactgggcaaggtaatagagctgaagagggaccaaacgctagttcaggtttcatgaagactgctgtactaggacctacactgaaaaatgtaatgatgaaaaataataaactagcagtttcccctaactataatgctacgtttatgggcttcaagatgatggatggaaaacagcatattgtattaaaattggtgcctatcaaacaaaatgtatgttcaccaggctcacagtcaggtgctgcaaaggacggtactgctaatttgcagccccagactttggacactaatggatttttaacaggagtaacaactgagttaaatgacacagtttatatgaaagcagctactccattttcatgttcatcttctatactttcagggaaagcaagttcagaaaaagaaatgactttgatatctcaaaggaataatatgcttcaaacaatggattatgagaaaagtgtatcttctttgtcagcaacatcagaattggttacagcatcagtgaatttgaccacaaaatttgaaacaagagataatgttgacttctggggaaatcatctcactcagagtcaccccgaggtattaggtaccaccattaaaagtccagataaagtcaactgtgttgccaaaccaaatgcatacaacagtggagatatgcataattattgcattaattatggcaactgtgagttacctgttgaatcctccaaccaaggatcattaccttttcataattactcaaaagtgaataattctaataaacgtcgtaggttttcaggaacagcagtgtatgaaaaccctcaaagagaatcttcatccagcaaaacagttgtccaacaaccaattagtgaatcatttttatcactagtgaggcaggagagctcaaaaccagatagcctattagcatctattagccttttaaatgataaagatggaactttaaaagcaaaatctgaaattgaagaacagtatgttttagaaaaaggacaaaacattgatggacaaaacctgtacagtaatgaaaatcaaaatttagagtgtgcgactgaaaaatctaaatgggaagacttttctaatgtcgattcacctatgatgcctagaatcacatctgttttctctctccagagccaacaggcatcagaatttctgccacctgaagtaaaccaattgcttcaggatgtattgaaaataaaacctgatgtaaaacaagactctagtaacactccaaataaaggcttgccacttcattgtgaccagtcatttcaaaaacacgagagagaaggcaaaattgttgaatcttcgaaagatttcaaagtgcaaggcatcttcccagttccacctggcagtgtgggtattaatgtgcctacaaatgatttgaatttgaaatttggaaaagaaaaacaagtgtcatcaataccacaagatgtgagagattcagagaagatgcctagaatttcaggttttggcacattacttaagactcagtcagatgcgataataacacagcagcttgtaaaagacaaactacgagccaccacacaaaatttaggttctttttatatgcagagtccacttttaaattcagaacaaaaaaaaactataattgttcagacttcaaaaggattcttaataccattgaacattactaacaagcctgggctaccagttattcctggaaatgcacttccattggttaattcacaaggtatccctgcttctctttttgtaaacaagaaacctgggatggttttaacacttaataatgggaaacttgaaggtgtttccgctgtcaaaaccgagggtgccccagctcgtggaactgtgactaaggagccttgcaaaacacctattttgaaggtagaaccaaacaataattgtcttacacctggactttgttccagcattggcagttgtttgagcatgaaaagtagctcagaaaatactttgccattaaaaggcccttacattttgaaaccaacgagttctgtgaaagctgttcttattcctaacatgctatctgagcaacagagcactaagttgaatatctccgattcagtaaaacagcagaatgagatttttccaaaaccacctctttataccttcttgcctgatggcaaacaagctgtttttttaaagtgtgtgatgccaaataaaactgagctgcttaagcccaaattagtccaaaatagtacttatcaaaatatacagccaaagaaacctgaaggaacaccacaaagaatattgctgaaaatttttaaccctgttttaaatgtgactgctgctaataatctgtcagtaagcaactctgcatcctcattgcaaaaagacaacgtaccatctaatcagattataggaggagagcagaaagagccagaatctagagatgccttacccttcttactagatgacttaatgccagcaaatgaaattgtgataacttctactgcaacatgcccagaatcttctgaggaaccaatatgtgtcagtgactgttcagagtccagggtattaaggtgtaaaacaaattgtagaattgagaggaacttcaatagaaaaaagacttccaaaaaaattttttcaaaaacaaaaactcatggaagtaaagactctgaaactgcctttgtatctagaaacagaaactgtaaacgaaagtgtagggatagttaccaagaacctccaagaagaaaagcaacattgcatagaaagtgtaaagaaaaggcaaaacctgaagatgtccgtgaaacatttggatttagcagacctaggctttcaaaagattccatcagaactttgcggcttttcccttttagttctaaacagcttgtgaaatgtcctaggagaaaccaaccagttgtagttttgaatcatcctgacgcagatgcaccagaagtagtaagtgtaatgaaaactattgctaaatttaatggacatgtacttaaggtttcattgtcaaaaagaactataaatgctttactgaaaccagtttgttataaccctcctaaaacaacttacgatgatttttccaagaggcacaaaacatttaaacctgttagttctgtgaaagaaagatttgtgctaaaattaacactcaaaaagacaagcaaaaacaattaccagattgtgaagactacctctgaaaatattttgaaggctaaatttaactgttggttttgtggtagagtatttgacaatcaggatacttgggctggtcatgggcagagacatttaatggaagctactcgggattggaacatgttagaatagtttaccataattaccaaggaaaagaaaagtaaaattaccttagaagaaaacaacgggttcagttaccataatgcagacattttctacttcagtatagtacctgaaatcgaacattttaaaagttgattgtatttctgtggaagagtaaaagttgtatgtatgatatttgaaaatgctatccctgcactcaaaagttttgaaagaaactaatcacagcacagaagtaccttgatttaattttttaaacgtgttctcgggaagttagggctaaagaaaattttgataaaacaattttcccactttagttctttagtgactcttagtagagggtaatggctgacacccccattccctctcttcttccaccagccttatgcatctaagtgtagctcctctggagatggagagctctttcatcgtagaactgaaggagtttctcacatttgtgaagatactttgagagaacctgggtaaagaagtcactctatatctgctaaatatagttattttgaaggatattaggctccttgaaagtacatttaactcactacagttacacctcatacaatgcttgaagagtttttggcaagtaaattttttttccagttgaactctgtcacttgttagagattgggaacactctcccaaggtgattttctttttctaagtgactgtgtcaaatgttgcagtagatgggcagcttcaagagaagaatttaaactctttgtctcattgaaagtttggttaaagaacttgaacatatttctaaatttgattatattctctgatgatccctttgcacagaactatgcttatctcatgtttgtcctccataaacaaatggccatttttttcttcttggttcccatccctttaaaaagagtggaacataggagcacttccaagggagtggcttttcttgaaaattaaaattgtttaccaaaacagtattttgaagcaagatcatatttttgtctgtattcactttattatttgaacatgtccaaattaggacaaagcatttctgttagctgcttctcagtgtgactgacaacccaaaacatatatacagattgttggcatttgcaaaaggaagcatcaatagtggacccagaggcagtgcataaaaccttaggatagattcctaagggacatgcccaacagagttttaaaatggatgttttcatgatgacaacagaatcatagatttagatttttcaccttgtaagtttggatcaaattttgctggttctttggataatggagttcttgtgttaacaaattacgtgctatatgattttttgttacattgttacaagtgttaatgacattttcattaatggatgaaaacttcagggcttcttttctgtatataacaaattaagtctgtacatatttttgtaccttttatgtaaattttgcacagaaatttttggcataagtttattttctttcagtttagttcagtgcatgcactaataaaactggttgtttaatttaaaaggaatatataagactttacccatgttattttcttggtttttatttcagatgtagattttgtttttgaggtaaattcgttcttcagggattgaacactattgttagcaagtgcctaaaaaagatgtgaaacagtttacatatgtcaactgtaacagtaggtcccaaatgggcccattcccctaatagttttatttttaaagaaagccatacatagaatgcttcaagctatcttgctatgcacattatacttgtactgttttgtgcagtttgtctactttcttagtgaagtattttttgtataaaatgttacaattgtgtttcttaaattgagcctaagaatggagttaattggaaatatacagtatatattaataatgtacatggtgtttaaagaatggtaagcattgttaatttctgtaatgaacattttcaattaaatttatcttgtttgtgttta

SEQ ID NO: 442147 - DNA, 7219 bp, Homo sapiens
gagaccattcccagtcagcaagggcttgggaagtgcatacagttcctgctcctggtgtctactctgaagagcacagagtagacgtttgtctgccatttcaccggcagtaagatcagcagctgctggtgagcaaagaggtagtagtgggtcactggactggtgggcgccggggccgcgcgctagatggagaggtcagcggcgaacccagctccatggcctagtctcgtcagaccgagcgcggaccctgccggcctccgttctcttccgcttgtctcagatatcatctcttcttttgatcactgttcctgattgtgacattgtgcaagtgttaaattgtgtgccttttgttcctgaagaaagaggtcctgggatctttgaaatgctaagattcttggataccacagtatcataaaattcctctaaatgcattggtgctagcaatcccctactctgtctggcctctggatctagcttgaagttctggattcatttccttcttccttgtacctcagcctgagccttctgtcacccaaagggctccagctggtttttcactcaggcctcactttatcttccaagatgaaggaactgagacacagaggttgagacttgtctaaagtaacatgaccaatgaggaaactgaggtccagagaagttgaagttttcccaaggtcacacagcagagctggaactagagcttgcatttcctgacttccagattagtgttatttttacttcaaactattacttcttgataacttcaagagttttcagaaaaaaagaaattgggacttttttggttaaatcatgccatctgaacagaaacagttattttgtgatgaaaaacaaactactttaaaaaaagattatgatgtgaaaaatgagatagttgataggtcggcacctaaaccaaaaatttcaggaagtattcattatgcactaaaaaatgtgaaaattgatttgccaaaaataaatattccaaatgaagtcctattgaaacatgaagttgacaaatacagaaaattatttcagagtaaacagcagactgcaagaaaatctatcagtataaagactgtaagctgtgtagaggagtgtacattgcttcataagtctgagagagctgaagaagagggtgtaaaaatgtctgcaaaaatactcaatttcagctgtttaaaatgccgagacaacactcgatatagcccaaatgatttgcagaaacactttcaaatgtggcaccatggcgaattaccttcatatccttgtgaaatgtgcaacttttcagcaaatgactttcaggtatttaaacaacacagacgaacccatagaagcactttagtaaaatgtgacatttgtaacaatgagagtgtatatactttactgaacttgacaaagcatttcacatccacacattgtgttaatggtaattttcaatgtgaaaagtgtaagttctccacccaggatgttggcacatttgttcagcacattcatagacataatgaaattcattataagtgtggtaaatgtcatcatgtatgttttaccaaaggagagcttcagaagcaccttcatattcattctggtacttttcccttcacttgtcaatattgtagctatggtgccaccaggagagaacaccttgtaagacatgttataactttgcacaaagaacatttatatgcaaaagaaaaactggaaaaagacaaatatgaaaaaagaatggcaaagacttctgcaggacttaagctaatactgaaaagatataaaataggtgcatcaaggaagacgttctggaaacgtaagaaaattaacagtggaagtgacagaagtatagaaaagaacactcaagtgcttaagaaaatgaacaaaacacagactaaatctgaagaccagagccatgttgttcaagagcatttaagtgaagaaaaggatgaaagactacactgtgagaataatgataaagcccctgaatcagagtcagagaagccaactcctctgtccactgggcaaggtaatagagctgaagagggaccaaacgctagttcaggtttcatgaagactgctgtactaggacctacactgaaaaatgtaatgatgaaaaataataaactagcagtttcccctaactataatgctacgtttatgggcttcaagatgatggatggaaaacagcatattgtattaaaattggtgcctatcaaacaaaatgtatgttcaccaggctcacagtcaggtgctgcaaaggacggtactgctaatttgcagccccagactttggacactaatggatttttaacaggagtaacaactgagttaaatgacacagtttatatgaaagcagctactccattttcatgttcatcttctatactttcagggaaagcaagttcagaaaaagaaatgactttgatatctcaaaggaataatatgcttcaaacaatggattatgagaaaagtgtatcttctttgtcagcaacatcagaattggttacagcatcagtgaatttgaccacaaaatttgaaacaagagataatgttgacttctggggaaatcatctcactcagagtcaccccgaggtattaggtaccaccattaaaagtccagataaagtcaactgtgttgccaaaccaaatgcatacaacagtggagatatgcataattattgcattaattatggcaactgtgagttacctgttgaatcctccaaccaaggatcattaccttttcataattactcaaaagtgaataattctaataaacgtcgtaggttttcaggaacagcagtgtatgaaaaccctcaaagagaatcttcatccagcaaaacagttgtccaacaaccaattagtgaatcatttttatcactagtgaggcaggagagctcaaaaccagatagcctattagcatctattagccttttaaatgataaagatggaactttaaaagcaaaatctgaaattgaagaacagtatgttttagaaaaaggacaaaacattgatggacaaaacctgtacagtaatgaaaatcaaaatttagagtgtgcgactgaaaaatctaaatgggaagacttttctaatgtcgattcacctatgatgcctagaatcacatctgttttctctctccagagccaacaggcatcagaatttctgccacctgaagtaaaccaattgcttcaggatgtattgaaaataaaacctgatgtaaaacaagactctagtaacactccaaataaaggcttgccacttcattgtgaccagtcatttcaaaaacacgagagagaaggcaaaattgttgaatcttcgaaagatttcaaagtgcaaggcatcttcccagttccacctggcagtgtgggtattaatgtgcctacaaatgatttgaatttgaaatttggaaaagaaaaacaagtgtcatcaataccacaagatgtgagagattcagagaagatgcctagaatttcaggttttggcacattacttaagactcagtcagatgcgataataacacagcagcttgtaaaagacaaactacgagccaccacacaaaatttaggttctttttatatgcagagtccacttttaaattcagaacaaaaaaaaactataattgttcagacttcaaaaggattcttaataccattgaacattactaacaagcctgggctaccagttattcctggaaatgcacttccattggttaattcacaaggtatccctgcttctctttttgtaaacaagaaacctgggatggttttaacacttaataatgggaaacttgaaggtgtttccgctgtcaaaaccgagggtgccccagctcgtggaactgtgactaaggagccttgcaaaacacctattttgaaggtagaaccaaacaataattgtcttacacctggactttgttccagcattggcagttgtttgagcatgaaaagtagctcagaaaatactttgccattaaaaggcccttacattttgaaaccaacgagttctgtgaaagctgttcttattcctaacatgctatctgagcaacagagcactaagttgaatatctccgattcagtaaaacagcagaatgagatttttccaaaaccacctctttataccttcttgcctgatggcaaacaagctgtttttttaaagtgtgtgatgccaaataaaactgagctgcttaagcccaaattagtccaaaatagtacttatcaaaatatacagccaaagaaacctgaaggaacaccacaaagaatattgctgaaaatttttaaccctgttttaaatgtgactgctgctaataatctgtcagtaagcaactctgcatcctcattgcaaaaagacaacgtaccatctaatcagattataggaggagagcagaaagagccagaatctagagatgccttacccttcttactagatgacttaatgccagcaaatgaaattgtgataacttctactgcaacatgcccagaatcttctgaggaaccaatatgtgtcagtgactgttcagagtccagggtattaaggtgtaaaacaaattgtagaattgagaggaacttcaatagaaaaaagacttccaaaaaaattttttcaaaaacaaaaactcatggaagtaaagactctgaaactgcctttgtatctagaaacagaaactgtaaacgaaagtgtagggatagttaccaagaacctccaagaagaaaagcaacattgcatagaaagtgtaaagaaaaggcaaaacctgaagatgtccgtgaaacatttggatttagcagacctaggctttcaaaagattccatcagaactttgcggcttttcccttttagttctaaacagcttgtgaaatgtcctaggagaaaccaaccagttgtagttttgaatcatcctgacgcagatgcaccagaagtagtaagtgtaatgaaaactattgctaaatttaatggacatgtacttaaggtttcattgtcaaaaagaactataaatgctttactgaaaccagtttgttataaccctcctaaaacaacttacgatgatttttccaagaggcacaaaacatttaaacctgttagttctgtgaaagaaagatttgtgctaaaattaacactcaaaaagacaagcaaaaacaattaccagattgtgaagactacctctgaaaatattttgaaggctaaatttaactgttggttttgtggtagagtatttgacaatcaggatacttgggctggtcatgggcagagacatttaatggaagctactcgggattggaacatgttagaatagtttaccataattaccaaggaaaagaaaagtaaaattaccttagaagaaaacaacgggttcagttaccataatgcagacattttctacttcagtatagtacctgaaatcgaacattttaaaagttgattgtatttctgtggaagagtaaaagttgtatgtatgatatttgaaaatgctatccctgcactcaaaagttttgaaagaaactaatcacagcacagaagtaccttgatttaattttttaaacgtgttctcgggaagttagggctaaagaaaattttgataaaacaattttcccactttagttctttagtgactcttagtagagggtaatggctgacacccccattccctctcttcttccaccagccttatgcatctaagtgtagctcctctggagatggagagctctttcatcgtagaactgaaggagtttctcacatttgtgaagatactttgagagaacctgggtaaagaagtcactctatatctgctaaatatagttattttgaaggatattaggctccttgaaagtacatttaactcactacagttacacctcatacaatgcttgaagagtttttggcaagtaaattttttttccagttgaactctgtcacttgttagagattgggaacactctcccaaggtgattttctttttctaagtgactgtgtcaaatgttgcagtagatgggcagcttcaagagaagaatttaaactctttgtctcattgaaagtttggttaaagaacttgaacatatttctaaatttgattatattctctgatgatccctttgcacagaactatgcttatctcatgtttgtcctccataaacaaatggccatttttttcttcttggttcccatccctttaaaaagagtggaacataggagcacttccaagggagtggcttttcttgaaaattaaaattgtttaccaaaacagtattttgaagcaagatcatatttttgtctgtattcactttattatttgaacatgtccaaattaggacaaagcatttctgttagctgcttctcagtgtgactgacaacccaaaacatatatacagattgttggcatttgcaaaaggaagcatcaatagtggacccagaggcagtgcataaaaccttaggatagattcctaagggacatgcccaacagagttttaaaatggatgttttcatgatgacaacagaatcatagatttagatttttcaccttgtaagtttggatcaaattttgctggttctttggataatggagttcttgtgttaacaaattacgtgctatatgattttttgttacattgttacaagtgttaatgacattttcattaatggatgaaaacttcagggcttcttttctgtatataacaaattaagtctgtacatatttttgtaccttttatgtaaattttgcacagaaatttttggcataagtttattttctttcagtttagttcagtgcatgcactaataaaactggttgtttaatttaaaaggaatatataagactttacccatgttattttcttggtttttatttcagatgtagattttgtttttgaggtaaattcgttcttcagggattgaacactattgttagcaagtgcctaaaaaagatgtgaaacagtttacatatgtcaactgtaacagtaggtcccaaatgggcccattcccctaatagttttatttttaaagaaagccatacatagaatgcttcaagctatcttgctatgcacattatacttgtactgttttgtgcagtttgtctactttcttagtgaagtattttttgtataaaatgttacaattgtgtttcttaaattgagcctaagaatggagttaattggaaatatacagtatatattaataatgtacatggtgtttaaagaatggtaagcattgttaatttctgtaatgaacattttcaattaaatttatcttgtttgtgttta

SEQ ID NO: 442148 - DNA, 6822 bp, Homo sapiens
gcaaatgaaaaagttaatagtatatggataaaccacatgtgtgtaattggaacttcttaggattctaagatttttaaaatcttgtttaaaaactgtattatcaccttaatataaaaatcttagcgcttgagcgtacttacccaactgtggttttctttagatgaggaaactgaggtccagagaagttgaagttttcccaaggtcacacagcagagctggaactagagcttgcatttcctgacttccagattagtgttatttttacttcaaactattacttcttggtgagttattgtgggaaaaatcctgtatattgaagatgtctctacacagtatcgtttcctgtttaaattacagataacttcaagagttttcagaaaaaaagaaattgggacttttttggttaaatcatgccatctgaacagaaacagttattttgtgatgaaaaacaaactactttaaaaaaagattatgatgtgaaaaatgagatagttgataggtcggcacctaaaccaaaaatttcaggaagtattcattatgcactaaaaaatgtgaaaattgatttgccaaaaataaatattccaaatgaagtcctattgaaacatgaagttgacaaatacagaaaattatttcagagtaaacagcagactgcaagaaaatctatcagtataaagactgtaagctgtgtagaggagtgtacattgcttcataagtctgagagagctgaagaagagggtgtaaaaatgtctgcaaaaatactcaatttcagctgtttaaaatgccgagacaacactcgatatagcccaaatgatttgcagaaacactttcaaatgtggcaccatggcgaattaccttcatatccttgtgaaatgtgcaacttttcagcaaatgactttcaggtatttaaacaacacagacgaacccatagaagcactttagtaaaatgtgacatttgtaacaatgagagtgtatatactttactgaacttgacaaagcatttcacatccacacattgtgttaatggtaattttcaatgtgaaaagtgtaagttctccacccaggatgttggcacatttgttcagcacattcatagacataatgaaattcattataagtgtggtaaatgtcatcatgtatgttttaccaaaggagagcttcagaagcaccttcatattcattctggtacttttcccttcacttgtcaatattgtagctatggtgccaccaggagagaacaccttgtaagacatgttataactttgcacaaagaacatttatatgcaaaagaaaaactggaaaaagacaaatatgaaaaaagaatggcaaagacttctgcaggacttaagctaatactgaaaagatataaaataggtgcatcaaggaagacgttctggaaacgtaagaaaattaacagtggaagtgacagaagtatagaaaagaacactcaagtgcttaagaaaatgaacaaaacacagactaaatctgaagaccagagccatgttgttcaagagcatttaagtgaagaaaaggatgaaagactacactgtgagaataatgataaagcccctgaatcagagtcagagaagccaactcctctgtccactgggcaaggtaatagagctgaagagggaccaaacgctagttcaggtttcatgaagactgctgtactaggacctacactgaaaaatgtaatgatgaaaaataataaactagcagtttcccctaactataatgctacgtttatgggcttcaagatgatggatggaaaacagcatattgtattaaaattggtgcctatcaaacaaaatgtatgttcaccaggctcacagtcaggtgctgcaaaggacggtactgctaatttgcagccccagactttggacactaatggatttttaacaggagtaacaactgagttaaatgacacagtttatatgaaagcagctactccattttcatgttcatcttctatactttcagggaaagcaagttcagaaaaagaaatgactttgatatctcaaaggaataatatgcttcaaacaatggattatgagaaaagtgtatcttctttgtcagcaacatcagaattggttacagcatcagtgaatttgaccacaaaatttgaaacaagagataatgttgacttctggggaaatcatctcactcagagtcaccccgaggtattaggtaccaccattaaaagtccagataaagtcaactgtgttgccaaaccaaatgcatacaacagtggagatatgcataattattgcattaattatggcaactgtgagttacctgttgaatcctccaaccaaggatcattaccttttcataattactcaaaagtgaataattctaataaacgtcgtaggttttcaggaacagcagtgtatgaaaaccctcaaagagaatcttcatccagcaaaacagttgtccaacaaccaattagtgaatcatttttatcactagtgaggcaggagagctcaaaaccagatagcctattagcatctattagccttttaaatgataaagatggaactttaaaagcaaaatctgaaattgaagaacagtatgttttagaaaaaggacaaaacattgatggacaaaacctgtacagtaatgaaaatcaaaatttagagtgtgcgactgaaaaatctaaatgggaagacttttctaatgtcgattcacctatgatgcctagaatcacatctgttttctctctccagagccaacaggcatcagaatttctgccacctgaagtaaaccaattgcttcaggatgtattgaaaataaaacctgatgtaaaacaagactctagtaacactccaaataaaggcttgccacttcattgtgaccagtcatttcaaaaacacgagagagaaggcaaaattgttgaatcttcgaaagatttcaaagtgcaaggcatcttcccagttccacctggcagtgtgggtattaatgtgcctacaaatgatttgaatttgaaatttggaaaagaaaaacaagtgtcatcaataccacaagatgtgagagattcagagaagatgcctagaatttcaggttttggcacattacttaagactcagtcagatgcgataataacacagcagcttgtaaaagacaaactacgagccaccacacaaaatttaggttctttttatatgcagagtccacttttaaattcagaacaaaaaaaaactataattgttcagacttcaaaaggattcttaataccattgaacattactaacaagcctgggctaccagttattcctggaaatgcacttccattggttaattcacaaggtatccctgcttctctttttgtaaacaagaaacctgggatggttttaacacttaataatgggaaacttgaaggtgtttccgctgtcaaaaccgagggtgccccagctcgtggaactgtgactaaggagccttgcaaaacacctattttgaaggtagaaccaaacaataattgtcttacacctggactttgttccagcattggcagttgtttgagcatgaaaagtagctcagaaaatactttgccattaaaaggcccttacattttgaaaccaacgagttctgtgaaagctgttcttattcctaacatgctatctgagcaacagagcactaagttgaatatctccgattcagtaaaacagcagaatgagatttttccaaaaccacctctttataccttcttgcctgatggcaaacaagctgtttttttaaagtgtgtgatgccaaataaaactgagctgcttaagcccaaattagtccaaaatagtacttatcaaaatatacagccaaagaaacctgaaggaacaccacaaagaatattgctgaaaatttttaaccctgttttaaatgtgactgctgctaataatctgtcagtaagcaactctgcatcctcattgcaaaaagacaacgtaccatctaatcagattataggaggagagcagaaagagccagaatctagagatgccttacccttcttactagatgacttaatgccagcaaatgaaattgtgataacttctactgcaacatgcccagaatcttctgaggaaccaatatgtgtcagtgactgttcagagtccagggtattaaggtgtaaaacaaattgtagaattgagaggaacttcaatagaaaaaagacttccaaaaaaattttttcaaaaacaaaaactcatggaagtaaagactctgaaactgcctttgtatctagaaacagaaactgtaaacgaaagtgtagggatagttaccaagaacctccaagaagaaaagcaacattgcatagaaagtgtaaagaaaaggcaaaacctgaagatgtccgtgaaacatttggatttagcagacctaggctttcaaaagattccatcagaactttgcggcttttcccttttagttctaaacagcttgtgaaatgtcctaggagaaaccaaccagttgtagttttgaatcatcctgacgcagatgcaccagaagtagtaagtgtaatgaaaactattgctaaatttaatggacatgtacttaaggtttcattgtcaaaaagaactataaatgctttactgaaaccagtttgttataaccctcctaaaacaacttacgatgatttttccaagaggcacaaaacatttaaacctgttagttctgtgaaagaaagatttgtgctaaaattaacactcaaaaagacaagcaaaaacaattaccagattgtgaagactacctctgaaaatattttgaaggctaaatttaactgttggttttgtggtagagtatttgacaatcaggatacttgggctggtcatgggcagagacatttaatggaagctactcgggattggaacatgttagaatagtttaccataattaccaaggaaaagaaaagtaaaattaccttagaagaaaacaacgggttcagttaccataatgcagacattttctacttcagtatagtacctgaaatcgaacattttaaaagttgattgtatttctgtggaagagtaaaagttgtatgtatgatatttgaaaatgctatccctgcactcaaaagttttgaaagaaactaatcacagcacagaagtaccttgatttaattttttaaacgtgttctcgggaagttagggctaaagaaaattttgataaaacaattttcccactttagttctttagtgactcttagtagagggtaatggctgacacccccattccctctcttcttccaccagccttatgcatctaagtgtagctcctctggagatggagagctctttcatcgtagaactgaaggagtttctcacatttgtgaagatactttgagagaacctgggtaaagaagtcactctatatctgctaaatatagttattttgaaggatattaggctccttgaaagtacatttaactcactacagttacacctcatacaatgcttgaagagtttttggcaagtaaattttttttccagttgaactctgtcacttgttagagattgggaacactctcccaaggtgattttctttttctaagtgactgtgtcaaatgttgcagtagatgggcagcttcaagagaagaatttaaactctttgtctcattgaaagtttggttaaagaacttgaacatatttctaaatttgattatattctctgatgatccctttgcacagaactatgcttatctcatgtttgtcctccataaacaaatggccatttttttcttcttggttcccatccctttaaaaagagtggaacataggagcacttccaagggagtggcttttcttgaaaattaaaattgtttaccaaaacagtattttgaagcaagatcatatttttgtctgtattcactttattatttgaacatgtccaaattaggacaaagcatttctgttagctgcttctcagtgtgactgacaacccaaaacatatatacagattgttggcatttgcaaaaggaagcatcaatagtggacccagaggcagtgcataaaaccttaggatagattcctaagggacatgcccaacagagttttaaaatggatgttttcatgatgacaacagaatcatagatttagatttttcaccttgtaagtttggatcaaattttgctggttctttggataatggagttcttgtgttaacaaattacgtgctatatgattttttgttacattgttacaagtgttaatgacattttcattaatggatgaaaacttcagggcttcttttctgtatataacaaattaagtctgtacatatttttgtaccttttatgtaaattttgcacagaaatttttggcataagtttattttctttcagtttagttcagtgcatgcactaataaaactggttgtttaatttaaaaggaatatataagactttacccatgttattttcttggtttttatttcagatgtagattttgtttttgaggtaaattcgttcttcagggattgaacactattgttagcaagtgcctaaaaaagatgtgaaacagtttacatatgtcaactgtaacagtaggtcccaaatgggcccattcccctaatagttttatttttaaagaaagccatacatagaatgcttcaagctatcttgctatgcacattatacttgtactgttttgtgcagtttgtctactttcttagtgaagtattttttgtataaaatgttacaattgtgtttcttaaattgagcctaagaatggagttaattggaaatatacagtatatattaataatgtacatggtgtttaaagaatggtaagcattgttaatttctgtaatgaacattttcaattaaatttatcttgtttgtgttta

SEQ ID NO: 442149 - DNA, 5793 bp, Homo sapiens
gagaccattcccagtcagcaagggcttgggaagtgcatacagttcctgctcctggtgtctactctgaagagcacagagtagacgtttgtctgccatttcaccggcagtaagatcagcagctgctggtgagcaaagaggtagtagtgggtcactggactggtgggcgccggggccgcgcgctagatggagaggtcagcggcgaacccagctccatggcctagtctcgtcagaccgagcgcggaccctgccggcctccgttctcttccgcttgtctcaggtaaagcgcagatccctccgccgcagcgtgcgctcccggtagcgctgcgatcagcttttcggcaatacccggatggaagtgtaatggccgccatcagggactcgcaggcaatgggtactacgacaggtattccccgtcagcgggactgcccagaccttttaggatgtcagaacttctagagggccacccagcaggcaaacggcgagtttgtggaccgtcagggtcccccaaacaggtccagggatccgcctcttgtgagaggaagcgcgagttaaatagtcccggccattcagcgcttccgcttaacttgccgcaaagtttttctggagaagtcggggtttttttgccgagcgcttttgccgactgctagagcttacccttactttcttaacctggggttgttttacttccgggctttttgaactctacactctcctacattctaggagctgggtgggagtaggagacggtgtgcctccgcgctccccgcggggcagccgaaccccggaggaaggggcggatcgggcgcggtgtttggggcgaagctgggcgcgcggcgctcgaagcactcactcggcgggtttcgtggttggtggagacagcaagggcgccccgcagaccgcacccctcgagctataggttcgcaggcccgactcgacggcgtccctattgctggcccagcgtatggtcattgggggccatttcttgcagagatgccctgctccctgacgcgctcgctcttctccagagttggccaaaggtgctcttccccgcagaccctaaccacacccagtggcagttggatttctttgtaactggctttctcacatatatcatctcttcttttgatcactgttcctgattgtgacattgtgcaagtgttaaattgtgtgccttttgttcctgaagaaagaggtcctgggatctttgaaatgctaagattcttggataccacagtatcataaaattcctctaaatgcattggtgctagcaatcccctactctgtctggcctctggatctagcttgaagttctggattcatttccttcttccttgtacctcagcctgagccttctgtcacccaaagggctccagctggtttttcactcaggcctcactttatcttccaagatgaaggaactgagacacagaggttgagacttgtctaaagtaacatgaccagtaagtgcttgaattaatgcagatgaggaaactgaggtccagagaagttgaagttttcccaaggtcacacagcagagctggaactagagcttgcatttcctgacttccagattagtgttatttttacttcaaactattacttcttgataacttcaagagttttcagaaaaaaagaaattgggacttttttggttaaatcatgccatctgaacagaaacagttattttgtgatgaaaaacaaactactttaaaaaaagattatgatgtgaaaaatgagatagttgataggtcggcacctaaaccaaaaatttcaggaagtattcattatgcactaaaaaatgtgaaaattgatttgccaaaaataaatattccaaatgaagtcctattgaaacatgaagttgacaaatacagaaaattatttcagagtaaacagcagactgcaagaaaatctatcagtataaagactgtaagctgtgtagaggagtgtacattgcttcataagtctgagagagctgaagaagagggtgtaaaaatgtctgcaaaaatactcaatttcagctgtttaaaatgccgagacaacactcgatatagcccaaatgatttgcagaaacactttcaaatgtggcaccatggcgaattaccttcatatccttgtgaaatgtgcaacttttcagcaaatgactttcaggtatttaaacaacacagacgaacccatagaagcactttagtaaaatgtgacatttgtaacaatgagagtgtatatactttactgaacttgacaaagcatttcacatccacacattgtgttaatggtaattttcaatgtgaaaagtgtaagttctccacccaggatgttggcacatttgttcagcacattcatagacataatgaaattcattataagtgtggtaaatgtcatcatgtatgttttaccaaaggagagcttcagaagcaccttcatattcattctggtacttttcccttcacttgtcaatattgtagctatggtgccaccaggagagaacaccttgtaagacatgttataactttgcacaaagaacatttatatgcaaaagaaaaactggaaaaagacaaatatgaaaaaagaatggcaaagacttctgcaggacttaagctaatactgaaaagatataaaataggtgcatcaaggaagacgttctggaaacgtaagaaaattaacagtggaagtgacagaagtatagaaaagaacactcaagtgcttaagaaaatgaacaaaacacagactaaatctgaagaccagagccatgttgttcaagagcatttaagtgaagaaaaggatgaaagactacactgtgagaataatgataaagcccctgaatcagagtcagagaagccaactcctctgtccactgggcaaggtaatagagctgaagagggaccaaacgctagttcaggtttcatgaagactgctgtactaggacctacactgaaaaatgtaatgatgaaaaataataaactagcagtttcccctaactataatgctacgtttatgggcttcaagatgatggatggaaaacagcatattgtattaaaattggtgcctatcaaacaaaatgtatgttcaccaggctcacagtcaggtgctgcaaaggacggtactgctaatttgcagccccagactttggacactaatggatttttaacaggagtaacaactgagttaaatgacacagtttatatgaaagcagctactccattttcatgttcatcttctatactttcagggaaagcaagttcagaaaaagaaatgactttgatatctcaaaggaataatatgcttcaaacaatggattatgagaaaagtgtatcttctttgtcagcaacatcagaattggttacagcatcagtgaatttgaccacaaaatttgaaacaagagataatgttgacttctggggaaatcatctcactcagagtcaccccgaggtattaggtaccaccattaaaagtccagataaagtcaactgtgttgccaaaccaaatgcatacaacagtggagatatgcataattattgcattaattatggcaactgtgagttacctgttgaatcctccaaccaaggatcattaccttttcataattactcaaaagtgaataattctaataaacgtcgtaggttttcaggaacagcagtgtatgaaaaccctcaaagagaatcttcatccagcaaaacagttgtccaacaaccaattagtgaatcatttttatcactagtgaggcaggagagctcaaaaccagatagcctattagcatctattagccttttaaatgataaagatggaactttaaaagcaaaatctgaaattgaagaacagtatgttttagaaaaaggacaaaacattgatggacaaaacctgtacagtaatgaaaatcaaaatttagagtgtgcgactgaaaaatctaaatgggaagacttttctaatgtcgattcacctatgatgcctagaatcacatctgttttctctctccagagccaacaggcatcagaatttctgccacctgaagtaaaccaattgcttcaggatgtattgaaaataaaacctgatgtaaaacaagactctagtaacactccaaataaaggcttgccacttcattgtgaccagtcatttcaaaaacacgagagagaaggcaaaattgttgaatcttcgaaagatttcaaagtgcaaggcatcttcccagttccacctggcagtgtgggtattaatgtgcctacaaatgatttgaatttgaaatttggaaaagaaaaacaagtgtcatcaataccacaagatgtgagagattcagagaagatgcctagaatttcaggttttggcacattacttaagactcagtcagatgcgataataacacagcagcttgtaaaagacaaactacgagccaccacacaaaatttaggttctttttatatgcagagtccacttttaaattcagaacaaaaaaaaactataattgttcagacttcaaaaggattcttaataccattgaacattactaacaagcctgggctaccagttattcctggaaatgcacttccattggttaattcacaaggtatccctgcttctctttttgtaaacaagaaacctgggatggttttaacacttaataatgggaaacttgaaggtgtttccgctgtcaaaaccgagggtgccccagctcgtggaactgtgactaaggagccttgcaaaacacctattttgaaggtagaaccaaacaataattgtcttacacctggactttgttccagcattggcagttgtttgagcatgaaaagtagctcagaaaatactttgccattaaaaggcccttacattttgaaaccaacgagttctgtgaaagctgttcttattcctaacatgctatctgagcaacagagcactaagttgaatatctccgattcagtaaaacagcagaatgagatttttccaaaaccacctctttataccttcttgcctgatggcaaacaagctgtttttttaaagtgtgtgatgccaaataaaactgagctgcttaagcccaaattagtccaaaatagtacttatcaaaatatacagccaaagaaacctgaaggaacaccacaaagaatattgctgaaaatttttaaccctgttttaaatgtgactgctgctaataatctgtcagtaagcaactctgcatcctcattgcaaaaagacaacgtaccatctaatcagattataggaggagagcagaaagagccagaatctagagatgccttacccttcttactagatgacttaatgccagcaaatgaaattgtgataacttctactgcaacatgcccagaatcttctgaggaaccaatatgtgtcagtgactgttcagagtccagggtattaaggtgtaaaacaaattgtagaattgagaggaacttcaatagaaaaaagacttccaaaaaaattttttcaaaaacaaaaactcatggaagtaaagactctgaaactgcctttgtatctagaaacagaaactgtaaacgaaagtgtagggatagttaccaagaacctccaagaagaaaagcaacattgcatagaaagtgtaaagaaaaggcaaaacctgaagatgtccgtgaaacatttggatttagcagacctaggctttcaaaagattccatcagaactttgcggcttttcccttttagttctaaacagcttgtgaaatgtcctaggagaaaccaaccagttgtagttttgaatcatcctgtggcagtgtgcttccgcggaagcacactgcaacattaatgcaaagaaacaagagaacactcagttactttcact

SEQ ID NO: 442150 - DNA, 1985 bp, Homo sapiens
gagaccattcccagtcagcaagggcttgggaagtgcatacagttcctgctcctggtgtctactctgaagagcacagagtagacgtttgtctgccatttcaccggcagtaagatcagcagctgctggtgagcaaagaggtagtagtgggtcactggactggtgggcgccggggccgcgcgctagatggagaggtcagcggcgaacccagctccatggcctagtctcgtcagaccgagcgcggaccctgccggcctccgttctcttccgcttgtctcaggtaaagcgcagatccctccgccgcagcgtgcgctcccggtagcgctgcgatcagcttttcggcaatacccggatggaagtgtaatggccgccatcagggactcgcaggcaatgggtactacgacaggtattccccgtcagcgggactgcccagaccttttaggatgtcagaacttctagagggccacccagcaggcaaacggcgagtttgtggaccgtcagggtcccccaaacaggtccagggatccgcctcttgtgagaggaagcgcgagttaaatagtcccggccattcagcgcttccgcttaacttgccgcaaagtttttctggagaagtcggggtttttttgccgagcgcttttgccgactgctagagcttacccttactttcttaacctggggttgttttacttccgggctttttgaactctacactctcctacattctaggagctgggtgggagtaggagacggtgtgcctccgcgctccccgcggggcagccgaaccccggaggaaggggcggatcgggcgcggtgtttggggcgaagctgggcgcgcggcgctcgaagcactcactcggcgggtttcgtggttggtggagacagcaagggcgccccgcagaccgcacccctcgagctataggttcgcaggcccgactcgacggcgtccctattgctggcccagcgtatggtcattgggggccatttcttgcagagatgccctgctccctgacgcgctcgctcttctccagagttggccaaaggtgctcttccccgcagaccctaaccacacccagtggcagttggatttctttgtaactggctttctcacatatatcatctcttcttttgatcactgttcctgattgtgacattgtgcaagtgttaaattgtgtgccttttgttcctgaagaaagaggtcctgggatctttgaaatgctaagattcttggataccacagtatcataaaattcctctaaatgcaagtctcgctgtgtcgcccaagctgaagtacagtggcgtgatcccggctcactgccaacctctgccacccgggttcaagtgattctcatgtctcagcctcctgagtagctgggattacaggcacccgcaaccatgcccggctaactttttgtatttttagtacagatggggtttcgccatgttggccaggctgttcttgaactcctaacctcaggtgatccgcccgctttggcctcgcaaagtgttgggattacaagcatgagccaccgctcccagccgtgatttctgacctatgtatgttaacattaccagttccttggctcctcactttttatttggattgtcactctagttgcttaatttcctcatttctatttttactctttctccagtttatcttgctgtctagtacccttctaatatttctaatgtactgcttttataacttttttctgttcttaaattaacaattgcttctgtttacctttcatttccagttcagatctgtcctctatagtctgttctcacttaacctccccatcatgcattctctttttcatctagaccctgtggtaccttaggagaaaaatacttttcttccattgtttctttattctgttcttgtggtttagattgcctttgcttctttcttacatgttttaagtcctgctactctttaaagggtcctcacaaaacctacctttctgtgaagtaaacacagtcatcgt

SEQ ID NO: 442151 - DNA, 1610 bp, Homo sapiens
gagaccattcccagtcagcaagggcttgggaagtgcatacagttcctgctcctggtgtctactctgaagagcacagagtagacgtttgtctgccatttcaccggcagtaagatcagcagctgctggtgagcaaagaggtagtagtgggtcactggactggtgggcgccggggccgcgcgctagatggagaggtcagcggcgaacccagctccatggcctagtctcgtcagaccgagcgcggaccctgccggcctccgttctcttccgcttgtctcaggtaaagcgcagatccctccgccgcagcgtgcgctcccggtagcgctgcgatcagcttttcggcaatacccggatggaagtgtaatggccgccatcagggactcgcaggcaatgggtactacgacaggtattccccgtcagcgggactgcccagaccttttaggatgtcagaacttctagagggccacccagcaggcaaacggcgagtttgtggaccgtcagggtcccccaaacaggtccagggatccgcctcttgtgagaggaagcgcgagttaaatagtcccggccattcagcgcttccgcttaacttgccgcaaagtttttctggagaagtcggggtttttttgccgagcgcttttgccgactgctagagcttacccttactttcttaacctggggttgttttacttccgggctttttgaactctacactctcctacattctaggagctgggtgggagtaggagacggtgtgcctccgcgctccccgcggggcagccgaaccccggaggaaggggcggatcgggcgcggtgtttggggcgaagctgggcgcgcggcgctcgaagcactcactcggcgggtttcgtggttggtggagacagcaagggcgccccgcagaccgcacccctcgagctataggttcgcaggcccgactcgacggcgtccctattgctggcccagcgtatggtcattgggggccatttcttgcagagatgccctgctccctgacgcgctcgctcttctccagagttggccaaaggtgctcttccccgcagaccctaaccacacccagtggcagttggatttctttgtaactggctttctcacatatatcatctcttcttttgatcactgttcctgattgtgacattgtgcaagtgttaaattgtgtgccttttgttcctgaagaaagaggtatggtaaagattgaaatactggagtatatagtctattaagtagtaagttggtatgttttaatattggactaaataaagtaaaatataggttaagtatcccaaatccaaaaatccagaatgcaaaattttttgagtgctgacatgatggtcaaaggaaatgctctttggaacattttggattttgaatttttggatttgagatgctcaactggtataatgcaaatactctaaaatcctaaaaaagaaaaagaaaaaaagaatgaaacccttctgttcccaagcatttcaaataagagacactcaacctgtagttttacatatacatgagttttcataagttatataagttatagttttattttattttttggctaaaataaaatacttaaacatgagttttcattttaatctaagca

SEQ ID NO: 442152 - DNA, 7316 bp, Homo sapiens
gagaccattcccagtcagcaagggcttgggaagtgcatacagttcctgctcctggtgtctactctgaagagcacagagtagacgtttgtctgccatttcaccggcagtaagatcagcagctgctggtgagcaaagaggtagtagtgggtcactggactggtgggcgccggggccgcgcgctagatggagaggtcagcggcgaacccagctccatggcctagtctcgtcagaccgagcgcggaccctgccggcctccgttctcttccgcttgtctcaggtaaagcgcagatccctccgccgcagcgtgcgctcccggtagcgctgcgatcagcttttcggcaatacccggatggaagtgtaatggccgccatcagggactcgcaggcaatgggtactacgacagatatcatctcttcttttgatcactgttcctgattgtgacattgtgcaagtgttaaattgtgtgccttttgttcctgaagaaagagatgtctcctactctttgtgttggataggtcctgggatctttgaaatgctaagattcttggataccacagtatcataaaattcctctaaatgcaatgaaggaactgagacacagaggttgagacttgtctaaagtaacatgaccagtaagtgcttgaattaatgcagatgaggaaactgaggtccagagaagttgaagttttcccaaggtcacacagcagagctggaactagagcttgcatttcctgacttccagattagtgttatttttacttcaaactattacttcttggtgagttattgtgggaaaaatcctgtatattgaagatgtctctacacagtatcgtttcctgtttaaattacagataacttcaagagttttcagaaaaaaagaaattgggacttttttggttaaatcatgccatctgaacagaaacagttattttgtgatgaaaaacaaactactttaaaaaaagattatgatgtgaaaaatgagatagttgataggtcggcacctaaaccaaaaatttcaggaagtattcattatgcactaaaaaatgtgaaaattgatttgccaaaaataaatattccaaatgaagtcctattgaaacatgaagttgacaaatacagaaaattatttcagagtaaacagcagactgcaagaaaatctatcagtataaagactgtaagctgtgtagaggagtgtacattgcttcataagtctgagagagctgaagaagagggtgtaaaaatgtctgcaaaaatactcaatttcagctgtttaaaatgccgagacaacactcgatatagcccaaatgatttgcagaaacactttcaaatgtggcaccatggcgaattaccttcatatccttgtgaaatgtgcaacttttcagcaaatgactttcaggtatttaaacaacacagacgaacccatagaagcactttagtaaaatgtgacatttgtaacaatgagagtgtatatactttactgaacttgacaaagcatttcacatccacacattgtgttaatggtaattttcaatgtgaaaagtgtaagttctccacccaggatgttggcacatttgttcagcacattcatagacataatgaaattcattataagtgtggtaaatgtcatcatgtatgttttaccaaaggagagcttcagaagcaccttcatattcattctggtacttttcccttcacttgtcaatattgtagctatggtgccaccaggagagaacaccttgtaagacatgttataactttgcacaaagaacatttatatgcaaaagaaaaactggaaaaagacaaatatgaaaaaagaatggcaaagacttctgcaggacttaagctaatactgaaaagatataaaataggtgcatcaaggaagacgttctggaaacgtaagaaaattaacagtggaagtgacagaagtatagaaaagaacactcaagtgcttaagaaaatgaacaaaacacagactaaatctgaagaccagagccatgttgttcaagagcatttaagtgaagaaaaggatgaaagactacactgtgagaataatgataaagcccctgaatcagagtcagagaagccaactcctctgtccactgggcaaggtaatagagctgaagagggaccaaacgctagttcaggtttcatgaagactgctgtactaggacctacactgaaaaatgtaatgatgaaaaataataaactagcagtttcccctaactataatgctacgtttatgggcttcaagatgatggatggaaaacagcatattgtattaaaattggtgcctatcaaacaaaatgtatgttcaccaggctcacagtcaggtgctgcaaaggacggtactgctaatttgcagccccagactttggacactaatggatttttaacaggagtaacaactgagttaaatgacacagtttatatgaaagcagctactccattttcatgttcatcttctatactttcagggaaagcaagttcagaaaaagaaatgactttgatatctcaaaggaataatatgcttcaaacaatggattatgagaaaagtgtatcttctttgtcagcaacatcagaattggttacagcatcagtgaatttgaccacaaaatttgaaacaagagataatgttgacttctggggaaatcatctcactcagagtcaccccgaggtattaggtaccaccattaaaagtccagataaagtcaactgtgttgccaaaccaaatgcatacaacagtggagatatgcataattattgcattaattatggcaactgtgagttacctgttgaatcctccaaccaaggatcattaccttttcataattactcaaaagtgaataattctaataaacgtcgtaggttttcaggaacagcagtgtatgaaaaccctcaaagagaatcttcatccagcaaaacagttgtccaacaaccaattagtgaatcatttttatcactagtgaggcaggagagctcaaaaccagatagcctattagcatctattagccttttaaatgataaagatggaactttaaaagcaaaatctgaaattgaagaacagtatgttttagaaaaaggacaaaacattgatggacaaaacctgtacagtaatgaaaatcaaaatttagagtgtgcgactgaaaaatctaaatgggaagacttttctaatgtcgattcacctatgatgcctagaatcacatctgttttctctctccagagccaacaggcatcagaatttctgccacctgaagtaaaccaattgcttcaggatgtattgaaaataaaacctgatgtaaaacaagactctagtaacactccaaataaaggcttgccacttcattgtgaccagtcatttcaaaaacacgagagagaaggcaaaattgttgaatcttcgaaagatttcaaagtgcaaggcatcttcccagttccacctggcagtgtgggtattaatgtgcctacaaatgatttgaatttgaaatttggaaaagaaaaacaagtgtcatcaataccacaagatgtgagagattcagagaagatgcctagaatttcaggttttggcacattacttaagactcagtcagatgcgataataacacagcagcttgtaaaagacaaactacgagccaccacacaaaatttaggttctttttatatgcagagtccacttttaaattcagaacaaaaaaaaactataattgttcagacttcaaaaggattcttaataccattgaacattactaacaagcctgggctaccagttattcctggaaatgcacttccattggttaattcacaaggtatccctgcttctctttttgtaaacaagaaacctgggatggttttaacacttaataatgggaaacttgaaggtgtttccgctgtcaaaaccgagggtgccccagctcgtggaactgtgactaaggagccttgcaaaacacctattttgaaggtagaaccaaacaataattgtcttacacctggactttgttccagcattggcagttgtttgagcatgaaaagtagctcagaaaatactttgccattaaaaggcccttacattttgaaaccaacgagttctgtgaaagctgttcttattcctaacatgctatctgagcaacagagcactaagttgaatatctccgattcagtaaaacagcagaatgagatttttccaaaaccacctctttataccttcttgcctgatggcaaacaagctgtttttttaaagtgtgtgatgccaaataaaactgagctgcttaagcccaaattagtccaaaatagtacttatcaaaatatacagccaaagaaacctgaaggaacaccacaaagaatattgctgaaaatttttaaccctgttttaaatgtgactgctgctaataatctgtcagtaagcaactctgcatcctcattgcaaaaagacaacgtaccatctaatcagattataggaggagagcagaaagagccagaatctagagatgccttacccttcttactagatgacttaatgccagcaaatgaaattgtgataacttctactgcaacatgcccagaatcttctgaggaaccaatatgtgtcagtgactgttcagagtccagggtattaaggtgtaaaacaaattgtagaattgagaggaacttcaatagaaaaaagacttccaaaaaaattttttcaaaaacaaaaactcatggaagtaaagactctgaaactgcctttgtatctagaaacagaaactgtaaacgaaagtgtagggatagttaccaagaacctccaagaagaaaagcaacattgcatagaaagtgtaaagaaaaggcaaaacctgaagatgtccgtgaaacatttggatttagcagacctaggctttcaaaagattccatcagaactttgcggcttttcccttttagttctaaacagcttgtgaaatgtcctaggagaaaccaaccagttgtagttttgaatcatcctgacgcagatgcaccagaagtagtaagtgtaatgaaaactattgctaaatttaatggacatgtacttaaggtttcattgtcaaaaagaactataaatgctttactgaaaccagtttgttataaccctcctaaaacaacttacgatgatttttccaagaggcacaaaacatttaaacctgttagttctgtgaaagaaagatttgtgctaaaattaacactcaaaaagacaagcaaaaacaattaccagattgtgaagactacctctgaaaatattttgaaggctaaatttaactgttggttttgtggtagagtatttgacaatcaggatacttgggctggtcatgggcagagacatttaatggaagctactcgggattggaacatgttagaatagtttaccataattaccaaggaaaagaaaagtaaaattaccttagaagaaaacaacgggttcagttaccataatgcagacattttctacttcagtatagtacctgaaatcgaacattttaaaagttgattgtatttctgtggaagagtaaaagttgtatgtatgatatttgaaaatgctatccctgcactcaaaagttttgaaagaaactaatcacagcacagaagtaccttgatttaattttttaaacgtgttctcgggaagttagggctaaagaaaattttgataaaacaattttcccactttagttctttagtgactcttagtagagggtaatggctgacacccccattccctctcttcttccaccagccttatgcatctaagtgtagctcctctggagatggagagctctttcatcgtagaactgaaggagtttctcacatttgtgaagatactttgagagaacctgggtaaagaagtcactctatatctgctaaatatagttattttgaaggatattaggctccttgaaagtacatttaactcactacagttacacctcatacaatgcttgaagagtttttggcaagtaaattttttttccagttgaactctgtcacttgttagagattgggaacactctcccaaggtgattttctttttctaagtgactgtgtcaaatgttgcagtagatgggcagcttcaagagaagaatttaaactctttgtctcattgaaagtttggttaaagaacttgaacatatttctaaatttgattatattctctgatgatccctttgcacagaactatgcttatctcatgtttgtcctccataaacaaatggccatttttttcttcttggttcccatccctttaaaaagagtggaacataggagcacttccaagggagtggcttttcttgaaaattaaaattgtttaccaaaacagtattttgaagcaagatcatatttttgtctgtattcactttattatttgaacatgtccaaattaggacaaagcatttctgttagctgcttctcagtgtgactgacaacccaaaacatatatacagattgttggcatttgcaaaaggaagcatcaatagtggacccagaggcagtgcataaaaccttaggatagattcctaagggacatgcccaacagagttttaaaatggatgttttcatgatgacaacagaatcatagatttagatttttcaccttgtaagtttggatcaaattttgctggttctttggataatggagttcttgtgttaacaaattacgtgctatatgattttttgttacattgttacaagtgttaatgacattttcattaatggatgaaaacttcagggcttcttttctgtatataacaaattaagtctgtacatatttttgtaccttttatgtaaattttgcacagaaatttttggcataagtttattttctttcagtttagttcagtgcatgcactaataaaactggttgtttaatttaaaaggaatatataagactttacccatgttattttcttggtttttatttcagatgtagattttgtttttgaggtaaattcgttcttcagggattgaacactattgttagcaagtgcctaaaaaagatgtgaaacagtttacatatgtcaactgtaacagtaggtcccaaatgggcccattcccctaatagttttatttttaaagaaagccatacatagaatgcttcaagctatcttgctatgcacattatacttgtactgttttgtgcagtttgtctactttcttagtgaagtattttttgtataaaatgttacaattgtgtttcttaaattgagcctaagaatggagttaattggaaatatacagtatatattaataatgtacatggtgtttaaagaatggtaagcattgttaatttctgtaatgaacattttcaattaaatttatcttgtttgtgttta

SEQ ID NO: 442153 - DNA, 8293 bp, Homo sapiens
gagaccattcccagtcagcaagggcttgggaagtgcatacagttcctgctcctggtgtctactctgaagagcacagagtagacgtttgtctgccatttcaccggcagtaagatcagcagctgctggtgagcaaagaggtagtagtgggtcactggactggtgggcgccggggccgcgcgctagatggagaggtcagcggcgaacccagctccatggcctagtctcgtcagaccgagcgcggaccctgccggcctccgttctcttccgcttgtctcaggtaaagcgcagatccctccgccgcagcgtgcgctcccggtagcgctgcgatcagcttttcggcaatacccggatggaagtgtaatggccgccatcagggactcgcaggcaatgggtactacgacaggtattccccgtcagcgggactgcccagaccttttaggatgtcagaacttctagagggccacccagcaggcaaacggcgagtttgtggaccgtcagggtcccccaaacaggtccagggatccgcctcttgtgagaggaagcgcgagttaaatagtcccggccattcagcgcttccgcttaacttgccgcaaagtttttctggagaagtcggggtttttttgccgagcgcttttgccgactgctagagcttacccttactttcttaacctggggttgttttacttccgggctttttgaactctacactctcctacattctaggagctgggtgggagtaggagacggtgtgcctccgcgctccccgcggggcagccgaaccccggaggaaggggcggatcgggcgcggtgtttggggcgaagctgggcgcgcggcgctcgaagcactcactcggcgggtttcgtggttggtggagacagcaagggcgccccgcagaccgcacccctcgagctataggttcgcaggcccgactcgacggcgtccctattgctggcccagcgtatggtcattgggggccatttcttgcagagatgccctgctccctgacgcgctcgctcttctccagagttggccaaaggtgctcttccccgcagaccctaaccacacccagtggcagttggatttctttgtaactggctttctcacatatatcatctcttcttttgatcactgttcctgattgtgacattgtgcaagtgttaaattgtgtgccttttgttcctgaagaaagaggtcctgggatctttgaaatgctaagattcttggataccacagtatcataaaattcctctaaatgcattggtgctagcaatcccctactctgtctggcctctggatctagcttgaagttctggattcatttccttcttccttgtacctcagcctgagccttctgtcacccaaagggctccagctggtttttcactcaggcctcactttatcttccaagatgaaggaactgagacacagaggttgagacttgtctaaagtaacatgaccagtaagtgcttgaattaatgcagatgaggaaactgaggtccagagaagttgaagttttcccaaggtcacacagcagagctggaactagagcttgcatttcctgacttccagattagtgttatttttacttcaaactattacttcttgataacttcaagagttttcagaaaaaaagaaattgggacttttttggttaaatcatgccatctgaacagaaacagttattttgtgatgaaaaacaaactactttaaaaaaagattatgatgtgaaaaatgagatagttgataggtcggcacctaaaccaaaaatttcaggaagtattcattatgcactaaaaaatgtgaaaattgatttgccaaaaataaatattccaaatgaagtcctattgaaacatgaagttgacaaatacagaaaattatttcagagtaaacagcagactgcaagaaaatctatcagtataaagactgtaagctgtgtagaggagtgtacattgcttcataagtctgagagagctgaagaagagggtgtaaaaatgtctgcaaaaatactcaatttcagctgtttaaaatgccgagacaacactcgatatagcccaaatgatttgcagaaacactttcaaatgtggcaccatggcgaattaccttcatatccttgtgaaatgtgcaacttttcagcaaatgactttcaggtatttaaacaacacagacgaacccatagaagcactttagtaaaatgtgacatttgtaacaatgagagtgtatatactttactgaacttgacaaagcatttcacatccacacattgtgttaatggtaattttcaatgtgaaaagtgtaagttctccacccaggatgttggcacatttgttcagcacattcatagacataatgaaattcattataagtgtggtaaatgtcatcatgtatgttttaccaaaggagagcttcagaagcaccttcatattcattctggtacttttcccttcacttgtcaatattgtagctatggtgccaccaggagagaacaccttgtaagacatgttataactttgcacaaagaacatttatatgcaaaagaaaaactggaaaaagacaaatatgaaaaaagaatggcaaagacttctgcaggacttaagctaatactgaaaagatataaaataggtgcatcaaggaagacgttctggaaacgtaagaaaattaacagtggaagtgacagaagtatagaaaagaacactcaagtgcttaagaaaatgaacaaaacacagactaaatctgaagaccagagccatgttgttcaagagcatttaagtgaagaaaaggatgaaagactacactgtgagaataatgataaagcccctgaatcagagtcagagaagccaactcctctgtccactgggcaaggtaatagagctgaagagggaccaaacgctagttcaggtttcatgaagactgctgtactaggacctacactgaaaaatgtaatgatgaaaaataataaactagcagtttcccctaactataatgctacgtttatgggcttcaagatgatggatggaaaacagcatattgtattaaaattggtgcctatcaaacaaaatgtatgttcaccaggctcacagtcaggtgctgcaaaggacggtactgctaatttgcagccccagactttggacactaatggatttttaacaggagtaacaactgagttaaatgacacagtttatatgaaagcagctactccattttcatgttcatcttctatactttcagggaaagcaagttcagaaaaagaaatgactttgatatctcaaaggaataatatgcttcaaacaatggattatgagaaaagtgtatcttctttgtcagcaacatcagaattggttacagcatcagtgaatttgaccacaaaatttgaaacaagagataatgttgacttctggggaaatcatctcactcagagtcaccccgaggtattaggtaccaccattaaaagtccagataaagtcaactgtgttgccaaaccaaatgcatacaacagtggagatatgcataattattgcattaattatggcaactgtgagttacctgttgaatcctccaaccaaggatcattaccttttcataattactcaaaagtgaataattctaataaacgtcgtaggttttcaggaacagcagtgtatgaaaaccctcaaagagaatcttcatccagcaaaacagttgtccaacaaccaattagtgaatcatttttatcactagtgaggcaggagagctcaaaaccagatagcctattagcatctattagccttttaaatgataaagatggaactttaaaagcaaaatctgaaattgaagaacagtatgttttagaaaaaggacaaaacattgatggacaaaacctgtacagtaatgaaaatcaaaatttagagtgtgcgactgaaaaatctaaatgggaagacttttctaatgtcgattcacctatgatgcctagaatcacatctgttttctctctccagagccaacaggcatcagaatttctgccacctgaagtaaaccaattgcttcaggatgtattgaaaataaaacctgatgtaaaacaagactctagtaacactccaaataaaggcttgccacttcattgtgaccagtcatttcaaaaacacgagagagaaggcaaaattgttgaatcttcgaaagatttcaaagtgcaaggcatcttcccagttccacctggcagtgtgggtattaatgtgcctacaaatgatttgaatttgaaatttggaaaagaaaaacaagtgtcatcaataccacaagatgtgagagattcagagaagatgcctagaatttcaggttttggcacattacttaagactcagtcagatgcgataataacacagcagcttgtaaaagacaaactacgagccaccacacaaaatttaggttctttttatatgcagagtccacttttaaattcagaacaaaaaaaaactataattgttcagacttcaaaaggattcttaataccattgaacattactaacaagcctgggctaccagttattcctggaaatgcacttccattggttaattcacaaggtatccctgcttctctttttgtaaacaagaaacctgggatggttttaacacttaataatgggaaacttgaaggtgtttccgctgtcaaaaccgagggtgccccagctcgtggaactgtgactaaggagccttgcaaaacacctattttgaaggtagaaccaaacaataattgtcttacacctggactttgttccagcattggcagttgtttgagcatgaaaagtagctcagaaaatactttgccattaaaaggcccttacattttgaaaccaacgagttctgtgaaagctgttcttattcctaacatgctatctgagcaacagagcactaagttgaatatctccgattcagtaaaacagcagaatgagatttttccaaaaccacctctttataccttcttgcctgatggcaaacaagctgtttttttaaagtgtgtgatgccaaataaaactgagctgcttaagcccaaattagtccaaaatagtacttatcaaaatatacagccaaagaaacctgaaggaacaccacaaagaatattgctgaaaatttttaaccctgttttaaatgtgactgctgctaataatctgtcagtaagcaactctgcatcctcattgcaaaaagacaacgtaccatctaatcagattataggaggagagcagaaagagccagaatctagagatgccttacccttcttactagatgacttaatgccagcaaatgaaattgtgataacttctactgcaacatgcccagaatcttctgaggaaccaatatgtgtcagtgactgttcagagtccagggtattaaggtgtaaaacaaattgtagaattgagaggaacttcaatagaaaaaagacttccaaaaaaattttttcaaaaacaaaaactcatggaagtaaagactctgaaactgcctttgtatctagaaacagaaactgtaaacgaaagtgtagggatagttaccaagaacctccaagaagaaaagcaacattgcatagaaagtgtaaagaaaaggcaaaacctgaagatgtccgtgaaacatttggatttagcagacctaggctttcaaaagattccatcagaactttgcggcttttcccttttagttctaaacagcttgtgaaatgtcctaggagaaaccaaccagttgtagttttgaatcatcctgacgcagatgcaccagaagtagtaagtgtaatgaaaactattgctaaatttaatggacatgtacttaaggtttcattgtcaaaaagaactataaatgctttactgaaaccagtttgttataaccctcctaaaacaacttacgatgatttttccaagaggcacaaaacatttaaacctgttagttctgtgaaagaaagatttgtgctaaaattaacactcaaaaagacaagcaaaaacaattaccagattgtgaagactacctctgaaaatattttgaaggctaaatttaactgttggttttgtggtagagtatttgacaatcaggatacttgggctggtcatgggcagagacatttaatggaagctactcgggattggaacatgttagaatagtttaccataattaccaaggaaaagaaaagtaaaattaccttagaagaaaacaacgggttcagttaccataatgcagacattttctacttcagtatagtacctgaaatcgaacattttaaaagttgattgtatttctgtggaagagtaaaagttgtatgtatgatatttgaaaatgctatccctgcactcaaaagttttgaaagaaactaatcacagcacagaagtaccttgatttaattttttaaacgtgttctcgggaagttagggctaaagaaaattttgataaaacaattttcccactttagttctttagtgactcttagtagagggtaatggctgacacccccattccctctcttcttccaccagccttatgcatctaagtgtagctcctctggagatggagagctctttcatcgtagaactgaaggagtttctcacatttgtgaagatactttgagagaacctgggtaaagaagtcactctatatctgctaaatatagttattttgaaggatattaggctccttgaaagtacatttaactcactacagttacacctcatacaatgcttgaagagtttttggcaagtaaattttttttccagttgaactctgtcacttgttagagattgggaacactctcccaaggtgattttctttttctaagtgactgtgtcaaatgttgcagtagatgggcagcttcaagagaagaatttaaactctttgtctcattgaaagtttggttaaagaacttgaacatatttctaaatttgattatattctctgatgatccctttgcacagaactatgcttatctcatgtttgtcctccataaacaaatggccatttttttcttcttggttcccatccctttaaaaagagtggaacataggagcacttccaagggagtggcttttcttgaaaattaaaattgtttaccaaaacagtattttgaagcaagatcatatttttgtctgtattcactttattatttgaacatgtccaaattaggacaaagcatttctgttagctgcttctcagtgtgactgacaacccaaaacatatatacagattgttggcatttgcaaaaggaagcatcaatagtggacccagaggcagtgcataaaaccttaggatagattcctaagggacatgcccaacagagttttaaaatggatgttttcatgatgacaacagaatcatagatttagatttttcaccttgtaagtttggatcaaattttgctggttctttggataatggagttcttgtgttaacaaattacgtgctatatgattttttgttacattgttacaagtgttaatgacattttcattaatggatgaaaacttcagggcttcttttctgtatataacaaattaagtctgtacatatttttgtaccttttatgtaaattttgcacagaaatttttggcataagtttattttctttcagtttagttcagtgcatgcactaataaaactggttgtttaatttaaaaggaatatataagactttacccatgttattttcttggtttttatttcagatgtagattttgtttttgaggtaaattcgttcttcagggattgaacactattgttagcaagtgcctaaaaaagatgtgaaacagtttacatatgtcaactgtaacagtaggtcccaaatgggcccattcccctaatagttttatttttaaagaaagccatacatagaatgcttcaagctatcttgctatgcacattatacttgtactgttttgtgcagtttgtctactttcttagtgaagtattttttgtataaaatgttacaattgtgtttcttaaattgagcctaagaatggagttaattggaaatatacagtatatattaataatgtacatggtgtttaaagaatggtaagcattgttaatttctgtaatgaacattttcaattaaatttatcttgtttgtgtttaaaaaaaaaaaaaaacaaaaaaaaaaaaaaaaaaaaaaaaaaaaaaaaaaacaaagaaaaaacagaaagaggaggccgccaataaataatatttactaacagagggacacatagactataacagtcgacaccagctcattttttgactaaagatggtgcccaatatatacgcgcccgatattactcaagcagacgcgcgaccggtatgaatacatcgacagat

SEQ ID NO: 442154 - DNA, 9059 bp, Homo sapiens
gagaccattcccagtcagcaagggcttgggaagtgcatacagttcctgctcctggtgtctactctgaagagcacagagtagacgtttgtctgccatttcaccggcagtaagatcagcagctgctggtgagcaaagaggtagtagtgggtcactggactggtgggcgccggggccgcgcgctagatggagaggtcagcggcgaacccagctccatggcctagtctcgtcagaccgagcgcggaccctgccggcctccgttctcttccgcttgtctcaggtaaagcgcagatccctccgccgcagcgtgcgctcccggtagcgctgcgatcagcttttcggcaatacccggatggaagtgtaatggccgccatcagggactcgcaggcaatgggtactacgacaggtattccccgtcagcgggactgcccagaccttttaggatgtcagaacttctagagggccacccagcaggcaaacggcgagtttgtggaccgtcagggtcccccaaacaggtccagggatccgcctcttgtgagaggaagcgcgagttaaatagtcccggccattcagcgcttccgcttaacttgccgcaaagtttttctggagaagtcggggtttttttgccgagcgcttttgccgactgctagagcttacccttactttcttaacctggggttgttttacttccgggctttttgaactctacactctcctacattctaggagctgggtgggagtaggagacggtgtgcctccgcgctccccgcggggcagccgaaccccggaggaaggggcggatcgggcgcggtgtttggggcgaagctgggcgcgcggcgctcgaagcactcactcggcgggtttcgtggttggtggagacagcaagggcgccccgcagaccgcacccctcgagctataggttcgcaggcccgactcgacggcgtccctattgctggcccagcgtatggtcattgggggccatttcttgcagagatgccctgctccctgacgcgctcgctcttctccagagttggccaaaggtgctcttccccgcagaccctaaccacacccagtggcagttggatttctttgtaactggctttctcacatatatcatctcttcttttgatcactgttcctgattgtgacattgtgcaagtgttaaattgtgtgccttttgttcctgaagaaagaggtcctgggatctttgaaatgctaagattcttggataccacagtatcataaaattcctctaaatgcattggtgctagcaatcccctactctgtctggcctctggatctagcttgaagttctggattcatttccttcttccttgtacctcagcctgagccttctgtcacccaaagggctccagctggtttttcactcaggcctcactttatcttccaagatgaaggaactgagacacagaggttgagacttgtctaaagtaacatgaccagtaagtgcttgaattaatgcagatgaggaaactgaggtccagagaagttgaagttttcccaaggtcacacagcagagctggaactagagcttgcatttcctgacttccagattagtgttatttttacttcaaactattacttcttgataacttcaagagttttcagaaaaaaagaaattgggacttttttggttaaatcatgccatctgaacagaaacagttattttgtgatgaaaaacaaactactttaaaaaaagattatgatgtgaaaaatgagatagttgataggtcggcacctaaaccaaaaatttcaggaagtattcattatgcactaaaaaatgtgaaaattgatttgccaaaaataaatattccaaatgaagtcctattgaaacatgaagttgacaaatacagaaaattatttcagagtaaacagcagactgcaagaaaatctatcagtataaagactgtaagctgtgtagaggagtgtacattgcttcataagtctgagagagctgaagaagagggtgtaaaaatgtctgcaaaaatactcaatttcagctgtttaaaatgccgagacaacactcgatatagcccaaatgatttgcagaaacactttcaaatgtggcaccatggcgaattaccttcatatccttgtgaaatgtgcaacttttcagcaaatgactttcaggtatttaaacaacacagacgaacccatagaagcactttagtaaaatgtgacatttgtaacaatgagagtgtatatactttactgaacttgacaaagcatttcacatccacacattgtgttaatggtaattttcaatgtgaaaagtgtaagttctccacccaggatgttggcacatttgttcagcacattcatagacataatgaaattcattataagtgtggtaaatgtcatcatgtatgttttaccaaaggagagcttcagaagcaccttcatattcattctggtacttttcccttcacttgtcaatattgtagctatggtgccaccaggagagaacaccttgtaagacatgttataactttgcacaaagaacatttatatgcaaaagaaaaactggaaaaagacaaatatgaaaaaagaatggcaaagacttctgcaggacttaagctaatactgaaaagatataaaataggtgcatcaaggaagacgttctggaaacgtaagaaaattaacagtggaagtgacagaagtatagaaaagaacactcaagtgcttaagaaaatgaacaaaacacagactaaatctgaagaccagagccatgttgttcaagagcatttaagtgaagaaaaggatgaaagactacactgtgagaataatgataaagcccctgaatcagagtcagagaagccaactcctctgtccactgggcaaggtaatagagctgaagagggaccaaacgctagttcaggtttcatgaagactgctgtactaggacctacactgaaaaatgtaatgatgaaaaataataaactagcagtttcccctaactataatgctacgtttatgggcttcaagatgatggatggaaaacagcatattgtattaaaattggtgcctatcaaacaaaatgtatgttcaccaggctcacagtcaggtgctgcaaaggacggtactgctaatttgcagccccagactttggacactaatggatttttaacaggagtaacaactgagttaaatgacacagtttatatgaaagcagctactccattttcatgttcatcttctatactttcagggaaagcaagttcagaaaaagaaatgactttgatatctcaaaggaataatatgcttcaaacaatggattatgagaaaagtgtatcttctttgtcagcaacatcagaattggttacagcatcagtgaatttgaccacaaaatttgaaacaagagataatgttgacttctggggaaatcatctcactcagagtcaccccgaggtattaggtaccaccattaaaagtccagataaagtcaactgtgttgccaaaccaaatgcatacaacagtggagatatgcataattattgcattaattatggcaactgtgagttacctgttgaatcctccaaccaaggatcattaccttttcataattactcaaaagtgaataattctaataaacgtcgtaggttttcaggaacagcagtgtatgaaaaccctcaaagagaatcttcatccagcaaaacagttgtccaacaaccaattagtgaatcatttttatcactagtgaggcaggagagctcaaaaccagatagcctattagcatctattagccttttaaatgataaagatggaactttaaaagcaaaatctgaaattgaagaacagtatgttttagaaaaaggacaaaacattgatggacaaaacctgtacagtaatgaaaatcaaaatttagagtgtgcgactgaaaaatctaaatgggaagacttttctaatgtcgattcacctatgatgcctagaatcacatctgttttctctctccagagccaacaggcatcagaatttctgccacctgaagtaaaccaattgcttcaggatgtattgaaaataaaacctgatgtaaaacaagactctagtaacactccaaataaaggcttgccacttcattgtgaccagtcatttcaaaaacacgagagagaaggcaaaattgttgaatcttcgaaagatttcaaagtgcaaggcatcttcccagttccacctggcagtgtgggtattaatgtgcctacaaatgatttgaatttgaaatttggaaaagaaaaacaagtgtcatcaataccacaagatgtgagagattcagagaagatgcctagaatttcaggttttggcacattacttaagactcagtcagatgcgataataacacagcagcttgtaaaagacaaactacgagccaccacacaaaatttaggttctttttatatgcagagtccacttttaaattcagaacaaaaaaaaactataattgttcagacttcaaaaggattcttaataccattgaacattactaacaagcctgggctaccagttattcctggaaatgcacttccattggttaattcacaaggtatccctgcttctctttttgtaaacaagaaacctgggatggttttaacacttaataatgggaaacttgaaggtgtttccgctgtcaaaaccgagggtgccccagctcgtggaactgtgactaaggagccttgcaaaacacctattttgaaggtagaaccaaacaataattgtcttacacctggactttgttccagcattggcagttgtttgagcatgaaaagtagctcagaaaatactttgccattaaaaggcccttacattttgaaaccaacgagttctgtgaaagctgttcttattcctaacatgctatctgagcaacagagcactaagttgaatatctccgattcagtaaaacagcagaatgagatttttccaaaaccacctctttataccttcttgcctgatggcaaacaagctgtttttttaaagtgtgtgatgccaaataaaactgagctgcttaagcccaaattagtccaaaatagtacttatcaaaatatacagccaaagaaacctgaaggaacaccacaaagaatattgctgaaaatttttaaccctgttttaaatgtgactgctgctaataatctgtcagtaagcaactctgcatcctcattgcaaaaagacaacgtaccatctaatcagattataggaggagagcagaaagagccagaatctagagatgccttacccttcttactagatgacttaatgccagcaaatgaaattgtgataacttctactgcaacatgcccagaatcttctgaggaaccaatatgtgtcagtgactgttcagagtccagggtattaaggtgtaaaacaaattgtagaattgagaggaacttcaatagaaaaaagacttccaaaaaaattttttcaaaaacaaaaactcatggaagtaaagactctgaaactgcctttgtatctagaaacagaaactgtaaacgaaagtgtagggatagttaccaagaacctccaagaagaaaagcaacattgcatagaaagtgtaaagaaaaggcaaaacctgaagatgtccgtgaaacatttggatttagcagacctaggctttcaaaagattccatcagaactttgcggcttttcccttttagttctaaacagcttgtgaaatgtcctaggagaaaccaaccagttgtagttttgaatcatcctgacgcagatgcaccagaagtagtaagtgtaatgaaaactattgctaaatttaatggacatgtacttaaggtttcattgtcaaaaagaactataaatgctttactgaaaccagtttgttataaccctcctaaaacaacttacgatgatttttccaagaggcacaaaacatttaaacctgttagttctgtgaaagaaagatttgtgctaaaattaacactcaaaaagacaagcaaaaacaattaccagattgtgaagactacctctgaaaatattttgaaggctaaatttaactgttggttttgtggtagagtatttgacaatcaggatacttgggctggtcatgggcagagacatttaatggaagctactcgggattggaacatgttagaatagtttaccataattaccaaggaaaagaaaagtaaaattaccttagaagaaaacaacgggttcagttaccataatgcagacattttctacttcagtatagtacctgaaatcgaacattttaaaagttgattgtatttctgtggaagagtaaaagttgtatgtatgatatttgaaaatgctatccctgcactcaaaagttttgaaagaaactaatcacagcacagaagtaccttgatttaattttttaaacgtgttctcgggaagttagggctaaagaaaattttgataaaacaattttcccactttagttctttagtgactcttagtagagggtaatggctgacacccccattccctctcttcttccaccagccttatgcatctaagtgtagctcctctggagatggagagctctttcatcgtagaactgaaggagtttctcacatttgtgaagatactttgagagaacctgggtaaagaagtcactctatatctgctaaatatagttattttgaaggatattaggctccttgaaagtacatttaactcactacagttacacctcatacaatgcttgaagagtttttggcaagtaaattttttttccagttgaactctgtcacttgttagagattgggaacactctcccaaggtgattttctttttctaagtgactgtgtcaaatgttgcagtagatgggcagcttcaagagaagaatttaaactctttgtctcattgaaagtttggttaaagaacttgaacatatttctaaatttgattatattctctgatgatccctttgcacagaactatgcttatctcatgtttgtcctccataaacaaatggccatttttttcttcttggttcccatccctttaaaaagagtggaacataggagcacttccaagggagtggcttttcttgaaaattaaaattgtttaccaaaacagtattttgaagcaagatcatatttttgtctgtattcactttattatttgaacatgtccaaattaggacaaagcatttctgttagctgcttctcagtgtgactgacaacccaaaacatatatacagattgttggcatttgcaaaaggaagcatcaatagtggacccagaggcagtgcataaaaccttaggatagattcctaagggacatgcccaacagagttttaaaatggatgttttcatgatgacaacagaatcatagatttagatttttcaccttgtaagtttggatcaaattttgctggttctttggataatggagttcttgtgttaacaaattacgtgctatatgattttttgttacattgttacaagtgttaatgacattttcattaatggatgaaaacttcagggcttcttttctgtatataacaaattaagtctgtacatatttttgtaccttttatgtaaattttgcacagaaatttttggcataagtttattttctttcagtttagttcagtgcatgcactaataaaactggttgtttaatttaaaaggaatatataagactttacccatgttattttcttggtttttatttcagatgtagattttgtttttgaggtaaattcgttcttcagggattgaacactattgttagcaagtgcctaaaaaagatgtgaaacagtttacatatgtcaactgtaacagtaggtcccaaatgggcccattcccctaatagttttatttttaaagaaagccatacatagaatgcttcaagctatcttgctatgcacattatacttgtactgttttgtgcagtttgtctactttcttagtgaagtattttttgtataaaatgttacaattgtgtttcttaaattgagcctaagaatggagttaattggaaatatacagtatatattaataatgtacatggtgtttaaagaatggtaagcattgttaatttctgtaatgaacattttcaattaaatttatcttgtttgtgtttacacaataatttttttactgtgctaaaatctgatggaaattttgttctctaggaaatacagattttaaagtgtatgtgttttttcaatgctagttaactctacaagatagataaaagtgtgggattttttttcttcccaaaatcatagatgatatattgtttaagaaaggtaacatataccataattttactatggttatgctggcaaggtgagccatagagaggcttatagtcttcagtaccctaacagcaataaaattaaaatgctctgtttgttacatatagatctgttatgagacatcacctgctgtaaatagcaaggagagagaaggaactttcctgctaatattcgcagcactataacattacatttcagaatagccatatcaggaaaataatgtcgagatatgtacttcttgcctttaagttttaacagccatttaaagtaagctttgtgctccagatattctagttggaactttttctgattttaaaagcctgtatcctttattttttgtgtgtggctttccaaagagggctttccaaaatatgattttcagtagttcgaggttcttattacaattgaagagttagttttagttttgcagttgaatttctgtgtgaggaatttgttttattttttctagtttgtccatctccactgaaatgggtttcttactatttggcaagtacttaaaaaacataattcagttttcaaagaatttatcttgctaagtattcagtaacacaaattgaaatgtaatagtttttttaatggaaaatattttcattggggggttagcaaattttttcaataaagggtcagataaataagcttcgtaggccttctagtttctgtcctaactactcaattctcataatgcagaaaaaaaccatagacaatatgtaaatgaattagtgtggctatgttttaataaaacaatttataaaaacaggaagtgggctgaatttggcccaccagacatagt

SEQ ID NO: 442155 - DNA, 112 bp, Homo sapiens
gtgatccacctgcctcggcctcccaaagtgctgggattacaggtgtgagccacagcgcccagccttatggactgtttatgtgatcagtaagctcccggtcagcagtacgctg

SEQ ID NO: 442156 - DNA, 3791 bp, Homo sapiens
ggcacgagtttttttcttcctggtggcgtttgggcttaatacagctttggcgaggtcggatgacgggtgggagccagcggtggaaggggtggcgaaagtaccggtttgccccaggccgccgaggggcctccttagagagaccttgcctgctccgctcgcgtccgccggggccgcgcgggtcctcctggcgccgccaggttcaaaaagccactcgagttgtcactgcgacggccctgggccaggagccgtttcgggatctgtcaaacaacgagttttcgtcgttcgaatcaggttgactgtggtccttcatccccccaatctcccgtacctggcgagtccagctcgtcgcggataccgttaaccctggataaagagaatggaggttacctctgtccgtgtagattcctaagctgtcctggagtgatccttggagtaaaggaaaggtgctttgaagcacattcagccatcagccctgtgggatggcagccactgatttgtcctatggtctttacagggacccagtctgccttcaagaaaagacagaagtagaaagggtggtggctgactgtctgacaaattgttatcaggtatgcaggaagtatatccttctccaaaatatcatacttgcatcaccaggtagacacatttccttctacacagaattatcttcagagcttcttaaagcaaataaagcctgcttcaaggactgagtccctagtcgaattcccggaaggagtggagcctgtcatattggtgagggtttgccttgaatgtcatcccagtatttcaatattgattaattagtcttccctcatggtcccaactgcatagtttttattttgttgagtgttctgacacatggtaagggacatgaaagtatcctttgagataatctttccattcatcagtgtttatctagcatctgctcaagagtgtgctgcagtggagggaaatcagatgacctcccagtctggttgtgttacatacaatcatgtgtaagaagtgccattcaagccgtgtcactggaggggactgacagtgagtgagtgtggatagagaggacctcctggggtgggcaatgtgagccctcagactctgtaggtattgcattttgcagtgaacactggtagacatgttttgtggctcaagccagcatgtgtgtgatggtttaggattcagtgacttttgatgatctggctgtggacttcaccccagaagaatggactttactggacccaactcagagaaacctctacagagatgtgatgctggagaactacaagaatttggccacagtaggatatcagctcttcaaacccagtctgatctcttggctggaacaagaagagtctaggacagtgcagagaggtgatttccaagcttcagaatggaaagtgcaacttaaaaccaaagagttagcccttcagcaggatgttttgggggagccaacctccagtgggattcaaatgataggaagccacaacggaggggaggtcagtgatgttaagcaatgtggagatgtctccagtgaacactcatgccttaagacacatgtgagaactcaaaatagtgagaacacatttgagtgttatctgtatggagtagacttccttactctgcacaagaaaacctctactggagagcaacgttctgtatttagtcagtgtggaaaagccttcagcctgaacccagatgttgtttgccagagaacgtgcacaggagagaaagcttttgattgcagtgactctgggaaatccttcattaatcattcacaccttcagggacatttaagaactcacaatggagaaagtctccatgaatggaaggaatgtgggagaggctttattcactccacagaccttgctgtgcgtatacaaactcacaggtcagaaaaaccctacaaatgtaaggaatgtggaaaaggatttagatattctgcataccttaatattcacatgggaacccacactggagacaatccctatgagtgtaaggagtgtgggaaagccttcaccaggtcttgtcaacttactcagcacagaaaaactcacactggagagaaaccttataaatgtaaggattgtgggagagccttcactgtttcctcttgcttaagtcaacatatgaaaatccatgtgggtgagaagccttatgaatgcaaggaatgtgggatagccttcactagatcttctcaacttactgaacatttaaaaactcacactgcaaaggatccctttgaatgtaagatatgtggaaaatcctttagaaattcctcatgcctcagtgatcactttcgaattcacactggaataaaaccctataaatgtaaggattgtgggaaagccttcactcagaactcagaccttactaagcatgcacgaactcacagtggagagaggccctatgaatgtaaggaatgtggaaaggcctttgccagatcctctcgccttagtgaacatacaagaactcacactggagagaagccttttgaatgtgtcaaatgtgggaaagcctttgctatttcttcaaatcttagtggacatttgagaattcacactggagagaagccctttgagtgcctggaatgtggtaaagcatttacgcattcctccagtcttaataatcacatgcggacccacagcgccaaaaaaccattcacgtgtatggaatgtggcaaagcctttaagtttcccacgtgtgttaaccttcacatgcggatccacactggagaaaaaccctacaaatgtaaacagtgtgggaaatccttcagttactccaattcgtttcagttacatgaacgaactcacactggagagaaaccctatgaatgtaaggagtgcgggaaagccttcagttcttccagttcctttcgaaatcatgaaagaaggcatgcggatgagagactgtcagcataaggaatgtgggaaaacctaaaggtgtccctgttctctctgaagacatgaaaactcactggggagaaaccctatgaatgtaaaaatgtggaagcaactttgtatctcaggtcttaatgaacacatatgaattcacagtggagaagaccctgcatcagggaatgtggaaatgactttgctgaattctcaagccttaccaaacacatcagaaatctcactggagagaaaccgtatgaatgtagagaatctgggaatacctttctgaatcccacaaaccttaatgtgtgtatgtgaactcacattggagagaaaccctgcaatttaaatggtatggtctggatgatgccccactccatatttgtaagccctaagtcctagttccttacactataactgtatttggacatagggttttcaaacaggtgagtaacttcaaatgaggttgttgggttcgatccctaatctgacatcactggtgtccctataagggaaactgaaggaaggatacacatggagaagactgtgtggatccaccagaagatggccatctacaagccaaggacagagacctggaacagatgctttcattatggcctccagaggaaaccaaccctgtctccaccttgatattgcacttccaggctccagaactgtgaggcaataaatttctcttggttaaatcattcagtctgttattttgtacagcaaccctaggaaactaatactgtgaggaacttgggaaaagctttagatcaagcttgtccaacccgcaggccaggatggctttgaatgcagaccaacacaaatttttaagctttcttcaaacataataaatttagggttgatgcataataatttagggttgaagtcctcgagaac

SEQ ID NO: 442157 - DNA, 3372 bp, Homo sapiens
ggcacgagtttttttcttcctggtggcgtttgggcttaatacagctttggcgaggtcggatgacgggtgggagccagcggtggaaggggtggcgaaagtaccggtttgccccaggccgccgaggggcctccttagagagaccttgcctgctccgctcgcgtccgccggggccgcgcgggtcctcctggcgccgccaggttcaaaaagccactcgagttgtcactgcgacggccctgggccaggagccgtttcgggatctgtcaaacaacgagttttcgtcgttcgaatcaggttgactgtggtccttcatccccccaatctcccgtacctggcgagtccagctcgtcgcggataccgttaaccctggataaagagaatggaggttacctctgtccgtgtagattcctaagctgtcctggagtgatccttggagtaaaggaaaggtgctttgaagcacattcagccatcagccctgtgggatggcagccactgatttgtcctatggtctttacagggacccagtctgccttcaagaaaagacagaagtagaaagggtggtggctgactgtctgacaaattgttatcaggtatgcaggaagtatatccttctccaaaatatcatacttgcatcaccaggtagacacatttccttctacacagaattatcttcagagcttcttaaagcaaataaagcctgcttcaaggactgagtccctagtcgaattcccggaaggagtggagcctgtcatattggattcagtgacttttgatgatctggctgtggacttcaccccagaagaatggactttactggacccaactcagagaaacctctacagagatgtgatgctggagaactacaagaatttggccacagtaggatatcagctcttcaaacccagtctgatctcttggctggaacaagaagagtctaggacagtgcagagaggtgatttccaagcttcagaatggaaagtgcaacttaaaaccaaagagttagcccttcagcaggatgttttgggggagccaacctccagtgggattcaaatgataggaagccacaacggaggggaggtcagtgatgttaagcaatgtggagatgtctccagtgaacactcatgccttaagacacatgtgagaactcaaaatagtgagaacacatttgagtgttatctgtatggagtagacttccttactctgcacaagaaaacctctactggagagcaacgttctgtatttagtcagtgtggaaaagccttcagcctgaacccagatgttgtttgccagagaacgtgcacaggagagaaagcttttgattgcagtgactctgggaaatccttcattaatcattcacaccttcagggacatttaagaactcacaatggagaaagtctccatgaatggaaggaatgtgggagaggctttattcactccacagaccttgctgtgcgtatacaaactcacaggtcagaaaaaccctacaaatgtaaggaatgtggaaaaggatttagatattctgcataccttaatattcacatgggaacccacactggagacaatccctatgagtgtaaggagtgtgggaaagccttcaccaggtcttgtcaacttactcagcacagaaaaactcacactggagagaaaccttataaatgtaaggattgtgggagagccttcactgtttcctcttgcttaagtcaacatatgaaaatccatgtgggtgagaagccttatgaatgcaaggaatgtgggatagccttcactagatcttctcaacttactgaacatttaaaaactcacactgcaaaggatccctttgaatgtaagatatgtggaaaatcctttagaaattcctcatgcctcagtgatcactttcgaattcacactggaataaaaccctataaatgtaaggattgtgggaaagccttcactcagaactcagaccttactaagcatgcacgaactcacagtggagagaggccctatgaatgtaaggaatgtggaaaggcctttgccagatcctctcgccttagtgaacatacaagaactcacactggagagaagccttttgaatgtgtcaaatgtgggaaagcctttgctatttcttcaaatcttagtggacatttgagaattcacactggagagaagccctttgagtgcctggaatgtggtaaagcatttacgcattcctccagtcttaataatcacatgcggacccacagcgccaaaaaaccattcacgtgtatggaatgtggcaaagcctttaagtttcccacgtgtgttaaccttcacatgcggatccacactggagaaaaaccctacaaatgtaaacagtgtgggaaatccttcagttactccaattcgtttcagttacatgaacgaactcacactggagagaaaccctatgaatgtaaggagtgcgggaaagccttcagttcttccagttcctttcgaaatcatgaaagaaggcatgcggatgagagactgtcagcataaggaatgtgggaaaacctaaaggtgtccctgttctctctgaagacatgaaaactcactggggagaaaccctatgaatgtaaaaatgtggaagcaactttgtatctcaggtcttaatgaacacatatgaattcacagtggagaagaccctgcatcagggaatgtggaaatgactttgctgaattctcaagccttaccaaacacatcagaaatctcactggagagaaaccgtatgaatgtagagaatctgggaatacctttctgaatcccacaaaccttaatgtgtgtatgtgaactcacattggagagaaaccctgcaatttaaatggtatggtctggatgatgccccactccatatttgtaagccctaagtcctagttccttacactataactgtatttggacatagggttttcaaacaggtgagtaacttcaaatgaggttgttgggttcgatccctaatctgacatcactggtgtccctataagggaaactgaaggaaggatacacatggagaagactgtgtggatccaccagaagatggccatctacaagccaaggacagagacctggaacagatgctttcattatggcctccagaggaaaccaaccctgtctccaccttgatattgcacttccaggctccagaactgtgaggcaataaatttctcttggttaaatcattcagtctgttattttgtacagcaaccctaggaaactaatactgtgaggaacttgggaaaagctttagatcaagcttgtccaacccgcaggccaggatggctttgaatgcagaccaacacaaatttttaagctttcttcaaacataataaatttagggttgatgcataataatttagggttgaagtcctcgagaac

SEQ ID NO: 442158 - DNA, 2375 bp, Homo sapiens
  misc_feature (32)..(32): n is a, c, g, or t
cggtacctgaacattcgtgtcctgggggagcnacctccagtgggattcaaatgataggaagccacaacggaggggaggtcagtgatgttaagcaatgtggagatgtctccagtgaacactcatgccttaagacacatgtgagaactcaaaatagtgagaacacatttgagtgttatctgtatggagtagacttccttactctgcacaagaaaacctctactggagagcaacgttctgtatttagtcagtgtggaaaagccttcagcctgaacccagatgttgtttgccagagaacgtgcacaggagagaaagcttttgattgcagtgactctgggaaatccttcattaatcattcacaccttcagggacatttaagaactcacaatggagaaagtctccatgaatggaaggaatgtgggagaggctttattcactccacagaccttgctgtgcgtatacaaactcacaggtcagaaaaaccctacaaatgtaaggaatgtggaaaaggatttagatattctgcataccttaatattcacatgggaacccacactggagacaatccctatgagtgtaaggagtgtgggaaagccttcaccaggtcttgtcaacttactcagcacagaaaaactcacactggagagaaaccttataaatgtaaggattgtgggagagccttcactgtttcctcttgcttaagtcaacatatgaaaatccatgtgggtgagaagccttatgaatgcaaggaatgtgggatagccttcactagatcttctcaacttactgaacatttaaaaactcacactgcaaaggatccctttgaatgtaagatatgtggaaaatcctttagaaattcctcatgcctcagtgatcactttcgaattcacactggaataaaaccctataaatgtaaggattgtgggaaagccttcactcagaactcagaccttactaagcatgcacgaactcacagtggagagaggccctatgaatgtaaggaatgtggaaaggcctttgccagatcctctcgccttagtgaacatacaagaactcacactggagagaagccttttgaatgtgtcaaatgtgggaaagcctttgctatttcttcaaatcttagtggacatttgagaattcacactggagagaagccctttgagtgcctggaatgtggtaaagcatttacgcattcctccagtcttaataatcacatgcggacccacagcgccaaaaaaccattcacgtgtatggaatgtggcaaagcctttaagtttcccacgtgtgttaaccttcacatgcggatccacactggagaaaaaccctacaaatgtaaacagtgtgggaaatccttcagttactccaattcgtttcagttacatgaacgaactcacactggagagaaaccctatgaatgtaaggagtgcgggaaagccttcagttcttccagttcctttcgaaatcatgaaagaaggcatgcggatgagagactgtcagcataaggaatgtgggaaaacctaaaggtgtccctgttctctctgaagacatgaaaactcactggggagaaaccctatgaatgtaaaaatgtggaagcaactttgtatctcaggtcttaatgaacacatatgaattcacagtggagaagaccctgcatcagggaatgtggaaatgactttgctgaattctcaagccttaccaaacacatcagaaatctcactggagagaaaccgtatgaatgtagagaatctgggaatacctttctgaatcccacaaaccttaatgtgtgtatgtgaactcacattggagagaaaccctgcaatttaaatggtatggtctggatgatgccccactccatatttgtaagccctaagtcctagttccttacactataactgtatttggacatagggttttcaaacaggtgagtaacttcaaatgaggttgttgggttcgatccctaatctgacatcactggtgtccctataagggaaactgaaggaaggatacacatggagaagactgtgtggatccaccagaagatggccatctacaagccaaggacagagacctggaacagatgctttcattatggcctccagaggaaaccaaccctgtctccaccttgatattgcacttccaggctccagaactgtgaggcaataaatttctcttggttaaatcattcagtctgttattttgtacagcaaccctaggaaactaatactgtgaggaacttgggaaaagctttagatcaagcttgtccaacccgcaggccaggatggctttgaatgcagaccaacacaaatttttaagctttcttcaaacataataaatttagggttgatgcataataatttagggttgaagtcctcgagaac

SEQ ID NO: 442159 - DNA, 998 bp, Homo sapiens
  misc_feature (7)..(7): n is a, c, g, or t
ccttccnacatctcatccccgagaaaccctatgaatgtaaggagtgcgggaaagccttcagttcttccagttcctttcgaaatcatgaaagaaggcatgcggatgagagactgtcagcataaggaatgtgggaaaacctaaaggtgtccctgttctctctgaagacatgaaaactcactggggagaaaccctatgaatgtaaaaatgtggaagcaactttgtatctcaggtcttaatgaacacatatgaattcacagtggagaagaccctgcatcagggaatgtggaaatgactttgctgaattctcaagccttaccaaacacatcagaaatctcactggagagaaaccgtatgaatgtagagaatctgggaatacctttctgaatcccacaaaccttaatgtgtgtatgtgaactcacattggagagaaaccctgcaatttaaatggtatggtctggatgatgccccactccatatttgtaagccctaagtcctagttccttacactataactgtatttggacatagggttttcaaacaggtgagtaacttcaaatgaggttgttgggttcgatccctaatctgacatcactggtgtccctataagggaaactgaaggaaggatacacatggagaagactgtgtggatccaccagaagatggccatctacaagccaaggacagagacctggaacagatgctttcattatggcctccagaggaaaccaaccctgtctccaccttgatattgcacttccaggctccagaactgtgaggcaataaatttctcttggttaaatcattcagtctgttattttgtacagcaaccctaggaaactaatactgtgaggaacttgggaaaagctttagatcaagcttgtccaacccgcaggccaggatggctttgaatgcagaccaacacaaatttttaagctttcttcaaacataataaatttagggttgatgcataataatttagggttgaagtcctcgagaac

SEQ ID NO: 442160 - DNA, 693 bp, Homo sapiens
ggcacgagtttttttcttcctggtggcgtttgggcttaatacagctttggcgaggtcggatgacgggtgggagccagcggtggaaggggtggcgaaagtaccggtttgccccaggccgccgaggggcctccttagagagaccttgcctgctccgctcgcgtccgccggggccgcgcgggtcctcctggcgccgccaggttcaaaaagccactcgagttgtcactgcgacggccctgggccaggagccgtttcgggatctgtcaaacaacgagttttcgtcgttcgaatcaggttgactgtggtccttcatccccccaatctcccgtacctggcgagtccagctcgtcgcggcctgtacctccccacagagcttcaaaacgggcttttaggaagaaggaatggaggctttgaagcaatgctaagaaaagagtgatatgcaagctgagaccaaaaatatggtatgatttagccatactgaaggggaaggaaataagagctgggcaaagcattctgtgaattggctgactccacttctatggtgagagagaggagtgcatcaaagattactcccagtagagatggtttcagcatgttggccagtctggtctcagactcctgacctcaagtgatccacccacctcggcctcccaaaatgctgggattacaggtataagccactgtgcctggccaaag

SEQ ID NO: 442161 - DNA, 3767 bp, Homo sapiens
ggcacgagtttttttcttcctggtggcgtttgggcttaatacagctttggcgaggtcggatgacgggtgggagccagcggtggaaggggtggcgaaagtaccggtttgccccaggccgccgaggggcctccttagagagaccttgcctgctccgctcgcgtccgccggggccgcgcgggtcctcctggcgccgccaggttcaaaaagccactcgagttgtcactgcgacggccctgggccaggagccgtttcgggatctgtcaaacaacgagttttcgtcgttcgaatcaggttgactgtggtccttcatccccccaatctcccgtacctggcgagtccagctcgtcgcggataccgttaaccctggataaagagaatggaggttacctctgtccgtgtagattcctaagctgtcctggagtgatccttggagtaaaggaaaggtgctttgaagcacattcagccatcagccctgtgggatggcagccactgatttgtcctatggtctttacagggacccagtctgccttcaagaaaagacagaagtagaaagggtggtggctgactgtctgacaaattgttatcaggtatgcaggaagtatatccttctccaaaatatcatacttgcatcaccaggtagacacatttccttctacacagaattatcttcagagcttcttaaagcaaataaagcctgcttcaaggactgagtccctagtcgaattcccggaaggagtggagcctgtcatattggtgagggtttgccttgaatgtcatcccagtatttcaatattgattaattagtcttccctcatggtcccaactgcatagtttttattttgttgagtgttctgacacatggtaagggacatgaaagtatcctttgagataatctttccattcatcagtgtttatctagcatctgctcaagagtgtgctgcagtggagggaaatcagatgacctcccagtctggttgtgttacatacaatcatgtgtaagaagtgccattcaagccgtgtcactggaggggactgacagtgagtgagtgtggatagagaggacctcctggggtgggcaatgtgagccctcagactctgtaggtattgcattttgcagtgaacactggtagacatgttttgtggctcaagccagcatgtgtgtgatggtttaggattcagtgacttttgatgatctggctgtggacttcaccccagaagaatggactttactggacccaactcagagaaacctctacagagatgtgatgctggagaactacaagaatttggccacagtaggatatcagctcttcaaacccagtctgatctcttggctggaacaagaagagtctaggacagtgcagagaggtgatttccaagcttcagaatggaaagtgcaacttaaaaccaaagagttagcccttcagcaggatgttttgggggagccaacctccagtgggattcaaatgataggaagccacaacggaggggaggtcagtgatgttaagcaatgtggagatgtctccagtgaacactcatgccttaagacacatgtgagaactcaaaatagtgagaacacatttgagtgttatctgtatggagtagacttccttactctgcacaagaaaacctctactggagagcaacgttctgtatttagtcagtgtggaaaagccttcagcctgaacccagatgttgtttgccagagaacgtgcacaggagagaaagcttttgattgcagtgactctgggaaatccttcattaatcattcacaccttcagggacatttaagaactcacaatggagaaagtctccatgaatggaaggaatgtgggagaggctttattcactccacagaccttgctgtgcgtatacaaactcacaggtcagaaaaaccctacaaatgtaaggaatgtggaaaaggatttagatattctgcataccttaatattcacatgggaacccacactggagacaatccctatgagtgtaaggagtgtgggaaagccttcaccaggtcttgtcaacttactcagcacagaaaaactcacactggagagaaaccttataaatgtaaggattgtgggagagccttcactgtttcctcttgcttaagtcaacatatgaaaatccatgtgggtgagaagccttatgaatgcaaggaatgtgggatagccttcactagatcttctcaacttactgaacatttaaaaactcacactgcaaaggatccctttgaatgtaagatatgtggaaaatcctttagaaattcctcatgcctcagtgatcactttcgaattcacactggaataaaaccctataaatgtaaggattgtgggaaagccttcactcagaactcagaccttactaagcatgcacgaactcacagtggagagaggccctatgaatgtaaggaatgtggaaaggcctttgccagatcctctcgccttagtgaacatacaagaactcacactggagagaagccttttgaatgtgtcaaatgtgggaaagcctttgctatttcttcaaatcttagtggacatttgagaattcacactggagagaagccctttgagtgcctggaatgtggtaaagcatttacgcattcctccagtcttaataatcacatgcggacccacagcgccaaaaaaccattcacgtgtatggaatgtggcaaagcctttaagtttcccacgtgtgttaaccttcacatgcggatccacactggagaaaaaccctacaaatgtaaacagtgtgggaaatccttcagttactccaattcgtttcagttacatgaacgaactcacactggagagaaaccctatgaatgtaaggagtgcgggaaagccttcagttcttccagttcctttcgaaatcatgaaagaaggcatgcggatgagagactgtcagcataaggaatgtgggaaaacctaaaggtgtccctgttctctctgaagacatgaaaactcactggggagaaaccctatgaatgtaaaaatgtggaagcaactttgtatctcaggtcttaatgaacacatatgaattcacagtggagaagaccctgcatcagggaatgtggaaatgactttgctgaattctcaagccttaccaaacacatcagaaatctcactggagagaaaccgtatgaatgtagagaatctgggaatacctttctgaatcccacaaaccttaatgtgtgtatgtgaactcacattggagagaaaccctgcaatttaaatggtatggtctggatgatgccccactccatatttgtaagccctaagtcctagttccttacactataactgtatttggacatagggttttcaaacaggtgagtaacttcaaatgaggttgttgggttcgatccctaatctgacatcactggtgtccctataagggaaactgaaggaaggatacacatggagaagactgtgtggatccaccagaagatggccatctacaagccaaggacagagacctggaacagatgctttcattatggcctccagaggaaaccaaccctgtctccaccttgatattgcacttccaggctccagaactgtgaggcaataaatttctcttggttaaatcattcagtctgttattttgtacagcaaccctaggaaactaatactgtgaggaacttgggaaaagctttagatcaagcttgtccaacccgcaggccaggatggctttgaatgcagaccaacacaaatttttaagctttcttcaaacataataaaatttttttgtgattaaaattt

SEQ ID NO: 442162 - DNA, 3590 bp, Homo sapiens
ggcacgagtttttttcttcctggtggcgtttgggcttaatacagctttggcgaggtcggatgacgggtgggagccagcggtggaaggggtggcgaaagtaccggtttgccccaggccgccgaggggcctccttagagagaccttgcctgctccgctcgcgtccgccggggccgcgcgggtcctcctggcgccgccaggttcaaaaagccactcgagttgtcactgcgacggccctgggccaggagccgtttcgggatctgtcaaacaacgagttttcgtcgttcgaatcaggttgactgtggtccttcatccccccaatctcccgtacctggcgagtccagctcgtcgcggataccgttaaccctggataaagagaatggaggttacctctgtccgtgtagattcctaagctgtcctggagtgatccttggagtaaaggaaaggtgctttgaagcacattcagccatcagccctgtgggatggcagccactgatttgtcctatggtctttacagggacccagtctgccttcaagaaaagacagaagtagaaagggtggtggctgactgtctgacaaattgttatcaggtatgcaggaagtatatccttctccaaaatatcatacttgcatcaccaggtagacacatttccttctacacagaattatcttcagagcttcttaaagcaaataaagcctgcttcaaggactgagtccctagtcgaattcccggaaggagtggagcctgtcatattggtgagggtttgccttgaatgtcatcccagtatttcaatattgattaattagtcttccctcatggtcccaactgcatagtttttattttgttgagtgttctgacacatggtaagggacatgaaagtatcctttgagataatctttccattcatcagtgtttatctagcatctgctcaagagtgtgctgcagtggagggaaatcagatgacctcccagtctggttgtgttacatacaatcatgtgtaagaagtgccattcaagccgtgtcactggaggggactgacagtgagtgagtgtggatagagaggacctcctggggtgggcaatgtgagccctcagactctgtaggtattgcattttgcagtgaacactggtagacatgttttgtggctcaagccagcatgtgtgtgatggtttaggattcagtgacttttgatgatctggctgtggacttcaccccagaagaatggactttactggacccaactcagagaaacctctacagagatgtgatgctggagaactacaagaatttggccacagtaggatatcagctcttcaaacccagtctgatctcttggctggaacaagaagagtctaggacagtgcagagaggtgatttccaagcttcagaatggaaagtgcaacttaaaaccaaagagttagcccttcagcaggatgttttgggggagccaacctccagtgggattcaaatgataggaagccacaacggaggggaggtcagtgatgttaagcaatgtggagatgtctccagtgaacactcatgccttaagacacatgtgagaactcaaaatagtgagaacacatttgagtgttatctgtatggagtagacttccttactctgcacaagaaaacctctactggagagcaacgttctgtatttagtcagtgtggaaaagccttcagcctgaacccagatgttgtttgccagagaacgtgcacaggagagaaagcttttgattgcagtgactctgggaaatccttcattaatcattcacaccttcagggacatttaagaactcacaatggagaaagtctccatgaatggaaggaatgtgggagaggctttattcactccacagaccttgctgtgcgtatacaaactcacaggtcagaaaaaccctacaaatgtaaggaatgtggaaaaggatttagatattctgcataccttaatattcacatgggaacccacactggagacaatccctatgagtgtaaggagtgtgggaaagccttcaccaggtcttgtcaacttactcagcacagaaaaactcacactggagagaaaccttataaatgtaaggattgtgggagagccttcactgtttcctcttgcttaagtcaacatatgaaaatccatgtgggtgagaagccttatgaatgcaaggaatgtgggatagccttcactagatcttctcaacttactgaacatttaaaaactcacactgcaaaggatccctttgaatgtaagatatgtggaaaatcctttagaaattcctcatgcctcagtgatcactttcgaattcacactggaataaaaccctataaatgtaaggattgtgggaaagccttcactcagaactcagaccttactaagcatgcacgaactcacagtggagagaggccctatgaatgtaaggaatgtggaaaggcctttgccagatcctctcgccttagtgaacatacaagaactcacactggagagaagccttttgaatgtgtcaaatgtgggaaagcctttgctatttcttcaaatcttagtggacatttgagaattcacactggagagaagccctttgagtgcctggaatgtggtaaagcatttacgcattcctccagtcttaataatcacatgcggacccacagcgccaaaaaaccattcacgtgtatggaatgtggcaaagcctttaagtttcccacgtgtgttaaccttcacatgcggatccacactggagaaaaaccctacaaatgtaaacagtgtgggaaatccttcagttactccaattcgtttcagttacatgaacgaactcacactggagagaaaccctatgaatgtaaggagtgcgggaaagccttcagttcttccagttcctttcgaaatcatgaaagaaggcatgcggatgagagactgtcagcataaggaatgtgggaaaacctaaaggtgtccctgttctctctgaagacatgaaaactcactggggagaaaccctatgaatgtaaaaatgtggaagcaactttgtatctcaggtcttaatgaacacatatgaattcacagtggagaagaccctgcatcagggaatgtggaaatgactttgctgaattctcaagccttaccaaacacatcagaaatctcactggagagaaaccgtatgaatgtagagaatctgggaatacctttctgaatcccacaaaccttaatgtgtgtatgtgaactcacattggagagaaaccctgcaatttaaatggtatggtctggatgatgccccactccatatttgtaagccctaagtcctagttccttacactataactgtatttggacatagggttttcaaacaggtgagtaacttcaaatgaggttgttgggttcgatccctaatctgacatcactggtgtccctataagggaaactgaaggaaggatacacatggagaagactgtgtggatccaccagaagatggccatctacaagccaaggacagagacctggaacagatgctttcattatggcctccagaggaaaccaaccctgtctccaccttgatattgcacttccaggctccagaactgtgaggcaataaatttctcttggtta

SEQ ID NO: 442163 - DNA, 1039 bp, Homo sapiens
tgtcttcaattctgtctggtggaacaaaggtttatttgttgtaggttttttttacatcagttacattgaccatccattcatagtagcacatacacagtggtgaaactaagatgtgttgggatattcactagtgtcctatagatagaaaataaatgtatatttaccagggcctcatccagaccatggtcatactcgagtcagcatgttgtgtcagttacctgacagtggttatgaatgatcctcagggctcttgtctccatctccaggatcccaggagggcactcatggtggtttatgggactctggactcctgagaagcggccttgagtctacaggatacatctacagcctgacctgaccacccgacactcccaggcagccgcggcttgctcccctgctggccatttccagcctgctagaaaacccacctttttgttcctaccgaccgtggctttgagatcaagtgagggtaggaaatgcccctggtcactaaaagggctgtaggaaaggctggctctctgagaatacagctgccctccagggcaggacctggaaggagcacagcgccagggcgacacatggtcacaagcccagctctgtccctgagcagcgtgctctctgcttggggtctctcctgaccgtctctgcaaggcgtggggagagacctgctgctccctttgaatgctttcttccacatgtggacaaatggcccttcccttccttccccgtaacacagcccacggaaatattgaagacatgccactaagtgactttccaagtgggacatcaaagaactgggcttctaccctgagcagcatcttgctgtggacctcaagtaagtcaccccatcatttatgcctcaccttcctcatctgtaaaatgtgaggagagccaggcaccgtggcgcacgcctgtagtcccagctactcacgaggccgaggcaggaggatcgcttaagcctgggagttaaaggctgcaatgagctatgattgcaccactgcactccagcctgggcaacagagtgaaaactcatctctaa

SEQ ID NO: 442164 - DNA, 566 bp, Homo sapiens
agctcactgtaatctcaacctcaaactcctgtgctcaggaggctgaggtaggatcacctgagcctgggacattgaggctgcagtgagccacgactgcaccactgcactgcagcctgggtgacagagcaaagccctgtggaaaaaaaaaaaaagtgcctcagagggcattaaagatccactctgccctggctcctttctttcctgctggttcagctctccccactcctgtgaccatttgggaggtgccagggctgcagtgccgtgggtgcctgaccaggggtacccaaccagggttgcagccacaggaatcctcatggtttccagggaacacaagggaattttctttctttgcctttagtaataataactgaacatggaccaggtgccagggatcatgacaaatgctgaaaccacgtgtcctcattgaagccccagccagccacccctgggagtcatttgggtgtccttgtcccccggtctgtactctaatgtctcttcacacttgctcttaatctgagtatttgaaattaaaagtactatgtatacaaaacaaagttcttcatgag

SEQ ID NO: 442165 - DNA, 966 bp, Homo sapiens
ggtgggcggggcttcgcgtctccttctacggatatctgtggaccttatggaagcaaagactcttggaactgtaacgcccagaaaacctgtcttatctgtcagtgcaagaaaaattaaggacaatgcggctgattggcacaatttaatcctgaagtgggaaaccctcaatgatgcaggttttaccactgcaaataatattgccaacttgaaaatcagtttattgaataaagacaagatagaactagacagcagcagcccagcctcgaaggaaaatgaagaaaaggtgtgtctggaatataacgaggaactggagaagctgtgtgaggaactgcaggccaccttggatgggttgaccaaaatacaggtgaaaatggaaaagctgtcttcaactaccaagggaatttgtgaactagaaaactaccattatggggaggagagtaaacgaccccctctgttccacacgtggcctacaacccatttctatgaggtttcgcataagctcttggagatgtacaggaaggagctgctcctgaagcgcacggtggccaaggagcttgcccacaccggggatcccgacctcaccctgagctacctgtccatgtggctgcaccagccctatgtggagagcgacagcaggctgcatctggagagcatgctgctggagacaggccaccgagctctctgacgtcctgagacggctgcggacactggctccttccacgtctcaccaggcagacagtctgcctaggacccagtgccgcaggcctggatcagaccccaggatcagaccttcttggggtcttctggccagagcttgtcaccagccccatggcctctccaggcgtgctcatgcccacaacccgcggccagccccacgtggtgccgctcagccttctctgcccctcctgggaatctgtcattcgtgggtgcttcagagtaaaatcaatgagtttctgagcagaatga

SEQ ID NO: 442166 - DNA, 2126 bp, Homo sapiens
ggtgaatcggccgaggcttctacggatatctgtggaccttatggaagcaaagactcttggaactgtaacgcccagaaaacctgtcttatctgtcagtgcaagaaaaattaaggacaatgcggctgattggcacaatttaatcctgaagtgggaaaccctcaatgatgcaggttttaccactgcaaataatattgccaacttgaaaatcagtttattgaataaagacaagatagaactagacagcagcagcccagcctcgaaggaaaatgaagaaaaggtgtgtctggaatataacgaggaactggagaagctgtgtgaggaactgcaggccaccttggatgggttgaccaaaatacaggtgaaaatggaaaagctgtcttcaactaccaagggaatttgtgaactagaaaactaccattatggggaggagagtaaacgaccccctctgttccacacgtggcctacaacccatttctatgaggtttcgcataagctcttggagatgtacaggaaggagctgctcctgaagcgcacggtggccaaggagcttgcccacaccggggatcccgacctcaccctgagctacctgtccatgtggctgcaccagccctatgtggagagcgacagcaggctgcatctggagagcatgctgctggagacaggccaccgagctctctgacgtcctgagacggctgcggacactggctccttccacgtctcaccaggcagacagtctgcctaggacccagtgccgcaggcctggatcagaccccaggatcagaccttcttggggtcttctggccagagcttgtcaccagccccatggcctctccaggcgtgctcatgcccacaacccgcggccagccccacgtggtgccgctcagccttctctgcccctcctgggaatctgtcattcgtgggtgcttcagagtaaaatcaatgagtttctgagcagaatgagtgagtgatctagtttctataaattaggcatgctttatacattatgtttgtgtagaaaatccctggtttaatatttttactttatgcctatctgattgttgaagtttttatgagactatattagtttttgggccaggtgcggtggctcatgcctgtaatcccagcactttgggaggccgaggtgggcggatcactttaggttcggaattcaagtccagcctgaccaacatgatgaaaccctgtctctactaaaaatacaaaaatcagctggcacgcgccgccacacccagctaatgtttgtatttttagtagagacggggtttcaccacattggccaagatggtctccatctcctgacctcgtgatccacccaccgcgccctcccagaatgctgggattacaggcgtgagccaccgcgccgagcctgcaaaagcctaaactcttttttgtggcattacttgttacatggtttctacatctgcgtttgcctttttgtaagttctctgatcccaaactgtttatattctgtgggactgtgtatagagtgatacttaataaacagcagttttagttttttggtttttatgagataggctcttaccatgtggcccaagtagtgtcaaactcctgaggtcaagtgatcctccctacttagtctcctcagagactacagtcatgcactgcccagcccagcaataatgttgttggtgtttttagatacaggagcaaagccctgtggaaaaaaaaaaaaagtgcctcagagggcattaaagatccactctgccctggctcctttctttcctgctggttcagctctccccactcctgtgaccatttgggaggtgccagggctgcagtgccgtgggtgcctgaccaggggtacccaaccagggttgcagccacaggaatcctcatggtttccagggaacacaagggaattttctttctttgcctttagtaataataactgaacatggaccaggtgccagggatcatgacaaatgctgaaaccacgtgtcctcattgaagccccagccagccacccctgggagtcatttgggtgtccttgtcccccggtctgtactctaatgtctcttcacacttgctcttaatctgagtatttgaaattaaaagtactatgtatacaaaacaaagttcttcatgag

SEQ ID NO: 442167 - DNA, 1733 bp, Homo sapiens
ggtgaatcggccgaggcttctacggatatctgtggaccttatggaagcaaagactcttggaactgtaacgcccagaaaacctgtcttatctgtcagtgcaagaaaaattaaggacaatgcggctgattggcacaatttaatcctgaagtgggaaaccctcaatgatgcaggttttaccactgcaaataatattgccaacttgaaaatcagtttattgaataaagacaagatagaactagacagcagcagcccagcctcgaaggaaaatgaagaaaaggtgtgtctggaatataacgaggaactggagaagctgtgtgaggaactgcaggccaccttggatgggttgaccaaaatacaggtgaaaatggaaaagctgtcttcaactaccaagggaatttgtgaactagaaaactaccattatggggaggagagtaaacgaccccctctgttccacacgtggcctacaacccatttctatgaggtttcgcataagctcttggagatgtacaggaaggagctgctcctgaagcgcacggtggccaaggagcttgcccacaccggggatcccgacctcaccctgagctacctgtccatgtggctgcaccagccctatgtggagagcgacagcaggctgcatctggagagcatgctgctggagacaggccaccgagctctctgacgtcctgagacggctgcggacactggctccttccacgtctcaccaggcagacagtctgcctaggacccagtgccgcaggcctggatcagaccccaggatcagaccttcttggggtcttctggccagagcttgtcaccagccccatggcctctccaggcgtgctcatgcccacaacccgcggccagccccacgtggtgccgctcagccttctctgcccctcctgggaatctgtcattcgtgggtgcttcagagtaaaatcaatgagtttctgagcagaatgagatcccaggagggcactcatggtggtttatgggactctggactcctgagaagcggccttgagtctacaggatacatctacagcctgacctgaccacccgacactcccaggcagccgcggcttgctcccctgctggccatttccagcctgctagaaaacccacctttttgttcctaccgaccgtggctttgagatcaagtgagggtaggaaatgcccctggtcactaaaagggctgtaggaaaggctggctctctgagaatacagctgccctccagggcaggacctggaaggagcacagcgccagggcgacacatggtcacaagcccagctctgtccctgagcagcgtgctctctgcttggggtctctcctgaccgtctctgcaaggcgtggggagagacctgctgctccctttgaatgctttcttccacatgtggacaaatggcccttcccttccttccccgtaacacagcccacggaaatattgaagacatgccactaagtgactttccaagtgggacatcaaagaactgggcttctaccctgagcagcatcttgctgtggacctcaagtaagtcaccccatcatttatgcctcaccttcctcatctgtaaaatgtgaggagagccaggcaccgtggcgcacgcctgtagtcccagctactcacgaggccgaggcaggaggatcgcttaagcctgggagttaaaggctgcaatgagctatgattgcaccactgcactccagcctgggcaacagagtgaaaactcatctctaa

SEQ ID NO: 442168 - DNA, 905 bp, Homo sapiens
ggtgaatcggccgaggcttctacggatatctgtggaccttatggaagcaaagactcttggaactgtaacgcccagaaaacctgtcttatctgtcagtgcaagaaaaattaaggacaatgcggctgattggcacaatttaatcctgaagtgggaaaccctcaatgatgcaggttttaccactgcaaataatattgccaacttgaaaatcagtttattgaataaagacaagatagaactagacagcagcagcccagcctcgaaggaaaatgaagaaaaggtgtgtctggaatataacgaggaactggagaagctgtgtgaggaactgcaggccaccttggatgggttgaccaaaatacaggtgaaaatggaaaagctgtcttcaactaccaagggaatttgtgaactagaaaactaccattatatgaggtttcgcataagctcttggagatgtacaggaaggagctgctcctgaagcgcacggtggccaaggagcttgcccacaccggggatcccgacctcaccctgagctacctgtccatgtggctgcaccagccctatgtggagagcgacagcaggctgcatctggagagcatgctgctggagacaggccaccgagctctctgacgtcctgagacggctgcggacactggctccttccacgtctcaccaggcagacagtctgcctaggacccagtgccgcaggcctggatcagaccccaggatcagaccttcttggggtcttctggccagagcttgtcaccagccccatggcctctccaggcgtgctcatgcccacaacccgcggccagccccacgtggtgccgctcagccttctctgcccctcctgggaatctgtcattcgtgggtgcttcagagtaaaatcaatgagtttctgagcagaatga

SEQ ID NO: 442169 - DNA, 557 bp, Homo sapiens
ggtgaatcggccgaggcttctacggatatctgtggaccttatggaagcaaagactcttggaactgtaacgcccagaaaacctgtcttatctgtcagtgcaagaaaaattaaggacaatgcggctgattggcacaatttaatcctgaagtgggaaaccctcaatgatgcaggttttaccactgcaaataatattgccaacttgaaaatcagtttattagcgacagcaggctgcatctggagagcatgctgctggagacaggccaccgagctctctgacgtcctgagacggctgcggacactggctccttccacgtctcaccaggcagacagtctgcctaggacccagtgccgcaggcctggatcagaccccaggatcagaccttcttggggtcttctggccagagcttgtcaccagccccatggcctctccaggcgtgctcatgcccacaacccgcggccagccccacgtggtgccgctcagccttctctgcccctcctgggaatctgtcattcgtgggtgcttcagagtaaaatcaatgagtttctgagcagaatga

SEQ ID NO: 442170 - DNA, 400 bp, Homo sapiens
gcaccagctagagtagtaaactccatcgggcccttcttcccctcagtgctgttgctgattctggtttttaatcaagagctgttaaaatgtagttcttcccaagtcgacactatgttcttgaatcactgccattaagggagattcacgtttctttcagatgaggtttcgcataagctcttggagatgtacaggaaggagctgctcctgaagcgcacggtggccaaggagcttgcccacaccggggatcccgacctcaccctgagctacctgtccatgtggctgcaccagccctatgtggagagcgacagcaggctgcatctggagagcatgctgctggagacaggccaccgagctctctgacgtcctgagacggctgcggacactggctccttccacgtct

SEQ ID NO: 442171 - DNA, 960 bp, Homo sapiens
ggtgaatcggccgaggcttctacggatatctgtggaccttatggaagcaaagactcttggaactgtaacgcccagaaaacctgtcttatctgtcagtgcaagaaaaattaaggacaatgcggctgattggcacaatttaatcctgaagtgggaaaccctcaatgatgcaggttttaccactgcaaataatattgccaacttgaaaatcagtttattgaataaagacaagatagaactagacagcagcagcccagcctcgaaggaaaatgaagaaaaggtgtgtctggaatataacgaggaactggagaagctgtgtgaggaactgcaggccaccttggatgggttgaccaaaatacaggtgaaaatggaaaagctgtcttcaactaccaagggaatttgtgaactagaaaactaccattatggggaggagagtaaacgaccccctctgttccacacgtggcctacaacccatttctatgaggtttcgcataagctcttggagatgtacaggaaggagctgctcctgaagcgcacggtggccaaggagcttgcccacaccggggatcccgacctcaccctgagctacctgtccatgtggctgcaccagccctatgtggagagcgacagcaggctgcatctggagagcatgctgctggagacaggccaccgagctctctgacgtcctgagacggctgcggacactggctccttccacgtctcaccaggcagacagtctgcctaggacccagtgccgcaggcctggatcagaccccaggatcagaccttcttggggtcttctggccagagcttgtcaccagccccatggcctctccaggcgtgctcatgcccacaacccgcggccagccccacgtggtgccgctcagccttctctgcccctcctgggaatctgtcattcgtgggtgcttcagagtaaaatcaatgagtttctgagcagaatga

SEQ ID NO: 442172 - DNA, 2677 bp, Homo sapiens
ggtgaatcggccgaggcttctacggatatctgtggaccttatggaagcaaagactcttggaactgtaacgcccagaaaacctgtcttatctgtcagtgcaagaaaaattaaggacaatgcggctgattggcacaatttaatcctgaagtgggaaaccctcaatgatgcaggttttaccactgcaaataatattgccaacttgaaaatcagtttattgaataaagacaagatagaactagacagcagcagcccagcctcgaaggaaaatgaagaaaaggtgtgtctggaatataacgaggaactggagaagctgtgtgaggaactgcaggccaccttggatgggttgaccaaaatacaggtgaaaatggaaaagctgtcttcaactaccaagggaatttgtgaactagaaaactaccattatggggaggagagtaaacgaccccctctgttccacacgtggcctacaacccatttctatgaggtttcgcataagctcttggagatgtacaggaaggagctgctcctgaagcgcacggtggccaaggagcttgcccacaccggggatcccgacctcaccctgagctacctgtccatgtggctgcaccagccctatgtggagagcgacagcaggctgcatctggagagcatgctgctggagacaggccaccgagctctctgacgtcctgagacggctgcggacactggctccttccacgtctcaccaggcagacagtctgcctaggacccagtgccgcaggcctggatcagaccccaggatcagaccttcttggggtcttctggccagagcttgtcaccagccccatggcctctccaggcgtgctcatgcccacaacccgcggccagccccacgtggtgccgctcagccttctctgcccctcctgggaatctgtcattcgtgggtgcttcagagtaaaatcaatgagtttctgagcagaatgagtgagtgatctagtttctataaattaggcatgctttatacattatgtttgtgtagaaaatccctggtttaatatttttactttatgcctatctgattgttgaagtttttatgagactatattagtttttgggccaggtgcggtggctcatgcctgtaatcccagcactttgggaggccgaggtgggcggatcactttaggttcggaattcaagtccagcctgaccaacatgatgaaaccctgtctctactaaaaatacaaaaatcagctggcgtggtggcgcgtgcctgcaatctcagctacttgagaggctgaggcaggagaatggcttgaaccgggaggcagaggctgctgtgagccattgcactccagcctgggcgacagagtgagacttcgtcttaaataataagatcccatggagttaaaatgaagtttgacatcatgaaaatgaaaataacctacaaaaaaattgccgctgtttgcatactggggacatggcaagcgatgtaaactgccttccctggcattcttctgacacaaatcctcgagtttcacaatgtttgcagccatttccagagttaacatactaggttagaatgagggaaaggtgacagttttgaaacagaccgaagagactggccaaaagctagggcatggggagaatgtgaaggtatgcaaaagcctacttttttttttttttaatggagtctcgctctgtcaccaggctggtgtgcagtggcacgatgtaagctcactgcaacctccgcctcctgggttcaggcgattctcatgcctcagcctccagagtagttgggactacaggcacgcgccgccacacccagctaatgtttgtatttttagtagagacggggtttcaccacattggccaagatggtctccatctcctgacctcgtgatccacccaccgcgccctcccagaatgctgggattacaggcgtgagccaccgcgccgagcctgcaaaagcctaaactcttttttgtggcattacttgttacatggtttctacatctgcgtttgcctttttgtaagttctctgatcccaaactgtttatattctgtgggactgtgtatagagtgatacttaataaacagcagttttagttttttggtttttatgagataggctcttaccatgtggcccaagtagtgtcaaactcctgaggtcaagtgatcctccctacttagtctcctcagagactacagtcatgcactgcccagcccagcaataatgttgttggtgtttttagatacaggagcaaagccctgtggaaaaaaaaaaaaagtgcctcagagggcattaaagatccactctgccctggctcctttctttcctgctggttcagctctccccactcctgtgaccatttgggaggtgccagggctgcagtgccgtgggtgcctgaccaggggtacccaaccagggttgcagccacaggaatcctcatggtttccagggaacacaagggaattttctttctttgcctttagtaataataactgaacatggaccaggtgccagggatcatgacaaatgctgaaaccacgtgtcctcattgaagccccagccagccacccctgggagtcatttgggtgtccttgtcccccggtctgtactctaatgtctcttcacacttgctcttaatctgagtatttgaaattaaaagtactatgtatacaaaacaaagttcttcatgag

SEQ ID NO: 442173 - DNA, 1041 bp, Homo sapiens
ggtgaatcggccgaggcttctacggatatctgtggaccttatggaagcaaagactcttggaactgtaacgcccagaaaacctgtcttatctgtcagtgcaagaaaaattaaggacaatgcggctgattggcacaatttaatcctgaagtgggaaaccctcaatgatgcaggttttaccactgcaaataatattgccaacttgaaaatcagtttattgaataaagacaagatagaactagacagcagcagcccagcctcgaaggaaaatgaagaaaaggtgtgtctggaatataacgaggaactggagaagctgtgtgaggaactgcaggccaccttggatgggttgaccaaaatacaggtgaaaatggaaaagctgtcttcaactaccaagggaatttgtgaactagaaaactaccattatggggaggagagtaaacgaccccctctgttccacacgtggcctacaacccatttctatgaggtttcgcataagctcttggagatgtacaggaaggagctgctcctgaagcgcacggtggccaaggagcttgcccacaccggggatcccgacctcaccctgagctacctgtccatgtggctgcaccagccctatgtggagagcgacagcaggctgcatctggagagcatgctgctggagacaggccaccgagctctctgacgtcctgagacggctgcggacactggctccttccacgtctcaccaggcagacagtctgcctaggacccagtgccgcaggcctggatcagaccccaggatcagaccttcttggggtcttctggccagagcttgtcaccagccccatggcctctccaggcgtgctcatgcccacaacccgcggccagccccacgtggtgccgctcagccttctctgcccctcctgggaatctgtcattcgtgggtgcttcagagtaaaatcaatgagtttctgagcagaatgaaaaaaaaaaacaaagggggggcgcaaaaaataccccagaggggcccaatacaggataccggattttggcacaaaggggccc

SEQ ID NO: 442174 - DNA, 913 bp, Homo sapiens
ggtgaatcggccgaggcttctacggatatctgtggaccttatggaagcaaagactcttggaactgtaacgcccagaaaacctgtcttatctgtcagtgcaagaaaaattaaggacaatgcggctgattggcacaatttaatcctgaagtgggaaaccctcaatgatgcaggttttaccactgcaaataatattgccaacttgaaaatcagtttattgaataaagacaagatagaactagacagcagcagcccagcctcgaaggaaaatgaagaaaaggtgtgtctggaatataacgaggaactggagaagctgtgtgaggaactgcaggccaccttggatgggttgaccaaaatacaggtgaaaatggaaaagctgtcttcaactaccaagggaatttgtgaactagaaaactaccattatggggaggagagtaaacgaccccctctgttccacacgtggcctacaacccatttctatgaggtttcgcataagctcttggagatgtacaggaaggagctgctcctgaagcgcacggtggccaaggagcttgcccacaccggggatcccgacctcaccctgagctacctgtccatgtggctgcaccagccctatgtggagagcgacagcaggctgcatctggagagcatgctgctggagacaggccaccgagctctctgacgtcctgagacggctgcggacactggctccttccacgtctcaccaggcagacagtctgcctaggacccagtgccgcaggcctggatcagaccccaggatcagaccttcttggggtcttctggccagagcttgtcaccagccccatggcctctccaggcgtgctcatgcccctcctgggaatctgtcattcgtgggtgcttcagagtaaaatcaatgagtttctgagcagaatga

SEQ ID NO: 442175 - DNA, 1538 bp, Homo sapiens
cgaggctccgcaccagccgcgcttctgtccgcctgcagggcattccagaaagatgaggatatttgctgtctttatattcatgacctactggcatttgctgaacgcatttactgtcacggttcccaaggacctatatgtggtagagtatggtagcaatatgacaattgaatgcaaattcccagtagaaaaacaattagacctggctgcactaattgtctattgggaaatggaggataagaacattattcaatttgtgcatggagaggaagacctgaaggttcagcatagtagctacagacagagggcccggctgttgaaggaccagctctccctgggaaatgctgcacttcagatcacagatgtgaaattgcaggatgcaggggtgtaccgctgcatgatcagctatggtggtgccgactacaagcgaattactgtgaaagtcaatgccccatacaacaaaatcaaccaaagaattttggttgtggatccagtcacctctgaacatgaactgacatgtcaggctgagggctaccccaaggccgaagtcatctggacaagcagtgaccatcaagtcctgagtggtaagaccaccaccaccaattccaagagagaggagaagcttttcaatgtgaccagcacactgagaatcaacacaacaactaatgagattttctactgcacttttaggagattagatcctgaggaaaaccatacagctgaattggtcatcccagaactacctctggcacatcctccaaatgaaaggactcacttggtaattctgggagccatcttattatgccttggtgtagcactgacattcatcttccgtttaagaaaagggagaatgatggatgtgaaaaaatgtggcatccaagatacaaactcaaagaagcaaagtgatacacatttggaggagacgtaatccagcattggaacttctgatcttcaagcagggattctcaacctgtggtttaggggttcatcggggctgagcgtgacaagaggaaggaatgggcccgtgggatgcaggcaatgtgggacttaaaaggcccaagcactgaaaatggaacctggcgaaagcagaggaggagaatgaagaaagatggagtcaaacagggagcctggagggagaccttgatactttcaaatgcctgaggggctcatcgacgcctgtgacagggagaaaggatacttctgaacaaggagcctccaagcaaatcatccattgctcatcctaggaagacgggttgagaatccctaatttgagggtcagttcctgcagaagtgccctttgcctccactcaatgcctcaatttgttttctgcatgactgagagtctcagtgttggaacgggacagtatttatgtatgagtttttcctatttattttgagtctgtgaggtcttcttgtcatgtgagtgtggttgtgaatgatttcttttgaagatatattgtagtagatgttacaattttgtcgccaaactaaacttgctgcttaatgatttgctcacatctagtaaaacatggagtatttgt

SEQ ID NO: 442176 - DNA, 2082 bp, Homo sapiens
aacaatgagcccaagtttaaagcagtctaattaacctggacaagctcaggcaagtttcattctgtggcccatagcatcatctgtgttgtaaagctaagtagcaaatgttgtttgggtcatgctgggggacaagccatcccaatttgctcaggactgaggggttttccaggatatcatgtaaggataattgggtacaaatataacctgctgctttctctcatttcaaatttatcatttatcatatcagcaactatgagttatgttttttattagatttcttgttactttttccccagaccacttcccatgaaattaatatactattatcactctccagatacacatttggaggagacgtaatccagcattggaacttctgatcttcaagcagggattctcaacctgtggtttaggggttcatcggggctgagcgtgacaagaggaaggaatgggcccgtgggatgcaggcaatgtgggacttaaaaggcccaagcactgaaaatggaacctggcgaaagcagaggaggagaatgaagaaagatggagtcaaacagggagcctggagggagaccttgatactttcaaatgcctgaggggctcatcgacgcctgtgacagggagaaaggatacttctgaacaaggagcctccaagcaaatcatccattgctcatcctaggaagacgggttgagaatccctaatttgagggtcagttcctgcagaagtgccctttgcctccactcaatgcctcaatttgttttctgcatgactgagagtctcagtgttggaacgggacagtatttatgtatgagtttttcctatttattttgagtctgtgaggtcttcttgtcatgtgagtgtggttgtgaatgatttcttttgaagatatattgtagtagatgttacaattttgtcgccaaactaaacttgctgcttaatgatttgctcacatctagtaaaacatggagtatttgtaaggtgcttggtctcctctataactacaagtatacattggaagcataaagatcaaaccgttggttgcataggatgtcacctttatttaacccattaatactctggttgacctaatcttattctcagacctcaagtgtctgtgcagtatctgttccatttaaatatcagctttacaattatgtggtagcctacacacataatctcatttcatcgctgtaaccaccctgttgtgataaccactattattttacccatcgtacagctgaggaagcaaacagattaagtaacttgcccaaaccagtaaatagcagacctcagactgccacccactgtccttttataatacaatttacagctatattttactttaagcaattcttttattcaaaaaccatttattaagtgcccttgcaatatcaatcgctgtgccaggcattgaatctacagatgtgagcaagacaaagtacctgtcctcaaggagctcatagtataatgaggagattaacaagaaaatgtattattacaatttagtccagtgtcatagcataaggatgatgcgaggggaaaacccgagcagtgttgccaagaggaggaaataggccaatgtggtctgggacggttggatatacttaaacatcttaataatcagagtaattttcatttacaaagagaggtcggtacttaaaataaccctgaaaaataacactggaattccttttctagcattatatttattcctgatttgcctttgccatataatctaatgcttgtttatatagtgtctggtattgtttaacagttctgtcttttctatttaaatgccactaaattttaaattcatacctttccatgattcaaaattcaaaagatcccatgggagatggttggaaaatctccacttcatcctccaagccattcaagtttcctttccagaaagcaactgctactgcctttcattcatatgttcttctaaagatagtctacatttggaaatgtatgttaaaagcacgtatttttaaaatttttttcctaaatagtaacacattgtatgtctgctgtgtactttgctatttttatttattttagtgtttcttatatagcagatggaa

SEQ ID NO: 442177 - DNA, 1417 bp, Homo sapiens
ctagaatttatcctcattttacagtagagaaaacagagggtcaagaagataatgtaaatgccctttgcctccactcaatgcctcaatttgttttctgcatgactgagagtctcagtgttggaacgggacagtatttatgtatgagtttttcctatttattttgagtctgtgaggtcttcttgtcatgtgagtgtggttgtgaatgatttcttttgaagatatattgtagtagatgttacaattttgtcgccaaactaaacttgctgcttaatgatttgctcacatctagtaaaacatggagtatttgtaaggtgcttggtctcctctataactacaagtatacattggaagcataaagatcaaaccgttggttgcataggatgtcacctttatttaacccattaatactctggttgacctaatcttattctcagacctcaagtgtctgtgcagtatctgttccatttaaatatcagctttacaattatgtggtagcctacacacataatctcatttcatcgctgtaaccaccctgttgtgataaccactattattttacccatcgtacagctgaggaagcaaacagattaagtaacttgcccaaaccagtaaatagcagacctcagactgccacccactgtccttttataatacaatttacagctatattttactttaagcaattcttttattcaaaaaccatttattaagtgcccttgcaatatcaatcgctgtgccaggcattgaatctacagatgtgagcaagacaaagtacctgtcctcaaggagctcatagtataatgaggagattaacaagaaaatgtattattacaatttagtccagtgtcatagcataaggatgatgcgaggggaaaacccgagcagtgttgccaagaggaggaaataggccaatgtggtctgggacggttggatatacttaaacatcttaataatcagagtaattttcatttacaaagagaggtcggtacttaaaataaccctgaaaaataacactggaattccttttctagcattatatttattcctgatttgcctttgccatataatctaatgcttgtttatatagtgtctggtattgtttaacagttctgtcttttctatttaaatgccactaaattttaaattcatacctttccatgattcaaaattcaaaagatcccatgggagatggttggaaaatctccacttcatcctccaagccattcaagtttcctttccagaaagcaactgctactgcctttcattcatatgttcttctaaagatagtctacatttggaaatgtatgttaaaagcacgtatttttaaaatttttttcctaaatagtaacacattgtatgtctgctgtgtactttgctatttttatttattttagtgtttcttatatagcagatggaa

SEQ ID NO: 442178 - DNA, 851 bp, Homo sapiens
cgaggctccgcaccagccgcgcttctgtccgcctgcagggcattccagaaagatgaggatatttgctgtctttatattcatgacctactggcatttgctgaacgcatttactgtcacggttcccaaggacctatatgtggtagagtatggtagcaatatgacaattgaatgcaaattcccagtagaaaaacaattagacctggctgcactaattgtctattgggaaatggaggataagaacattattcaatttgtgcatggagaggaagacctgaaggttcagcatagtagctacagacagagggcccggctgttgaaggaccagctctccctgggaaatgctgcacttcagatcacagatgtgaaattgcaggatgcaggggtgtaccgctgcatgatcagctatggtggtgccgactacaagcgaattactgtgaaagtcaatgccccatacaacaaaatcaaccaaagaattttggttgtggatccagtcacctctgaacatgaactgacatgtcaggctgagggctaccccaaggccgaagtcatctggacaagcagtgaccatcaagtcctgagtggtaagaccaccaccaccaattccaagagagaggagaagcttttcaatgtgaccagcacactgagaatcaacacaacaactaatgagattttctactgcacttttaggagattagatcctgaggaaaaccatacagctgaattggtcatcccaggtaatattctgaatgtgtccattaaaatatgtctaacactgtcccctagcacctagcatgatgtctgcctatcatagtcattcagtgattgttgaataaatgaatgaatgaataaca

SEQ ID NO: 442179 - DNA, 2647 bp, Homo sapiens
cgaggctccgcaccagccgcgcttctgtccgcctgcagggcattccagaaagatgaggatatttgctgtctttatattcatgacctactggcatttgctgaacgcatttactgtcacggttcccaaggacctatatgtggtagagtatggtagcaatatgacaattgaatgcaaattcccagtagaaaaacaattagacctggctgcactaattgtctattgggaaatggaggataagaacattattcaatttgtgcatggagaggaagacctgaaggttcagcatagtagctacagacagagggcccggctgttgaaggaccagctctccctgggaaatgctgcacttcagatcacagatgtgaaattgcaggatgcaggggtgtaccgctgcatgatcagctatggtggtgccgactacaagcgaattactgtgaaagtcaatgccccatacaacaaaatcaaccaaagaattttggttgtggatccagtcacctctgaacatgaactgacatgtcaggctgagggctaccccaaggccgaagtcatctggacaagcagtgaccatcaagtcctgagtggtaagaccaccaccaccaattccaagagagaggagaagcttttcaatgtgaccagcacactgagaatcaacacaacaactaatgagattttctactgcacttttaggagattagatcctgaggaaaaccatacagctgaattggtcatcccagaactacctctggcacatcctccaaatgaaaggactcacttggtaattctgggagccatcttattatgccttggtgtagcactgacattcatcttccgtttaagaaaagggagaatgatggatgtgaaaaaatgtggcatccaagatacaaactcaaagaagcaaagtgatacacatttggaggagacgtaatccagcattggaacttctgatcttcaagcagggattctcaacctgtggtttaggggttcatcggggctgagcgtgacaagaggaaggaatgggcccgtgggatgcaggcaatgtgggacttaaaaggcccaagcactgaaaatggaacctggcgaaagcagaggaggagaatgaagaaagatggagtcaaacagggagcctggagggagaccttgatactttcaaatgcctgaggggctcatcgacgcctgtgacagggagaaaggatacttctgaacaaggagcctccaagcaaatcatccattgctcatcctaggaagacgggttgagaatccctaatttgagggtcagttcctgcagaagtgccctttgcctccactcaatgcctcaatttgttttctgcatgactgagagtctcagtgttggaacgggacagtatttatgtatgagtttttcctatttattttgagtctgtgaggtcttcttgtcatgtgagtgtggttgtgaatgatttcttttgaagatatattgtagtagatgttacaattttgtcgccaaactaaacttgctgcttaatgatttgctcacatctagtaaaacatggagtatttgtaaggtgcttggtctcctctataactacaagtatacattggaagcataaagatcaaaccgttggttgcataggatgtcacctttatttaacccattaatactctggttgacctaatcttattctcagacctcaagtgtctgtgcagtatctgttccatttaaatatcagctttacaattatgtggtagcctacacacataatctcatttcatcgctgtaaccaccctgttgtgataaccactattattttacccatcgtacagctgaggaagcaaacagattaagtaacttgcccaaaccagtaaatagcagacctcagactgccacccactgtccttttataatacaatttacagctatattttactttaagcaattcttttattcaaaaaccatttattaagtgcccttgcaatatcaatcgctgtgccaggcattgaatctacagatgtgagcaagacaaagtacctgtcctcaaggagctcatagtataatgaggagattaacaagaaaatgtattattacaatttagtccagtgtcatagcataaggatgatgcgaggggaaaacccgagcagtgttgccaagaggaggaaataggccaatgtggtctgggacggttggatatacttaaacatcttaataatcagagtaattttcatttacaaagagaggtcggtacttaaaataaccctgaaaaataacactggaattccttttctagcattatatttattcctgatttgcctttgccatataatctaatgcttgtttatatagtgtctggtattgtttaacagttctgtcttttctatttaaatgccactaaattttaaattcatacctttccatgattcaaaattcaaaagatcccatgggagatggttggaaaatctccacttcatcctccaagccattcaagtttcctttccagaaagcaactgctactgcctttcattcatatgttcttctaaagatagtctacatttggaaatgtatgttaaaagcacgtatttttaaaatttttttcctaaatagtaacacattgtatgtctgctgtgtactttgctatttttatttattttagtgtttcttatatagcagatggaa

SEQ ID NO: 442180 - DNA, 407 bp, Homo sapiens
gaaacaaaaggcctgagtgacttgactgtgggtttaacttgggggagggggtgcatgataacagaaatgtgagtgctcatcaccactttttctttggaatgtcttcttataacaaaaagatataaatagcataaagtgagctttaggagccacaagttgtagtacactttaagtgaatttatatatacacagaatagttttcaaaaggtcagatgataacatatgtttgtacttgtgaaattttgcaagacagcatttgagagcaaaagagaaaatctcggctttgctgaccacaagaggccatctatgttcttcattattttgtttcactgagtgaactgtgcaaggttcattgttgctggaactttcagaataaaagttgggacagacgcctctgctctctcgag

SEQ ID NO: 442181 - DNA, 10815 bp, Homo sapiens
  misc_feature (5850)..(5850): n is a, c, g, or t
catcatgcagcaggtcaaacaaggcatctcctagtattgcatcctacagatgtgctgtaaacatcaaaagaagacggtgggatcaggagatgctgttttggaaagaagtgaggtttagacttctccatgttaaccatgagcgtgacactttcccccctgaggtcacaggacctggatcccatggctactgatgcttcacccatggccatcaacatgacacccactgtggagcagggtgagggagaagaggcaatgaaggacatggactctgaccagcagtatgaaaagccacccccactacacacaggggctgactggaagattgtcctccacttacctgaaattgagacctggctccggatgacctcagagagggtccgagacctaacctattcagtccagcaggattcggacagcaagcatgtggatgtacatctagttcaactaaaggacatttgtgaagatatttctgatcatgttgagcaaatccatgccctccttgaaacagagttctccctaaagctgctgtcttactctgtcaacgtgatagtggacatccacgcagtgcagctcctctggcaccagcttcgagtctcagtgctggttctgcgggagcgcattctgcaaggtctgcaggacgccaatggcaactacactaggcagacggacattctgcaagctttctctgaagagacaaaagagggccggcttgattctctaacagaagtggatgactcaggacaattaaccatcaaatgttctcaaaattacttgtctctggattgtggcattactgcattcgaactgtctgactacagtccaagtgaggatttgctcagtgggctaggtgacatgacctctagccaagtcaaaaccaaaccctttgactcttggagctacagtgagatggaaaaggagtttcctgagcttatccgaagtgttggtttacttacggtagctgctgactctatctctaccaatggcagtgaagcagttactgaggaggtatctcaagtatctctctcagtagacgacaaaggtggatgtgaggaagacaatgcttctgcagtcgaagagcaaccaggcttaacactgggggtgtcatcatcttcaggagaagctctgacaaatgctgctcaaccctcctctgagactgtgcagcaagaatccagttcctcctcccatcatgatgcaaagaatcagcagcctgttccttgtgaaaatgcaacccccaaacgaaccatcagagattgctttaattataacgaggactctcccacgcagcctacattgccaaaaagaggactttttcttaaagaggaaacttttaagaatgatctgaaaggcaatggtggaaagaggcaaatggttgatctaaagcctgagatgagcagaagcaccccttcgctagtagatcctcctgacagatccaaactttgcctggtattgcagtcttcttaccccaacagcccttctgctgccagccagtcttatgagtgtttacacaaggtggggaatgggaaccttgaaaacacagtcaaatttcacattaaagaaatttcttccagcctgggaaggcttaacgactgctataaagagaaatctcgacttaaaaagccacacaagacctcagaagaggtgcctccatgccgaacacctaaacgggggactggttcaggcaaacaagctaaaaatacaaagagctcagcagtgccaaatggagagctttcttatacttccaaggccatagaggggccacaaacaaattctgcttccacatcctcacttgagccttgtaatcagagaagttggaatgccaaattgcaattgcagtcagaaacatccagttcaccagcttttactcagagcagtgaatcctctgttggctcagacaacatcatgtctccggtgccacttctttcaaaacacaaaagcaaaaaaggtcaagcctcctctccaagtcacgtcactaggaatggtgaggttgtggaggcctggtatggctctgatgaatacctagcactgccctctcaccttaagcagacagaagtattggctttgaagttggaaaacctaacaaagcttctgcctcagaaacccagaggagaaaccatccagaatattgatgactgggaactgtctgaaatgaattcagattctgaaatctatccaacctatcatgtcaaaaagaagcatacaaggctaggcagggtgtctccaagctcatctagtgacatagcctcttcactaggggagagcattgaatctgggcccctgagtgacattctttctgatgaggagtccagtatgcctctcgctggcatgaaaaagtatgctgatgagaagtcagaaagagcttcatcctctgagaaaaatgagagccattctgccactaaatcagctttaattcagaaactgatgcaagatattcagcaccaagacaactatgaagccatatgggaaaaaatagaggggtttgtaaacaaactggatgaattcattcaatggttaaatgaagccatggaaactacagagaattggactccccctaaagcagagatggatgaccttaaactgtatctggagacacacttgagttttaagttgaatgtagacagtcattgtgctctcaaggaagctgtggaggaggaaggacaccaacttcttgagcttattgcatctcacaaagcaggactgaaggacatgctgcggatgattgcaagtcaatggaaggagctgcagaggcaaatcaaacggcagcacagctggattctcagggctctggataccatcaaagccgagatactggctactgatgtgtctgtggaggatgaggaagggactggaagccccaaggctgaggttcaactatgctacctggaagcacaaagagatgctgttgagcagatgtccctcaagctgtacagcgagcagtataccagcagcagcaagcgaaaggaagagtttgctgatatgtcaaaagttcattcagtgggaagcaatgggcttctggactttgattcagaatatcaggagctctgggattggctgattgacatggagtcccttgtgatggacagccacgacctgatgatgtcagaggagcagcagcagcatctttacaagcgatacagtgtggaaatgtccatcagacacctgaaaaagacggagctgcttagtaaggttgaagctttgaagaaaggtggcgttttactaccaaatgatctccttgaaaaagtggattcaattaatgaaaaatgggaactgcttgggaaaaccctaggagagaagatccaggacacaatggcagggcacagtgggtcgagtccacgtgacctgctctctcctgaaagtggaagcctggtaaggcagctggaggtcaggatcaaagaactgaaaggatggctaagagatacagagcttttcatcttcaattcctgtctgagacaagaaaaggaaggaacaatgaatactgagaaacaactgcaatactttaagtccctctgtcgtgaaatcaagcaacgacgtcgaggagttgcctccattctgcgactatgccagcatcttttggatgaccgggagacttgcaatctgaatgcagaccaccagcccatgcagctgatcattgtaaatcttgaaagaaggtgggaagccattgtcatgcaagccgtccagtggcaaacacgtctacaaaagaagatgggaaaggaatctgagactttgaatgtgattgatcctggcttgatggacctaaatgggatgagtgaggatgccctggaatgggatgaaatggacataagtaacaagttaattagtttgaatgaggaatcaaatgaccttgatcaagaactccaacctgttatcccttccttgaagcttggagagacaagtaatgaggaccctggttatgacgaggaggctgataaccatgggggatctcagtatgcctcaaatattactgccccctctagtccacacatttaccaggtgtacagcctccacaatgttgaactctatgaggacaaccacatgccatttctgaaaaacaatccaaaggtcactggcatgacacagcctaatgttttaactaagagtctcagtaaagactcttcattttcatctaccaaatctttgccagatcttctaggtggttccaatttggtaaagccctgcgcatgtcatggaggagacatgagccagaattcaggcagtgagagtggaattgtcagtgaaggagacacagaaaccactaccaactctgaaatgtgcttgctcaatgcagtggatgggtccccaagtaaccttgaaactgaacatctggacccacaaatgggagatgcagttaacgtgttaaagcaaaaatttacagatgagggggaaagcattaagcttccaaatagctctcagtcgtccatttcaccagtgggttgtgtaaatggaaaagttggagatttaaacagtattaccaaacatacccctgactgtttgggagaagaattacaaggaaaacatgatgtgtttacattttatgattactcatacctccaaggctcaaaactcaaattaccaatgataatgaaacagtcacaaagcgaaaaagcgcatgtggaggatcccctgcttcgtggtttttattttgataaaaaatcatgcaaatctaaacatcagactacagagttacaaccagatgtacctccccatgaaaggattttggcaagtgcatctcatgaaatggatcgcatttcatataaaagtggcaatatagaaaagacattcactggcatgcagaatgccaaacagctctcccttttatctcatagttcatctattgagtccctttctccagggggtgatttatttggattgggcatctttaaaaatggcagtgacagcctccagcgaagcacttctttagaaagttggttgacttcctataaaagcaatgaagatctctttagctgtcacagctctggggatataagcgtgagcagtggctcagttggtgaactaagtaaaagaacattagatctcctgaatcgtttggagaatatccagagcccctcagagcaaaagataaaacgaagtgtttctgatatcactcttcaaagcagttcccaaaagatgtcctttactggccagatgtcattggacatagcatcttctatcaatgaagactcagcggcatctctaacagaacttagcagcagtgacgagctctctctttgctcagaggatattgtgttacacaagaacaagatcccggaatcgaatgcatcgttcaggaagcgtctgactcgttcagtggctgatgaaagcgatgtcaatgtcagcatgattgttaatgtctcttgcacctctgcttgcactgatgatgaagatgacagcgacctgctctccagctctacccttaccttgactgaagaagagctgtgcatcaaagatgaggatgacgactccagtattgcaacagatgatgaaatttatgaagactgcaccttgatgtcagggctagactacataaagaatgaattacagacctggattaggccaaaattgtctttgacaagagataagaaaaggtgcaatgtcagtgatgagatgaagggcagtaaagatataagtagcagtgagatgaccaatccctctgatactctgaatattgagacccttctaaatggctctgtaaaacgtgtctctgaaaataatggaaatggtaagaattcatctcatacccatgagttagggacaaagcgtgaaaataagaaaactattttcaaagttaataaagatccatatgtggctgacatggaaaatggcaatattgaaggtattccagaaaggcaaaagggnaaaccgaatgtgacttcaaaggtatcagaaaatcttggttcacatgggaaagagatttcagagagtgagcattgtaagtgtaaagcacttatggatagtttagatgattcaaatactgctggcaaggaatttgtttcccaagatgttagacatcttccaaagaaatgtccaaatcaccaccattttgaaaatcaaagcactgcctctactcccactgagaagtctttctcagaactggctttagaaaccaggtttaacaacagacaagactctgatgcactgaaatcatctgatgatgcaccgagtatggctggaaaatctgctggttgttgcctagcacttgaacaaaacggaacagaggaaaatgcttctatcagcaacatttcctgttgcaactgtgagccagatgttttccatcaaaaagatgccgaagattgttcagtacacaactttgttaaggaaatcattgacatggcttcgacagccctaaaaagtaaatctcaacctgaaaacgaggtggctgctcctacttcattaactcaaatcaaggagaaagtgttggagcattctcaccggcccatccagctgagaaaaggggacttttattcgtacttatctctctcatctcatgacagtgattgtggggaggtcaccaattacatagaagagaaaagcagcactccattgccactagacaccactgactcgggcttagatgacaaggaagatattgaatgcttttttgaggcctgtgttgagggtgactctgatggagaggagccttgtttctctagtgctcctccaaatgaatctgcagttcccagcgaagctgcaatgccactacaagcaacagcatgttcttctgagttcagtgatagttctctttcagctgatgatgcagatacagtggctctttcaagtccttcctctcaggaaagagctgaggttggaaaggaagtgaatggtttgccccaaacttccagtggctgtgcagaaaacttagagtttactccttcaaagcttgacagtgaaaaggaaagttccggaaaaccaggtgaatctggaatgccagaagaacataatgctgcttcagccaaatctaaagttcaagacctctccttgaaggcaaatcagccaacagacaaggccgcattgcatcccagccccaaaactttaacctgtgaagaaaatcttctaaaccttcatgaaaaacgacatagaaatatgcataggtagaatgtaccccctccccaagcatgaaaatcatctcactgaaagatacgcctggctgcaactcaggggtggcctcatcctcccgccctgggctggcctctggttccatcacgtttgtcactgccgtttattacattgacttctcccaagatgaatcttccttccaaatgtgttttctccacacaagccttgtgatctgaatgtgtgcgctggttctctttaggtgatcgtctttgaagttcagcaaagctgcttgttctcccatggattcctgtcccaagctacctctaccaaccctctctctccagctagacttttctctttgcctcctcccttcccttccactctttaaagttctgcagttcaccaactggtagtccattaaattctcctgtctagaatgacccccccaccagtacttgaccaatttcatgtatcaatctggatttttttttaacggtataatgactgtgtttattgaaagagttttacctaaaaagccaacatttgaattggttgcagcatagagaagaaacactggtccttctttcaaaattaagcaactattaaaagcgccattttatttatttcatttaaaaaataatctatgcagcatttcaagaaacaaccatatggtgttgtatattataaactggtgacattctactattgaattatgtacaacattttcattttttatgcttcttgaggtggtaatgagaaaaaagttttttaaaaaagtgtgccttgctgtatttcttataccatttattaaaaagctgctttcacggtaaaattatgttggtttgaaaggaggaaatagcaaggttaagatgtgtgaataatttctgtatatatgtataaccaagtacaaacattgatgtataatgacagtataaaatgctttcatgtttgtgatgtctagtgatgtggaaaatataagccttaaatccattagattgcatggtaattaaaattggcataataaacacagattattgggggaaaaggaaaattagtgatctcttctactatgttctttaccaaattgttgcatctggttctgaaaaagtatagcatgtagcagcttccaaacatattcatattgcttaagaggcttaacattacctaaactagagactagacgtaaagccttcagttttcaaaatctttctggtcactataaagatcttggaacagcaaatgattaaatgtcagttcccctaaaccaataaacatttatactagattttttatttccacttatcattaatgatttaatgttggatttcaggtaccttgtatgtcttaatttattttaaatatttattttgaatgagtttgatagaaagctagtagaaaagtacagaaaatttgactattatttatagatttcaggtatatttatatgtgtaaaagaaattgacaaagaaatatttcatctggcctttactgactcctgttaaatgcagttttaaatttatatcgtaacacctacttaagtgcctgacacagtaggtattcaataaaaatttactgaattaaaggattaaattaggtgacatggtgacatctatccctttattttgacactaaaacatggacacaactagaaagaggtacaatgcaatataaagtcacaatagataatatatatcaaatttctaaaaggtaaagaatgttgtgggttcatgcagtcacaggaatgacaatcattcaacagatagttcagaaacactttttatctgcaaggcactattctagatccagaagatgcaatgttgaacaaacagacaaagccctgccctcagaaggctgtcctgcattaggaacaagtgaacacgcaaatgacatgaagtatttgttgcagagctgaggaacagagcaaatgtagtgatagaagcgcaatgagagaagcagcagtgggtacaaggaggaagaaaaagggcttgcagagagtggaaagttagtggaatattcatgaaacttcattgcaggggtaatagaagaaaaagtaaattgggaggacttaatggaaggtcttttaaaaagttaacttggagcttctgtatgtaaaatgctaggtaataaggacactttgtacaggctgttttgcacctgattttatttatcattagtgccacgccaagatcatttagacgatgcttatctgtaattctaccactttaataactatttgtatttttatgccccttctgatcttttccatatgtatttctaaatggataaattattctaggcttcttaataggtagtaatttgttcaaaagcggttttagccagacatctagttgcagtgttcaagaggattatgggggaaagagattagagataattgtctagttagggggcagctggagaaaataagctaagtttgcaataacagagtacacaagtatagtggcccaggatgtagtgaaagaacaaatcctagagtctttgaaatttctaagggcattctagacctctgttgggatatggtattattttacatactgacacaacctaaattttctttgggtagtaactaatgtcaagtctacatcgactggtaaaacattcaaagaacaaactgacaatgatgttctacctacttgttacatgctcatggaagaccgtgcagtattgaaagtatttgttaattatctgcttagtattaacactaaatttgtagaatgactttcaggtttgttgaacaatgccttttcaggttggaagaagaaaaatagcctcaatctcccaccccatgtaggcactacctccccaattacccttagaaaatgatcacaccaactctgcctacacacttccagtgatagtggctcattgtctgttaaggcaaactgttccactgttgggcatatctctttgttagaaagttctttcttaggttgctaaaatctgcctagtaccccgctaccctgttctgtcttatggagcagcccagattatctttactccctctttctcatggcaaccctgaagataatcaaggccagttactcatcatctcccaaccactgtttcctcaactgcccttcatatgtcatggttttcagatccattccaacctgactgaatgttaacagacagaattcttcacattaaggaactgtcttcatcatcatacatgtagaaaagaatctgaacatttaagtgcgaagttttctctagaaatatattcaagatatgtttattctattattgtaaatttcaaacaataaataaataagaatccatgacttccttcagtggcccagtccagtgcctaagtcatctggaatcttctccttacatcgaatacaaacctaacctgtttccaagtagggcactccctccgcttatttattcatttattcagccattcagcaaacatttattaaatggctacctatgtgaggcactatatttggcattaggtatataaaggcaactaacacatggtatctgtctccaaaggtttacagcttttcttctgaaagtgccttttgtgtccttgaatagagtgattatgacttttgtctcaattaaatgatgacctcatttagtttctgatgaagtttctctacatttaagaaaatctagtgagcaaaacggtatacaaaaaatcatctggatctgactaccagaaaaagtaaagtggttttaattacagaaagaaaaatatttgttagatttctggtcactgaataaatatgcatcttatacaac

SEQ ID NO: 442182 - DNA, 610 bp, Homo sapiens
gcagtctgggagctgagtgactgaggatttgaaaccttgctatagttacagttcataacaagtgtctaggcagttagaccttaagtgttcaggtatggaaagaaagtcatatgttatgttttagattctgtttgtaaagctggttaactagagacagctgatgaaaaaccaaatcgacttgagttacaagatctgggctttctctgctctgctttcaacctgttggttggtggtggagtagctgacagaagcgaatggcttggctgagggacatgaagtgacagcagcctgtttaggaccacaccacattttggacctcttgctgtgcagttcaggacatttgtgaagatatttctgatcatgttgagcaaatccatgccctccttgaaacagagttctccctaaagctgctgtcttactctgtcaacgtgatagtggacatccacgcagtgcagctcctctggcaccagcttcgagtctcagtgctggttctgcgggagcgcattctgcaaggtctgcaggacgccaatggcaactacactaggcagacggacattctgcaagctttctctgaagagacaaaagaggtgagtgttttccttgaagttaa

SEQ ID NO: 442183 - DNA, 7925 bp, Homo sapiens
  misc_feature (2960)..(2960): n is a, c, g, or t
ccaacaaatagtgcagtaataatccagtatctaattttcgctttcagaacattattgctttgttaatcaagcttcggaagaggaatattgcttatctttttttttcagataatagattttatatataaaaatctttgcaatcttgtttaacttgttctcagccagtagaaaactgaactttttgcctccaaagaatgtaggagtaaatttggaaaaattctatttcttttcggaggatttttctatcttctgcgtttccttcgaccttatgtcaaagcatgtcaatctgtttggcattcatgtgacctaaatgatttatttcattaggctagaaattgttaattacccaggtgtctagggaggaccctacatttcggagggataaatcagtgaaaagtgtggaggaatgggatgcagctaaattctttagcatattggacttctgtaggaggcctccattctaaaagggacatcagagctcttcttgtcctattgttggtagctgagtgtatcactacaatttgaaattatgatggaagaaggtgtttcatgttttagggaactctgccctataaacactcatagattggtttctctctatgttgcagtccctctgtcgtgaaatcaagcaacgacgtcgaggagttgcctccattctgcgactatgccagcatcttttggatgaccgggagacttgcaatctgaatgcagaccaccagcccatgcagctgatcattgtaaatcttgaaagaaggtgggaagccattgtcatgcaagccgtccagtggcaaacacgtctacaaaagaagatgggaaaggaatctgagactttgaatgtgattgatcctggcttgatggacctaaatgggatgagtgaggatgccctggaatgggatgaaatggacataagtaacaagttaattagtttgaatgaggaatcaaatgaccttgatcaagaactccaacctgttatcccttccttgaagcttggagagacaagtaatgaggaccctggttatgacgaggaggctgataaccatgggggatctcagtatgcctcaaatattactgccccctctagtccacacatttaccaggtgtacagcctccacaatgttgaactctatgaggacaaccacatgccatttctgaaaaacaatccaaaggtcactggcatgacacagcctaatgttttaactaagagtctcagtaaagactcttcattttcatctaccaaatctttgccagatcttctaggtggttccaatttggtaaagccctgcgcatgtcatggaggagacatgagccagaattcaggcagtgagagtggaattgtcagtgaaggagacacagaaaccactaccaactctgaaatgtgcttgctcaatgcagtggatgggtccccaagtaaccttgaaactgaacatctggacccacaaatgggagatgcagttaacgtgttaaagcaaaaatttacagatgagggggaaagcattaagcttccaaatagctctcagtcgtccatttcaccagtgggttgtgtaaatggaaaagttggagatttaaacagtattaccaaacatacccctgactgtttgggagaagaattacaaggaaaacatgatgtgtttacattttatgattactcatacctccaaggctcaaaactcaaattaccaatgataatgaaacagtcacaaagcgaaaaagcgcatgtggaggatcccctgcttcgtggtttttattttgataaaaaatcatgcaaatctaaacatcagactacagagttacaaccagatgtacctccccatgaaaggattttggcaagtgcatctcatgaaatggatcgcatttcatataaaagtggcaatatagaaaagacattcactggcatgcagaatgccaaacagctctcccttttatctcatagttcatctattgagtccctttctccagggggtgatttatttggattgggcatctttaaaaatggcagtgacagcctccagcgaagcacttctttagaaagttggttgacttcctataaaagcaatgaagatctctttagctgtcacagctctggggatataagcgtgagcagtggctcagttggtgaactaagtaaaagaacattagatctcctgaatcgtttggagaatatccagagcccctcagagcaaaagataaaacgaagtgtttctgatatcactcttcaaagcagttcccaaaagatgtcctttactggccagatgtcattggacatagcatcttctatcaatgaagactcagcggcatctctaacagaacttagcagcagtgacgagctctctctttgctcagaggatattgtgttacacaagaacaagatcccggaatcgaatgcatcgttcaggaagcgtctgactcgttcagtggctgatgaaagcgatgtcaatgtcagcatgattgttaatgtctcttgcacctctgcttgcactgatgatgaagatgacagcgacctgctctccagctctacccttaccttgactgaagaagagctgtgcatcaaagatgaggatgacgactccagtattgcaacagatgatgaaatttatgaagactgcaccttgatgtcagggctagactacataaagaatgaattacagacctggattaggccaaaattgtctttgacaagagataagaaaaggtgcaatgtcagtgatgagatgaagggcagtaaagatataagtagcagtgagatgaccaatccctctgatactctgaatattgagacccttctaaatggctctgtaaaacgtgtctctgaaaataatggaaatggtaagaattcatctcatacccatgagttagggacaaagcgtgaaaataagaaaactattttcaaagttaataaagatccatatgtggctgacatggaaaatggcaatattgaaggtattccagaaaggcaaaagggnaaaccgaatgtgacttcaaaggtatcagaaaatcttggttcacatgggaaagagatttcagagagtgagcattgtaagtgtaaagcacttatggatagtttagatgattcaaatactgctggcaaggaatttgtttcccaagatgttagacatcttccaaagaaatgtccaaatcaccaccattttgaaaatcaaagcactgcctctactcccactgagaagtctttctcagaactggctttagaaaccaggtttaacaacagacaagactctgatgcactgaaatcatctgatgatgcaccgagtatggctggaaaatctgctggttgttgcctagcacttgaacaaaacggaacagaggaaaatgcttctatcagcaacatttcctgttgcaactgtgagccagatgttttccatcaaaaagatgccgaagattgttcagtacacaactttgttaaggaaatcattgacatggcttcgacagccctaaaaagtaaatctcaacctgaaaacgaggtggctgctcctacttcattaactcaaatcaaggagaaagtgttggagcattctcaccggcccatccagctgagaaaaggggacttttattcgtacttatctctctcatctcatgacagtgattgtggggaggtcaccaattacatagaagagaaaagcagcactccattgccactagacaccactgactcgggcttagatgacaaggaagatattgaatgcttttttgaggcctgtgttgagggtgactctgatggagaggagccttgtttctctagtgctcctccaaatgaatctgcagttcccagcgaagctgcaatgccactacaagcaacagcatgttcttctgagttcagtgatagttctctttcagctgatgatgcagatacagtggctctttcaagtccttcctctcaggaaagagctgaggttggaaaggaagtgaatggtttgccccaaacttccagtggctgtgcagaaaacttagagtttactccttcaaagcttgacagtgaaaaggaaagttccggaaaaccaggtgaatctggaatgccagaagaacataatgctgcttcagccaaatctaaagttcaagacctctccttgaaggcaaatcagccaacagacaaggccgcattgcatcccagccccaaaactttaacctgtgaagaaaatcttctaaaccttcatgaaaaacgacatagaaatatgcataggtagaatgtaccccctccccaagcatgaaaatcatctcactgaaagatacgcctggctgcaactcaggggtggcctcatcctcccgccctgggctggcctctggttccatcacgtttgtcactgccgtttattacattgacttctcccaagatgaatcttccttccaaatgtgttttctccacacaagccttgtgatctgaatgtgtgcgctggttctctttaggtgatcgtctttgaagttcagcaaagctgcttgttctcccatggattcctgtcccaagctacctctaccaaccctctctctccagctagacttttctctttgcctcctcccttcccttccactctttaaagttctgcagttcaccaactggtagtccattaaattctcctgtctagaatgacccccccaccagtacttgaccaatttcatgtatcaatctggatttttttttaacggtataatgactgtgtttattgaaagagttttacctaaaaagccaacatttgaattggttgcagcatagagaagaaacactggtccttctttcaaaattaagcaactattaaaagcgccattttatttatttcatttaaaaaataatctatgcagcatttcaagaaacaaccatatggtgttgtatattataaactggtgacattctactattgaattatgtacaacattttcattttttatgcttcttgaggtggtaatgagaaaaaagttttttaaaaaagtgtgccttgctgtatttcttataccatttattaaaaagctgctttcacggtaaaattatgttggtttgaaaggaggaaatagcaaggttaagatgtgtgaataatttctgtatatatgtataaccaagtacaaacattgatgtataatgacagtataaaatgctttcatgtttgtgatgtctagtgatgtggaaaatataagccttaaatccattagattgcatggtaattaaaattggcataataaacacagattattgggggaaaaggaaaattagtgatctcttctactatgttctttaccaaattgttgcatctggttctgaaaaagtatagcatgtagcagcttccaaacatattcatattgcttaagaggcttaacattacctaaactagagactagacgtaaagccttcagttttcaaaatctttctggtcactataaagatcttggaacagcaaatgattaaatgtcagttcccctaaaccaataaacatttatactagattttttatttccacttatcattaatgatttaatgttggatttcaggtaccttgtatgtcttaatttattttaaatatttattttgaatgagtttgatagaaagctagtagaaaagtacagaaaatttgactattatttatagatttcaggtatatttatatgtgtaaaagaaattgacaaagaaatatttcatctggcctttactgactcctgttaaatgcagttttaaatttatatcgtaacacctacttaagtgcctgacacagtaggtattcaataaaaatttactgaattaaaggattaaattaggtgacatggtgacatctatccctttattttgacactaaaacatggacacaactagaaagaggtacaatgcaatataaagtcacaatagataatatatatcaaatttctaaaaggtaaagaatgttgtgggttcatgcagtcacaggaatgacaatcattcaacagatagttcagaaacactttttatctgcaaggcactattctagatccagaagatgcaatgttgaacaaacagacaaagccctgccctcagaaggctgtcctgcattaggaacaagtgaacacgcaaatgacatgaagtatttgttgcagagctgaggaacagagcaaatgtagtgatagaagcgcaatgagagaagcagcagtgggtacaaggaggaagaaaaagggcttgcagagagtggaaagttagtggaatattcatgaaacttcattgcaggggtaatagaagaaaaagtaaattgggaggacttaatggaaggtcttttaaaaagttaacttggagcttctgtatgtaaaatgctaggtaataaggacactttgtacaggctgttttgcacctgattttatttatcattagtgccacgccaagatcatttagacgatgcttatctgtaattctaccactttaataactatttgtatttttatgccccttctgatcttttccatatgtatttctaaatggataaattattctaggcttcttaataggtagtaatttgttcaaaagcggttttagccagacatctagttgcagtgttcaagaggattatgggggaaagagattagagataattgtctagttagggggcagctggagaaaataagctaagtttgcaataacagagtacacaagtatagtggcccaggatgtagtgaaagaacaaatcctagagtctttgaaatttctaagggcattctagacctctgttgggatatggtattattttacatactgacacaacctaaattttctttgggtagtaactaatgtcaagtctacatcgactggtaaaacattcaaagaacaaactgacaatgatgttctacctacttgttacatgctcatggaagaccgtgcagtattgaaagtatttgttaattatctgcttagtattaacactaaatttgtagaatgactttcaggtttgttgaacaatgccttttcaggttggaagaagaaaaatagcctcaatctcccaccccatgtaggcactacctccccaattacccttagaaaatgatcacaccaactctgcctacacacttccagtgatagtggctcattgtctgttaaggcaaactgttccactgttgggcatatctctttgttagaaagttctttcttaggttgctaaaatctgcctagtaccccgctaccctgttctgtcttatggagcagcccagattatctttactccctctttctcatggcaaccctgaagataatcaaggccagttactcatcatctcccaaccactgtttcctcaactgcccttcatatgtcatggttttcagatccattccaacctgactgaatgttaacagacagaattcttcacattaaggaactgtcttcatcatcatacatgtagaaaagaatctgaacatttaagtgcgaagttttctctagaaatatattcaagatatgtttattctattattgtaaatttcaaacaataaataaataagaatccatgacttccttcagtggcccagtccagtgcctaagtcatctggaatcttctccttacatcgaatacaaacctaacctgtttccaagtagggcactccctccgcttatttattcatttattcagccattcagcaaacatttattaaatggctacctatgtgaggcactatatttggcattaggtatataaaggcaactaacacatggtatctgtctccaaaggtttacagcttttcttctgaaagtgccttttgtgtccttgaatagagtgattatgacttttgtctcaattaaatgatgacctcatttagtttctgatgaagtttctctacatttaagaaaatctagtgagcaaaacggtatacaaaaaatcatctggatctgactaccagaaaaagtaaagtggttttaattacagaaagaaaaatatttgttagatttctggtcactgaataaatatgcatcttatacaac

SEQ ID NO: 442184 - DNA, 3822 bp, Homo sapiens
catcatgcagcaggtcaaacaaggcatctcctagtattgcatcctacagatgtgctgtaaacatcaaaagaagacggtgggatcaggagatgctgttttggaaagaagtgaggtttagacttctccatgttaaccatgagcgtgacactttcccccctgaggtcacaggacctggatcccatggctactgatgcttcacccatggccatcaacatgacacccactgtggagcagggtgagggagaagaggcaatgaaggacatggactctgaccagcagtatgaaaagccacccccactacacacaggggctgactggaagattgtcctccacttacctgaaattgagacctggctccggatgacctcagagagggtccgagacctaacctattcagtccagcaggattcggacagcaagcatgtggatgtacatctagttcaactaaaggacatttgtgaagatatttctgatcatgttgagcaaatccatgccctccttgaaacagagttctccctaaagctgctgtcttactctgtcaacgtgatagtggacatccacgcagtgcagctcctctggcaccagcttcgagtctcagtgctggttctgcgggagcgcattctgcaaggtctgcaggacgccaatggcaactacactaggcagacggacattctgcaagctttctctgaagagacaaaagagggccggcttgattctctaacagaagtggatgactcaggacaattaaccatcaaatgttctcaaaattacttgtctctggattgtggcattactgcattcgaactgtctgactacagtccaagtgaggatttgctcagtgggctaggtgacatgacctctagccaagtcaaaaccaaaccctttgactcttggagctacagtgagatggaaaaggagtttcctgagcttatccgaagtgttggtttacttacggtagctgctgactctatctctaccaatggcagtgaagcagttactgaggaggtatctcaagtatctctctcagtagacgacaaaggtggatgtgaggaagacaatgcttctgcagtcgaagagcaaccaggcttaacactgggggtgtcatcatcttcaggagaagctctgacaaatgctgctcaaccctcctctgagactgtgcagcaagaatccagttcctcctcccatcatgatgcaaagaatcagcagcctgttccttgtgaaaatgcaacccccaaacgaaccatcagagattgctttaattataacgaggactctcccacgcagcctacattgccaaaaagaggactttttcttaaagaggaaacttttaagaatgatctgaaaggcaatggtggaaagaggcaaatggttgatctaaagcctgagatgagcagaagcaccccttcgctagtagatcctcctgacagatccaaactttgcctggtattgcagtcttcttaccccaacagcccttctgctgccagccagtcttatgagtgtttacacaaggtggggaatgggaaccttgaaaacacagtcaaatttcacattaaagaaatttcttccagcctgggaaggcttaacgactgctataaagagaaatctcgacttaaaaagccacacaagacctcagaagaggtgcctccatgccgaacacctaaacgggggactggttcaggcaaacaagctaaaaatacaaagagctcagcagtgccaaatggagagctttcttatacttccaaggccatagaggggccacaaacaaattctgcttccacatcctcacttgagccttgtaatcagagaagttggaatgccaaattgcaattgcagtcagaaacatccagttcaccagcttttactcagagcagtgaatcctctgttggctcagacaacatcatgtctccggtgccacttctttcaaaacacaaaagcaaaaaaggtcaagcctcctctccaagtcacgtcactaggaatggtgaggttgtggaggcctggtatggctctgatgaatacctagcactgccctctcaccttaagcagacagaagtattggctttgaagttggaaaacctaacaaagcttctgcctcagaaacccagaggagaaaccatccagaatattgatgactgggaactgtctgaaatgaattcagattctgaaatctatccaacctatcatgtcaaaaagaagcatacaaggctaggcagggtgtctccaagctcatctagtgacatagcctcttcactaggggagagcattgaatctgggcccctgagtgacattctttctgatgaggagtccagtatgcctctcgctggcatgaaaaagtatgctgatgagaagtcagaaagagcttcatcctctgagaaaaatgagagccattctgccactaaatcagctttaattcagaaactgatgcaagatattcagcaccaagacaactatgaagccatatgggaaaaaatagaggggtttgtaaacaaactggatgaattcattcaatggttaaatgaagccatggaaactacagagaattggactccccctaaagcagagatggatgaccttaaactgtatctggagacacacttgagttttaagttgaatgtagacagtcattgtgctctcaaggaagctgtggaggaggaaggacaccaacttcttgagcttattgcatctcacaaagcaggactgaaggacatgctgcggatgattgcaagtcaatggaaggagctgcagaggcaaatcaaacggcagcacagctggattctcagggctctggataccatcaaagccgagatactggctactgatgtgtctgtggaggatgaggaagggactggaagccccaaggctgaggttcaactatgctacctggaagcacaaagagatgctgttgagcagatgtccctcaagctgtacagcgagcagtataccagcagcagcaagcgaaaggaagagtttgctgatatgtcaaaagttcattcagtgggaagcaatgggcttctggactttgattcagaatatcaggagctctgggattggctgattgacatggagtcccttgtgatggacagccacgacctgatgatgtcagaggagcagcagcagcatctttacaagcgatacagtgtggaaatgtccatcagacacctgaaaaagacggagctgcttagtaaggttgaagctttgaagaaaggtggcgttttactaccaaatgatctccttgaaaaagtggattcaattaatgaaaaatgggaactgcttgggaaaaccctaggagagaagatccaggacacaatggcagggcacagtgggtcgagtccacgtgacctgctctctcctgaaagtggaagcctggtaaggcagctggaggtcaggatcaaagaactgaaaggatggctaagagatacagagcttttcatcttcaattcctgtctgagacaagaaaaggaaggaacaatgaatactgagaaacaactgcaatactttaagtccctctgtcgtgaaatcaagcaacgacgtcgaggagttgcctccattctgcgactatgccagcatcttttggatgaccgggagacttgcaatctgaatgcagaccaccagcccatgcagctgatcattgtaaatcttgaaagaaggtgggaagccattgtcatgcaagccgtccagtggcaaacacgtctacaaaagaagatgggaaaggaatctgtgagtgatgctttttttaagcataattgtctgtcattttctcagacaaaaaataattctttcaggcttggaaacggtgttcatcttataaatggttttactaactaa

SEQ ID NO: 442185 - DNA, 327 bp, Homo sapiens
  misc_feature (308)..(308): n is a, c, g, or t
ccatagtggcaacgtggtcgactcagccaacagacaaggccgcattgcatcccgccctgggctggcctctggttccatcacgttgtcactgccgtttattacattgacttctcccaagcatgaaaatcatctcactgaaagatacgcctggctgcaactcaggggtggcctcatcctcccgccctgggctggcctctggttccatcacgtttgtcactgccgtttattacattgacttctcccaagatgaaaatcatctcactgaaagatacgcctggctgcaactcaggggtggcctcatcctcccngaccacgtctgccacatgg

SEQ ID NO: 442186 - DNA, 7314 bp, Homo sapiens
  misc_feature (5850)..(5850): n is a, c, g, or t
  misc_feature (7295)..(7295): n is a, c, g, or t
catcatgcagcaggtcaaacaaggcatctcctagtattgcatcctacagatgtgctgtaaacatcaaaagaagacggtgggatcaggagatgctgttttggaaagaagtgaggtttagacttctccatgttaaccatgagcgtgacactttcccccctgaggtcacaggacctggatcccatggctactgatgcttcacccatggccatcaacatgacacccactgtggagcagggtgagggagaagaggcaatgaaggacatggactctgaccagcagtatgaaaagccacccccactacacacaggggctgactggaagattgtcctccacttacctgaaattgagacctggctccggatgacctcagagagggtccgagacctaacctattcagtccagcaggattcggacagcaagcatgtggatgtacatctagttcaactaaaggacatttgtgaagatatttctgatcatgttgagcaaatccatgccctccttgaaacagagttctccctaaagctgctgtcttactctgtcaacgtgatagtggacatccacgcagtgcagctcctctggcaccagcttcgagtctcagtgctggttctgcgggagcgcattctgcaaggtctgcaggacgccaatggcaactacactaggcagacggacattctgcaagctttctctgaagagacaaaagagggccggcttgattctctaacagaagtggatgactcaggacaattaaccatcaaatgttctcaaaattacttgtctctggattgtggcattactgcattcgaactgtctgactacagtccaagtgaggatttgctcagtgggctaggtgacatgacctctagccaagtcaaaaccaaaccctttgactcttggagctacagtgagatggaaaaggagtttcctgagcttatccgaagtgttggtttacttacggtagctgctgactctatctctaccaatggcagtgaagcagttactgaggaggtatctcaagtatctctctcagtagacgacaaaggtggatgtgaggaagacaatgcttctgcagtcgaagagcaaccaggcttaacactgggggtgtcatcatcttcaggagaagctctgacaaatgctgctcaaccctcctctgagactgtgcagcaagaatccagttcctcctcccatcatgatgcaaagaatcagcagcctgttccttgtgaaaatgcaacccccaaacgaaccatcagagattgctttaattataacgaggactctcccacgcagcctacattgccaaaaagaggactttttcttaaagaggaaacttttaagaatgatctgaaaggcaatggtggaaagaggcaaatggttgatctaaagcctgagatgagcagaagcaccccttcgctagtagatcctcctgacagatccaaactttgcctggtattgcagtcttcttaccccaacagcccttctgctgccagccagtcttatgagtgtttacacaaggtggggaatgggaaccttgaaaacacagtcaaatttcacattaaagaaatttcttccagcctgggaaggcttaacgactgctataaagagaaatctcgacttaaaaagccacacaagacctcagaagaggtgcctccatgccgaacacctaaacgggggactggttcaggcaaacaagctaaaaatacaaagagctcagcagtgccaaatggagagctttcttatacttccaaggccatagaggggccacaaacaaattctgcttccacatcctcacttgagccttgtaatcagagaagttggaatgccaaattgcaattgcagtcagaaacatccagttcaccagcttttactcagagcagtgaatcctctgttggctcagacaacatcatgtctccggtgccacttctttcaaaacacaaaagcaaaaaaggtcaagcctcctctccaagtcacgtcactaggaatggtgaggttgtggaggcctggtatggctctgatgaatacctagcactgccctctcaccttaagcagacagaagtattggctttgaagttggaaaacctaacaaagcttctgcctcagaaacccagaggagaaaccatccagaatattgatgactgggaactgtctgaaatgaattcagattctgaaatctatccaacctatcatgtcaaaaagaagcatacaaggctaggcagggtgtctccaagctcatctagtgacatagcctcttcactaggggagagcattgaatctgggcccctgagtgacattctttctgatgaggagtccagtatgcctctcgctggcatgaaaaagtatgctgatgagaagtcagaaagagcttcatcctctgagaaaaatgagagccattctgccactaaatcagctttaattcagaaactgatgcaagatattcagcaccaagacaactatgaagccatatgggaaaaaatagaggggtttgtaaacaaactggatgaattcattcaatggttaaatgaagccatggaaactacagagaattggactccccctaaagcagagatggatgaccttaaactgtatctggagacacacttgagttttaagttgaatgtagacagtcattgtgctctcaaggaagctgtggaggaggaaggacaccaacttcttgagcttattgcatctcacaaagcaggactgaaggacatgctgcggatgattgcaagtcaatggaaggagctgcagaggcaaatcaaacggcagcacagctggattctcagggctctggataccatcaaagccgagatactggctactgatgtgtctgtggaggatgaggaagggactggaagccccaaggctgaggttcaactatgctacctggaagcacaaagagatgctgttgagcagatgtccctcaagctgtacagcgagcagtataccagcagcagcaagcgaaaggaagagtttgctgatatgtcaaaagttcattcagtgggaagcaatgggcttctggactttgattcagaatatcaggagctctgggattggctgattgacatggagtcccttgtgatggacagccacgacctgatgatgtcagaggagcagcagcagcatctttacaagcgatacagtgtggaaatgtccatcagacacctgaaaaagacggagctgcttagtaaggttgaagctttgaagaaaggtggcgttttactaccaaatgatctccttgaaaaagtggattcaattaatgaaaaatgggaactgcttgggaaaaccctaggagagaagatccaggacacaatggcagggcacagtgggtcgagtccacgtgacctgctctctcctgaaagtggaagcctggtaaggcagctggaggtcaggatcaaagaactgaaaggatggctaagagatacagagcttttcatcttcaattcctgtctgagacaagaaaaggaaggaacaatgaatactgagaaacaactgcaatactttaagtccctctgtcgtgaaatcaagcaacgacgtcgaggagttgcctccattctgcgactatgccagcatcttttggatgaccgggagacttgcaatctgaatgcagaccaccagcccatgcagctgatcattgtaaatcttgaaagaaggtgggaagccattgtcatgcaagccgtccagtggcaaacacgtctacaaaagaagatgggaaaggaatctgagactttgaatgtgattgatcctggcttgatggacctaaatgggatgagtgaggatgccctggaatgggatgaaatggacataagtaacaagttaattagtttgaatgaggaatcaaatgaccttgatcaagaactccaacctgttatcccttccttgaagcttggagagacaagtaatgaggaccctggttatgacgaggaggctgataaccatgggggatctcagtatgcctcaaatattactgccccctctagtccacacatttaccaggtgtacagcctccacaatgttgaactctatgaggacaaccacatgccatttctgaaaaacaatccaaaggtcactggcatgacacagcctaatgttttaactaagagtctcagtaaagactcttcattttcatctaccaaatctttgccagatcttctaggtggttccaatttggtaaagccctgcgcatgtcatggaggagacatgagccagaattcaggcagtgagagtggaattgtcagtgaaggagacacagaaaccactaccaactctgaaatgtgcttgctcaatgcagtggatgggtccccaagtaaccttgaaactgaacatctggacccacaaatgggagatgcagttaacgtgttaaagcaaaaatttacagatgagggggaaagcattaagcttccaaatagctctcagtcgtccatttcaccagtgggttgtgtaaatggaaaagttggagatttaaacagtattaccaaacatacccctgactgtttgggagaagaattacaaggaaaacatgatgtgtttacattttatgattactcatacctccaaggctcaaaactcaaattaccaatgataatgaaacagtcacaaagcgaaaaagcgcatgtggaggatcccctgcttcgtggtttttattttgataaaaaatcatgcaaatctaaacatcagactacagagttacaaccagatgtacctccccatgaaaggattttggcaagtgcatctcatgaaatggatcgcatttcatataaaagtggcaatatagaaaagacattcactggcatgcagaatgccaaacagctctcccttttatctcatagttcatctattgagtccctttctccagggggtgatttatttggattgggcatctttaaaaatggcagtgacagcctccagcgaagcacttctttagaaagttggttgacttcctataaaagcaatgaagatctctttagctgtcacagctctggggatataagcgtgagcagtggctcagttggtgaactaagtaaaagaacattagatctcctgaatcgtttggagaatatccagagcccctcagagcaaaagataaaacgaagtgtttctgatatcactcttcaaagcagttcccaaaagatgtcctttactggccagatgtcattggacatagcatcttctatcaatgaagactcagcggcatctctaacagaacttagcagcagtgacgagctctctctttgctcagaggatattgtgttacacaagaacaagatcccggaatcgaatgcatcgttcaggaagcgtctgactcgttcagtggctgatgaaagcgatgtcaatgtcagcatgattgttaatgtctcttgcacctctgcttgcactgatgatgaagatgacagcgacctgctctccagctctacccttaccttgactgaagaagagctgtgcatcaaagatgaggatgacgactccagtattgcaacagatgatgaaatttatgaagactgcaccttgatgtcagggctagactacataaagaatgaattacagacctggattaggccaaaattgtctttgacaagagataagaaaaggtgcaatgtcagtgatgagatgaagggcagtaaagatataagtagcagtgagatgaccaatccctctgatactctgaatattgagacccttctaaatggctctgtaaaacgtgtctctgaaaataatggaaatggtaagaattcatctcatacccatgagttagggacaaagcgtgaaaataagaaaactattttcaaagttaataaagatccatatgtggctgacatggaaaatggcaatattgaaggtattccagaaaggcaaaagggnaaaccgaatgtgacttcaaaggtatcagaaaatcttggttcacatgggaaagagatttcagagagtgagcattgtaagtgtaaagcacttatggatagtttagatgattcaaatactgctggcaaggaatttgtttcccaagatgttagacatcttccaaagaaatgtccaaatcaccaccattttgaaaatcaaagcactgcctctactcccactgagaagtctttctcagaactggctttagaaaccaggtttaacaacagacaagactctgatgcactgaaatcatctgatgatgcaccgagtatggctggaaaatctgctggttgttgcctagcacttgaacaaaacggaacagaggaaaatgcttctatcagcaacatttcctgttgcaactgtgagccagatgttttccatcaaaaagatgccgaagattgttcagtacacaactttgttaaggaaatcattgacatggcttcgacagccctaaaaagtaaatctcaacctgaaaacgaggtggctgctcctacttcattaactcaaatcaaggagaaagtgttggagcattctcaccggcccatccagctgagaaaaggggacttttattcgtacttatctctctcatctcatgacagtgattgtggggaggtcaccaattacatagaagagaaaagcagcactccattgccactagacaccactgactcgggcttagatgacaaggaagatattgaatgcttttttgaggcctgtgttgagggtgactctgatggagaggagccttgtttctctagtgctcctccaaatgaatctgcagttcccagcgaagctgcaatgccactacaagcaacagcatgttcttctgagttcagtgatagttctctttcagctgatgatgcagatacagtggctctttcaagtccttcctctcaggaaagagctgaggttggaaaggaagtgaatggtttgccccaaacttccagtggctgtgcagaaaacttagagtttactccttcaaagcttgacagtgaaaaggaaagttccggaaaaccaggtgaatctggaatgccagaagaacataatgctgcttcagccaaatctaaagttcaagacctctccttgaaggcaaatcagccaacagacaaggccgcattgcatcccagccccaaaactttaacctgtgaagaaaatcttctaaaccttcatgaaaaacgacatagaaatatgcataggtagaatgtaccccctccccaagcatgaaaatcatctcactgaaagatacgcctggctgcaactcaggggtggcctcatcctcccgccctgggctggcctctggttccatcacgtttgtcactgccgtttattacattgacttctcccaagatgaaaatcatctcactgaaagatacgcctggctgcaactcaggggtggcctcatcctcccngaccacgtctgccacatgg

SEQ ID NO: 442187 - DNA, 269 bp, Homo sapiens
aaaggaaagttccggaaaaccaggtgaatctggaatgccagaagaacataatgctgcttcagccaaatctaaagttcaagacctctccttgaaggcaaatcagccaacagacaaggccgcattgcatcccagccccaaaactttaacctgtgaagaaaatcttctaaaccttcatgaaaaacgacatagaaatatgcataggtagaatgtaccccctccccaagcatgaaaatcatctcactgaaaggtacgtatagtcctcatgccgt

SEQ ID NO: 442188 - DNA, 4495 bp, Homo sapiens
ccagggactctgcctctaaggatgatgtctgccttggcctgccatgcctggaattccaattcatctttactggttctaaaggttttataggatcacattgacaaaagtaccatggagttttatgagtcagcatattttattgttcttattccttcaatagttattacagtaattttcctcttcttctggcttttcatgaaagaaacattatatgatgaagttcttgcaaaacagaaaagagaacaaaagcttattcctaccaaaacagataaaaagaaagcagaaaagaaaaagaataaaaagaaagaaatccagaatggaaacctccatgaatccgactctgagagtgtacctcgagactttaaattatcagatgctttggcagtagaagatgatcaagttgcacctgttccattgaatgtcgttgaaacttcaagtagtgttagggaaagaaaaaagaaggaaaagaaacaaaagcctgtgcttgaagagcaggtcatcaaagaaagtgacgcatcaaagattcctggcaaaaaagtagaacctgtcccagttactaaacagcccacccctccctctgaagcagctgcctcgaagaagaaaccagggcagaagaagtctaaaaatggaagcgatgaccaggataaaaaggtggaaactctcatggtaccatcaaaaaggcaagaagcattgcccctccaccaagagactaaacaagaaagtggatcagggaagaagaaagcttcatcaaagaaacaaaagacagaaaatgtcttcgtagatgaaccccttattcatgcaactacttatattcctttgatggataatgctgactcaagtcctgtggtagataagagagaggttattgatttgcttaaacctgaccaagtagaagggatccagaaatctgggactaaaaaactgaagaccgaaactgacaaagaaaatgctgaagtgaagtttaaagattttcttctgtccttgaagactatgatgttttctgaagatgaggctctttgtgttgtagacttgctaaaggagaagtctggtgtaatacaagatgctttaaagaagtcaagtaagggagaattgactacgcttatacatcagcttcaagaaaaggacaagttactcgctgctgtgaaggaagatgctgctgctacaaaggatcggtgtaagcagttaacccaggaaatgatgacagagaaagaaagaagcaatgtggttataacaaggatgaaagatcgaattggaacattagaaaaggaacataatgtatttcaaaacaaaatacatgtcagttatcaagagactcaacagatgcagatgaagtttcagcaagttcgtgagcagatggaggcagagatagctcacttgaagcaggaaaatggtatactgagagatgcagtcagcaacactacaaatcaactggaaagcaagcagtctgcagaactaaataaactacgccaggattatgctaggttggtgaatgagctgactgagaaaacaggaaagctacagcaagaggaagtccaaaagaagaatgctgagcaagcagctactcagttgaaggttcaactacaagaagctgagagaaggtgggaagaagttcagagctacatcaggaagagaacagcggaacatgaggcagcacagcaagatttacagagtaaatttgtggccaaagaaaatgaagtacagagtctgcatagtaagcttacagataccttggtatcaaaacaacagttggagcaaagactaatgcagttaatggaatcagagcagaaaagggtgaacaaagaagagtctctacaaatgcaggttcaggatattttggagcagaatgaggctttgaaagctcaaattcagcagttccattcccagatagcagcccagacctccgcttcagttctagcagaagaattacataaagtgattgcagaaaaggataagcagataaaacagactgaagattctttagcaagtgaacgtgatcgtttaacaagtaaagaagaggaacttaaggatatacagaatatgaatttcttattaaaagctgaagtgcagaaattacaggccctggcaaatgagcaggctgctgctgcacatgaattggagaagatgcaacaaagtgtttatgttaaagatgataaaataagattgctggaagagcaactacaacatgaaatttcaaacaaaatggaagaatttaagattctaaatgaccaaaacaaagcattaaaatcagaagttcagaagctacagactcttgtttctgaacagcctaataaggatgttgtggaacaaatggaaaaatgcattcaagaaaaagatgagaagttaaagactgtggaagaattacttgaaactggacttattcaggtggcaactaaagaagaggagctgaatgcaataagaacagaaaattcatctctgacaaaagaagttcaagacttaaaagctaagcaaaatgatcaggtttcttttgcctctctagttgaagaacttaagaaagtgatccatgagaaagatggaaagatcaagtctgtagaagagcttctggaggcagaacttctcaaagttgctaacaaggagaaaactgttcaggatttgaaacaggaaataaaggctctaaaagaagaaataggaaatgtccagcttgaaaaggctcaacagttatctatcacttccaaagttcaggagcttcagaacttattaaaaggaaaagaggaacagatgaataccatgaaggctgttttggaagagaaagagaaagacctagccaatacagggaagtggttacaggatcttcaagaagaaaatgaatctttaaaagcacatgttcaggaagtagcacaacataacttgaaagaggcctcttctgcatcacagtttgaagaacttgagattgtgttgaaagaaaaggaaaatgaattgaagaggttagaagccatgctaaaagagagggagagtgatctttctagcaaaacacagctgttacaggatgtacaagatgaaaacaaattgtttaagtcccaaattgagcagcttaaacaacaaaactaccaacaggcatcttcttttccccctcatgaagaattattaaaagtaatttcagaaagagagaaagaaataagtggtctctggaatgagttagattctttgaaggatgcagttgaacaccagaggaagaaaaacaatgaaaggcagcaacaggtggaagctgttgagttggaggctaaagaagttctcaaaaaattatttccaaaggtgtctgtcccttctaatttgagttatggtgaatggttgcatggatttgaaaaaaaggcaaaagaatgtatggctggaacttcagggtcagaggaggttaaggttctagagcacaagttgaaagaagctgatgaaatgcacacattgttacagctagagtgtgaaaaatacaaatccgtccttgcagaaacagaaggaattttacagaagctacagagaagtgttgagcaagaagaaaataaatggaaagttaaggtcgatgaatcacacaagactattaaacagatgcagtcatcatttacatcttcagaacaagagctagagcgattaagaagcgaaaataaggatattgaaaatctgagaagagaacgagaacatttggaaatggaactagaaaaggcagagatggaacgatctacctatgttacagaagtcagagagttgaaggcacagttaaatgaaacactcacaaaacttagaactgaacaaaatgaaagacagaaggtagctggtgatttgcataaggctcaacagtcactggagcttatccagtcaaaaatagtaaaagctgctggagacactactgttattgaaaatagtgatgtttccccagaaacggagtcttctgagaaggagacaatgtctgtaagtctaaatcagactgtaacacagttacagcagttgcttcaggcggtaaaccaacagctcacaaaggagaaagagcactaccaggtgttagagtgaagtaattgggaaactgttcatttgaggataaaaaaggcattgtattatattttgccaaattaaagccttatttatgttttcaccctttctactttgtcagaaacactgaacagagttttgtcttttctaatccttgttagactactgatttaaagaaggaaaaaaaaaagccaactctgtagacaccttcagagtttagttttataataaaaactgtttgaataattagacctttacattcctgaagataaacatgtaatcttttatcttattttgctcaataaaattgttcagaagatcaaagtggtaaagacaatgtaaaatttaacattttaatactgatgttgtacactgttttacttaacattttgggaagtaactgcctctgacttcaactcaagaaaacacttttttgttgctaatgtaatcggtttttgtaatggcgtcagcaaataaaaggatgcttattattcaaacttga

SEQ ID NO: 442189 - DNA, 4739 bp, Homo sapiens
cgccccgaagccgcccgtttcctgccgagcggcgcgacggcacctgagcgactgcggcggcggcggcggcggcggcggcgcctcggagcgggcggcccgggctgtagtgccggcgccgccgcgtcttcccggtctcctttcccggccgcacagggttttataggatcacattgacaaaagtaccatggagttttatgagtcagcatattttattgttcttattccttcaatagttattacagtaattttcctcttcttctggcttttcatgaaagaaacattatatgatgaagttcttgcaaaacagaaaagagaacaaaagcttattcctaccaaaacagataaaaagaaagcagaaaagaaaaagaataaaaagaaagaaatccagaatggaaacctccatgaatccgactctgagagtgtacctcgagactttaaattatcagatgctttggcagtagaagatgatcaagttgcacctgttccattgaatgtcgttgaaacttcaagtagtgttagggaaagaaaaaagaaggaaaagaaacaaaagcctgtgcttgaagagcaggtcatcaaagaaagtgacgcatcaaagattcctggcaaaaaagtagaacctgtcccagttactaaacagcccacccctccctctgaagcagctgcctcgaagaagaaaccagggcagaagaagtctaaaaatggaagcgatgaccaggataaaaaggtggaaactctcatggtaccatcaaaaaggcaagaagcattgcccctccaccaagagactaaacaagaaagtggatcagggaagaagaaagcttcatcaaagaaacaaaagacagaaaatgtcttcgtagatgaaccccttattcatgcaactacttatattcctttgatggataatgctgactcaagtcctgtggtagataagagagaggttattgatttgcttaaacctgaccaagtagaagggatccagaaatctgggactaaaaaactgaagaccgaaactgacaaagaaaatgctgaagtgaagtttaaagattttcttctgtccttgaagactatgatgttttctgaagatgaggctctttgtgttgtagacttgctaaaggagaagtctggtgtaatacaagatgctttaaagaagtcaagtaagggagaattgactacgcttatacatcagcttcaagaaaaggacaagttactcgctgctgtgaaggaagatgctgctgctacaaaggatcggtgtaagcagttaacccaggaaatgatgacagagaaagaaagaagcaatgtggttataacaaggatgaaagatcgaattggaacattagaaaaggaacataatgtatttcaaaacaaaatacatgtcagttatcaagagactcaacagatgcagatgaagtttcagcaagttcgtgagcagatggaggcagagatagctcacttgaagcaggaaaatggtatactgagagatgcagtcagcaacactacaaatcaactggaaagcaagcagtctgcagaactaaataaactacgccaggattatgctaggttggtgaatgagctgactgagaaaacaggaaagctacagcaagaggaagtccaaaagaagaatgctgagcaagcagctactcagttgaaggttcaactacaagaagctgagagaaggtgggaagaagttcagagctacatcaggaagagaacagcggaacatgaggcagcacagcaagatttacagagtaaatttgtggccaaagaaaatgaagtacagagtctgcatagtaagcttacagataccttggtatcaaaacaacagttggagcaaagactaatgcagttaatggaatcagagcagaaaagggtgaacaaagaagagtctctacaaatgcaggttcaggatattttggagcagaatgaggctttgaaagctcaaattcagcagttccattcccagatagcagcccagacctccgcttcagttctagcagaagaattacataaagtgattgcagaaaaggataagcagataaaacagactgaagattctttagcaagtgaacgtgatcgtttaacaagtaaagaagaggaacttaaggatatacagaatatgaatttcttattaaaagctgaagtgcagaaattacaggccctggcaaatgagcaggctgctgctgcacatgaattggagaagatgcaacaaagtgtttatgttaaagatgataaaataagattgctggaagagcaactacaacatgaaatttcaaacaaaatggaagaatttaagattctaaatgaccaaaacaaagcattaaaatcagaagttcagaagctacagactcttgtttctgaacagcctaataaggatgttgtggaacaaatggaaaaatgcattcaagaaaaagatgagaagttaaagactgtggaagaattacttgaaactggacttattcaggtggcaactaaagaagaggagctgaatgcaataagaacagaaaattcatctctgacaaaagaagttcaagacttaaaagctaagcaaaatgatcaggtttcttttgcctctctagttgaagaacttaagaaagtgatccatgagaaagatggaaagatcaagtctgtagaagagcttctggaggcagaacttctcaaagttgctaacaaggagaaaactgttcaggatttgaaacaggaaataaaggctctaaaagaagaaataggaaatgtccagcttgaaaaggctcaacagttatctatcacttccaaagttcaggagcttcagaacttattaaaaggaaaagaggaacagatgaataccatgaaggctgttttggaagagaaagagaaagacctagccaatacagggaagtggttacaggatcttcaagaagaaaatgaatctttaaaagcacatgttcaggaagtagcacaacataacttgaaagaggcctcttctgcatcacagtttgaagaacttgagattgtgttgaaagaaaaggaaaatgaattgaagaggttagaagccatgctaaaagagagggagagtgatctttctagcaaaacacagctgttacaggatgtacaagatgaaaacaaattgtttaagtcccaaattgagcagcttaaacaacaaaactaccaacaggcatcttcttttccccctcatgaagaattattaaaagtaatttcagaaagagagaaagaaataagtggtctctggaatgagttagattctttgaaggatgcagttgaacaccagaggaagaaaaacaatgaccttcgggagaaaaactgggaagcaatggaagcattggcatcaactgaaaaaatgctgcaggacaaagtgaacaagacttccaaggaaaggcagcaacaggtggaagctgttgagttggaggctaaagaagttctcaaaaaattatttccaaaggtgtctgtcccttctaatttgagttatggtgaatggttgcatggatttgaaaaaaaggcaaaagaatgtatggctggaacttcagggtcagaggaggttaaggttctagagcacaagttgaaagaagctgatgaaatgcacacattgttacagctagagtgtgaaaaatacaaatccgtccttgcagaaacagaaggaattttacagaagctacagagaagtgttgagcaagaagaaaataaatggaaagttaaggtcgatgaatcacacaagactattaaacagatgcagtcatcatttacatcttcagaacaagagctagagcgattaagaagcgaaaataaggatattgaaaatctgagaagagaacgagaacatttggaaatggaactagaaaaggcagagatggaacgatctacctatgttacagaagtcagagagctgaaagatctgttgactgaattgcagaaaaaacttgatgattcatattctgaagcagtaagacagaatgaagagctaaatttgttgaaggcacagttaaatgaaacactcacaaaacttagaactgaacaaaatgaaagacagaaggtagctggtgatttgcataaggctcaacagtcactggagcttatccagtcaaaaatagtaaaagctgctggagacactactgttattgaaaatagtgatgtttccccagaaacggagtcttctgagaaggagacaatgtctgtaagtctaaatcagactgtaacacagttacagcagttgcttcaggcggtaaaccaacagctcacaaaggagaaagagcactaccaggtgttagagtgaagtaattgggaaactgttcatttgaggataaaaaaggcattgtattatattttgccaaattaaagccttatttatgttttcaccctttctactttgtcagaaacactgaacagagttttgtcttttctaatccttgttagactactgatttaaagaaggaaaaaaaaaagccaactctgtagacaccttcagagtttagttttataataaaaactgtttgaataattagacctttacattcctgaagataaacatgtaatcttttatcttattttgctcaataaaattgttcagaagatcaaagtggtaaagacaatgtaaaatttaacattttaatactgatgttgtacactgttttacttaacattttgggaagtaactgcctctgacttcaactcaagaaaacacttttttgttgctaatgtaatcggtttttgtaatggcgtcagcaaataaaaggatgcttattattcaaacttga

SEQ ID NO: 442190 - DNA, 499 bp, Homo sapiens
  misc_feature (6)..(6): n is a, c, g, or t
caaatngatttcctcttcaaagaattggacgatgaaaggaattagagagctaggatggcggtttagagaaggtaaagaacagacttaagcatgtttgcagaaggaaaagacaaagtgcaaagaattcaaagaagctgaagatggcattgggggtaggaggtgggtagcaggagcagggtttgataaagacagaagaggtatgatcccataaaaagataacatgatgaacttggaagtaactaaggtcatctctttctttgtggcaaaatccaaggatgaaagatcgaattggaacattagaaaaggaacataatgtatttcaaaacaaaatacatgtcagttatcaagagactcaacagatgcagatgaagtttcagcaagttcgtgagcagatggaggcagagatagctcacttgaagcaggaaaatggtatactgagagatgcagtcagcaacactacaaatcaactggaaagcaagtatgtttccaaataccttat

SEQ ID NO: 442191 - DNA, 683 bp, Homo sapiens
caatttagtggaatttcttaacttttctcataccagagggcaacacctgtaagtagagtccaagcattcttgctagagaagaaatttttgtacactgtagtgtgattgctaagacttgagcaaggataaaatgttactgaaatctaagggagtattgctagtaaatggatgtgtgttttctgtttttcaaagtttgtgttaaattgttaatttaacaagttgacattttcttgtacccctgagtttgtcaaaattaggtacatgaattgccacttctgtgttggtataacagtactaacagcattgcttagccacaaaacttgaggtgaacttgccgatatactgctaacatcttaactgtgttttattattggacttctgagataaggagggcatggtaatgcagcagcagcagcagcgctggagacattgaacccgtgtgaaaagagccaggacactggaggccagcagatagcagtgtcagtctttccttctagttttgccacttcgttttctgtgtatacttggctcagtttcctaacttacttgagctgtggtttccctatctatagaatgggaataaatacctcatggggttgttgtaacggtgagaatttgtgaactgccaagtacagtggttggcatatattaagtaataaatggtgattattggctttttaaat

SEQ ID NO: 442192 - DNA, 866 bp, Homo sapiens
  misc_feature (596)..(596): n is a, c, g, or t
  misc_feature (604)..(604): n is a, c, g, or t
  misc_feature (613)..(614): n is a, c, g, or t
  misc_feature (626)..(626): n is a, c, g, or t
  misc_feature (628)..(628): n is a, c, g, or t
  misc_feature (644)..(644): n is a, c, g, or t
  misc_feature (647)..(648): n is a, c, g, or t
  misc_feature (668)..(669): n is a, c, g, or t
  misc_feature (676)..(676): n is a, c, g, or t
  misc_feature (681)..(682): n is a, c, g, or t
  misc_feature (699)..(700): n is a, c, g, or t
  misc_feature (706)..(706): n is a, c, g, or t
  misc_feature (710)..(710): n is a, c, g, or t
  misc_feature (714)..(714): n is a, c, g, or t
  misc_feature (716)..(716): n is a, c, g, or t
gagatttctctttagcacaagcctgagcataccatattaggcataaaaacttatattagaaatcatttctgaaattcataggatgggcttgtatggtcaacagtaggtagactctttaatgtacttttcaaggtgctatctcttgatatttttattttgtaatagcaaatgttgataggtagggatctaagttgtattactgtttacctaaaatcttgctacatgtattcatgttctggtttagaatttcagaaagagagaaagaaataagtggtctctggaatgagttagattctttgaaggatgcagttgaacaccagaggaagaaaaacaatgaccttcgggagaaaaactgggaagcaatggaagcattggcatcaactgaaaaaatgctgcaggacaaagtgaacaagacttccaaggaaaggcagcaacaggtggaagctgttgagttggaggctaaagaagttctcaaaaaattatttccaaaggtgtctgtcccttctaatttgagttatggtgaatggttgcatggatttgaaaaaaaggcaaaagaatgtatggctggaacttcagggtcagaggaggttaaggtntagagacnagtgaaganntgatgaatggcncntgtgcaggtgaggtgnaanncaatcgtctgggaacgaggnnttccgangtcgnngagtgttgggcgagaannatgggngtgngggngnatcccagattttacgagtgggctcttctttcgaaagagctgggtgaacacataggttgcatctgggacaactgggggccaaggggggggcctgttcacggggggacccattaaagaggtggcgcgctcaaagagcaggccgcactttcgg

SEQ ID NO: 442193 - DNA, 4692 bp, Homo sapiens
cgccccgaagccgcccgtttcctgccgagcggcgcgacggcacctgagcgactgcggcggcggcggcggcggcggcggcgcctcggagcgggcggcccgggctgtagtgccggcgccgccgcgtcttcccggtctcctttcccggccgcacagggtagattttcgttccgtcacccaggctggagtgcagtggtgtgaccttggcttgctgcaaccctttgcctcctgggttcaagtgattctcattgcctcagcctcctaagtagctgggattacaggttttataggatcacattgacaaaagtaccatggagttttatgagtcagcatattttattgttcttattccttcaatagttattacagtaattttcctcttcttctggcttttcatgaaagaaacattatatgatgaagttcttgcaaaacagaaaagagaacaaaagcttattcctaccaaaacagataaaaagaaagcagaaaagaaaaagaataaaaagaaagaaatccagaatggaaacctccatgaatccgactctgagagtgtacctcgagactttaaattatcagatgctttggcagtagaagatgatcaagttgcacctgttccattgaatgtcgttgaaacttcaagtagtgttagggaaagaaaaaagaaggaaaagaaacaaaagcctgtgcttgaagagcaggtcatcaaagaaagtgacgcatcaaagattcctggcaaaaaagtagaacctgtcccagttactaaacagcccacccctccctctgaagcagctgcctcgaagaagaaaccagggcagaagaagtctaaaaatggaagcgatgaccaggataaaaaggtggaaactctcatggtaccatcaaaaaggcaagaagcattgcccctccaccaagagactaaacaagaaagtggatcagggaagaagaaagcttcatcaaagaaacaaaagacagaaaatgtcttcgtagatgaaccccttattcatgcaactacttatattcctttgatggataatgctgactcaagtcctgtggtagataagagagaggttattgatttgcttaaacctgaccaagtagaagggatccagaaatctgggactaaaaaactgaagaccgaaactgacaaagaaaatgctgaagtgaagtttaaagattttcttctgtccttgaagactatgatgttttctgaagatgaggctctttgtgttgtagacttgctaaaggagaagtctggtgtaatacaagatgctttaaagaagtcaagtaagggagaattgactacgcttatacatcagcttcaagaaaaggacaagttactcgctgctgtgaaggaagatgctgctgctacaaaggatcggtgtaagcagttaacccaggaaatgatgacagagaaagaaagaagcaatgtggttataacaaggatgaaagatcgaattggaacattagaaaaggaacataatgtatttcaaaacaaaatacatgtcagttatcaagagactcaacagatgcagatgaagtttcagcaagttcgtgagcagatggaggcagagatagctcacttgaagcaggaaaatggtatactgagagatgcagtcagcaacactacaaatcaactggaaagcaagcagtctgcagaactaaataaactacgccaggattatgctaggttggtgaatgagctgactgagaaaacaggaaagctacagcaagaggaagtccaaaagaagaatgctgagcaagcagctactcagttgaaggttcaactacaagaagctgagagaaggtgggaagaagttcagagctacatcaggaagagaacagcggaacatgaggcagcacagcaagatttacagagtaaatttgtggccaaagaaaatgaagtacagagtctgcatagtaagcttacagataccttggtatcaaaacaacagttggagcaaagactaatgcagttaatggaatcagagcagaaaagggtgaacaaagaagagtctctacaaatgcaggttcaggatattttggagcagaatgaggctttgaaagctcaaattcagcagttccattcccagatagcagcccagacctccgcttcagttctagcagaagaattacataaagtgattgcagaaaaggataagcagataaaacagactgaagattctttagcaagtgaacgtgatcgtttaacaagtaaagaagaggaacttaaggatatacagaatatgaatttcttattaaaagctgaagtgcagaaattacaggccctggcaaatgagcaggctgctgctgcacatgaattggagaagatgcaacaaagtgtttatgttaaagatgataaaataagattgctggaagagcaactacaacatgaaatttcaaacaaaatggaagaatttaagattctaaatgaccaaaacaaagcattaaaatcagaagttcagaagctacagactcttgtttctgaacagcctaataaggatgttgtggaacaaatggaaaaatgcattcaagaaaaagatgagaagttaaagactgtggaagaattacttgaaactggacttattcaggtggcaactaaagaagaggagctgaatgcaataagaacagaaaattcatctctgacaaaagaagttcaagacttaaaagctaagcaaaatgatcaggtttcttttgcctctctagttgaagaacttaagaaagtgatccatgagaaagatggaaagatcaagtctgtagaagagcttctggaggcagaacttctcaaagttgctaacaaggagaaaactgttcaggatttgaaacaggaaataaaggctctaaaagaagaaataggaaatgtccagcttgaaaaggctcaacagttatctatcacttccaaagttcaggagcttcagaacttattaaaaggaaaagaggaacagatgaataccatgaaggctgttttggaagagaaagagaaagacctagccaatacagggaagtggttacaggatcttcaagaagaaaatgaatctttaaaagcacatgttcaggaagtagcacaacataacttgaaagaggcctcttctgcatcacagtttgaagaacttgagattgtgttgaaagaaaaggaaaatgaattgaagaggttagaagccatgctaaaagagagggagagtgatctttctagcaaaacacagctgttacaggatgtacaagatgaaaacaaattgtttaagtcccaaattgagcagcttaaacaacaaaactaccaacaggcatcttcttttccccctcatgaagaattattaaaagtaatttcagaaagagagaaagaaataagtggtctctggaatgagttagattctttgaaggatgcagttgaacaccagaggaagaaaaacaatgaaaggcagcaacaggtggaagctgttgagttggaggctaaagaagttctcaaaaaattatttccaaaggtgtctgtcccttctaatttgagttatggtgaatggttgcatggatttgaaaaaaaggcaaaagaatgtatggctggaacttcagggtcagaggaggttaaggttctagagcacaagttgaaagaagctgatgaaatgcacacattgttacagctagagtgtgaaaaatacaaatccgtccttgcagaaacagaaggaattttacagaagctacagagaagtgttgagcaagaagaaaataaatggaaagttaaggtcgatgaatcacacaagactattaaacagatgcagtcatcatttacatcttcagaacaagagctagagcgattaagaagcgaaaataaggatattgaaaatctgagaagagaacgagaacatttggaaatggaactagaaaaggcagagatggaacgatctacctatgttacagaagtcagagagttgaaggcacagttaaatgaaacactcacaaaacttagaactgaacaaaatgaaagacagaaggtagctggtgatttgcataaggctcaacagtcactggagcttatccagtcaaaaatagtaaaagctgctggagacactactgttattgaaaatagtgatgtttccccagaaacggagtcttctgagaaggagacaatgtctgtaagtctaaatcagactgtaacacagttacagcagttgcttcaggcggtaaaccaacagctcacaaaggagaaagagcactaccaggtgttagagtgaagtaattgggaaactgttcatttgaggataaaaaaggcattgtattatattttgccaaattaaagccttatttatgttttcaccctttctactttgtcagaaacactgaacagagttttgtcttttctaatccttgttagactactgatttaaagaaggaaaaaaaaaagccaactctgtagacaccttcagagtttagttttataataaaaactgtttgaataattagacctttacattcctgaagataaacatgtaatcttttatcttattttgctcaataaaattgttcagaagatcaaagtggtaaagacaatgtaaaatttaacattttaatactgatgttgtacactgttttacttaacattttgggaagtaactgcctctgacttcaactcaagaaaacacttttttgttgctaatgtaatcggtttttgtaatggcgtcagcaaataaaaggatgcttattattcaaacttga

SEQ ID NO: 442194 - DNA, 4807 bp, Homo sapiens
cgccccgaagccgcccgtttcctgccgagcggcgcgacggcacctgagcgactgcggcggcggcggcggcggcggcggcgcctcggagcgggcggcccgggctgtagtgccggcgccgccgcgtcttcccggtctcctttcccggccgcacagggtagattttcgttccgtcacccaggctggagtgcagtggtgtgaccttggcttgctgcaaccctttgcctcctgggttcaagtgattctcattgcctcagcctcctaagtagctgggattacagttcttttaagatagggcaggaatgaaaactctcaatatagagcaggattttaaacctggggcccgtgcatattcttcagggaatccagaaacctggagattatatgtaaaacttagttttataggatcacattgacaaaagtaccatggagttttatgagtcagcatattttattgttcttattccttcaatagttattacagtaattttcctcttcttctggcttttcatgaaagaaacattatatgatgaagttcttgcaaaacagaaaagagaacaaaagcttattcctaccaaaacagataaaaagaaagcagaaaagaaaaagaataaaaagaaagaaatccagaatggaaacctccatgaatccgactctgagagtgtacctcgagactttaaattatcagatgctttggcagtagaagatgatcaagttgcacctgttccattgaatgtcgttgaaacttcaagtagtgttagggaaagaaaaaagaaggaaaagaaacaaaagcctgtgcttgaagagcaggtcatcaaagaaagtgacgcatcaaagattcctggcaaaaaagtagaacctgtcccagttactaaacagcccacccctccctctgaagcagctgcctcgaagaagaaaccagggcagaagaagtctaaaaatggaagcgatgaccaggataaaaaggtggaaactctcatggtaccatcaaaaaggcaagaagcattgcccctccaccaagagactaaacaagaaagtggatcagggaagaagaaagcttcatcaaagaaacaaaagacagaaaatgtcttcgtagatgaaccccttattcatgcaactacttatattcctttgatggataatgctgactcaagtcctgtggtagataagagagaggttattgatttgcttaaacctgaccaagtagaagggatccagaaatctgggactaaaaaactgaagaccgaaactgacaaagaaaatgctgaagtgaagtttaaagattttcttctgtccttgaagactatgatgttttctgaagatgaggctctttgtgttgtagacttgctaaaggagaagtctggtgtaatacaagatgctttaaagaagtcaagtaagggagaattgactacgcttatacatcagcttcaagaaaaggacaagttactcgctgctgtgaaggaagatgctgctgctacaaaggatcggtgtaagcagttaacccaggaaatgatgacagagaaagaaagaagcaatgtggttataacaaggatgaaagatcgaattggaacattagaaaaggaacataatgtatttcaaaacaaaatacatgtcagttatcaagagactcaacagatgcagatgaagtttcagcaagttcgtgagcagatggaggcagagatagctcacttgaagcaggaaaatggtatactgagagatgcagtcagcaacactacaaatcaactggaaagcaagcagtctgcagaactaaataaactacgccaggattatgctaggttggtgaatgagctgactgagaaaacaggaaagctacagcaagaggaagtccaaaagaagaatgctgagcaagcagctactcagttgaaggttcaactacaagaagctgagagaaggtgggaagaagttcagagctacatcaggaagagaacagcggaacatgaggcagcacagcaagatttacagagtaaatttgtggccaaagaaaatgaagtacagagtctgcatagtaagcttacagataccttggtatcaaaacaacagttggagcaaagactaatgcagttaatggaatcagagcagaaaagggtgaacaaagaagagtctctacaaatgcaggttcaggatattttggagcagaatgaggctttgaaagctcaaattcagcagttccattcccagatagcagcccagacctccgcttcagttctagcagaagaattacataaagtgattgcagaaaaggataagcagataaaacagactgaagattctttagcaagtgaacgtgatcgtttaacaagtaaagaagaggaacttaaggatatacagaatatgaatttcttattaaaagctgaagtgcagaaattacaggccctggcaaatgagcaggctgctgctgcacatgaattggagaagatgcaacaaagtgtttatgttaaagatgataaaataagattgctggaagagcaactacaacatgaaatttcaaacaaaatggaagaatttaagattctaaatgaccaaaacaaagcattaaaatcagaagttcagaagctacagactcttgtttctgaacagcctaataaggatgttgtggaacaaatggaaaaatgcattcaagaaaaagatgagaagttaaagactgtggaagaattacttgaaactggacttattcaggtggcaactaaagaagaggagctgaatgcaataagaacagaaaattcatctctgacaaaagaagttcaagacttaaaagctaagcaaaatgatcaggtttcttttgcctctctagttgaagaacttaagaaagtgatccatgagaaagatggaaagatcaagtctgtagaagagcttctggaggcagaacttctcaaagttgctaacaaggagaaaactgttcaggatttgaaacaggaaataaaggctctaaaagaagaaataggaaatgtccagcttgaaaaggctcaacagttatctatcacttccaaagttcaggagcttcagaacttattaaaaggaaaagaggaacagatgaataccatgaaggctgttttggaagagaaagagaaagacctagccaatacagggaagtggttacaggatcttcaagaagaaaatgaatctttaaaagcacatgttcaggaagtagcacaacataacttgaaagaggcctcttctgcatcacagtttgaagaacttgagattgtgttgaaagaaaaggaaaatgaattgaagaggttagaagccatgctaaaagagagggagagtgatctttctagcaaaacacagctgttacaggatgtacaagatgaaaacaaattgtttaagtcccaaattgagcagcttaaacaacaaaactaccaacaggcatcttcttttccccctcatgaagaattattaaaagtaatttcagaaagagagaaagaaataagtggtctctggaatgagttagattctttgaaggatgcagttgaacaccagaggaagaaaaacaatgaaaggcagcaacaggtggaagctgttgagttggaggctaaagaagttctcaaaaaattatttccaaaggtgtctgtcccttctaatttgagttatggtgaatggttgcatggatttgaaaaaaaggcaaaagaatgtatggctggaacttcagggtcagaggaggttaaggttctagagcacaagttgaaagaagctgatgaaatgcacacattgttacagctagagtgtgaaaaatacaaatccgtccttgcagaaacagaaggaattttacagaagctacagagaagtgttgagcaagaagaaaataaatggaaagttaaggtcgatgaatcacacaagactattaaacagatgcagtcatcatttacatcttcagaacaagagctagagcgattaagaagcgaaaataaggatattgaaaatctgagaagagaacgagaacatttggaaatggaactagaaaaggcagagatggaacgatctacctatgttacagaagtcagagagttgaaggcacagttaaatgaaacactcacaaaacttagaactgaacaaaatgaaagacagaaggtagctggtgatttgcataaggctcaacagtcactggagcttatccagtcaaaaatagtaaaagctgctggagacactactgttattgaaaatagtgatgtttccccagaaacggagtcttctgagaaggagacaatgtctgtaagtctaaatcagactgtaacacagttacagcagttgcttcaggcggtaaaccaacagctcacaaaggagaaagagcactaccaggtgttagagtgaagtaattgggaaactgttcatttgaggataaaaaaggcattgtattatattttgccaaattaaagccttatttatgttttcaccctttctactttgtcagaaacactgaacagagttttgtcttttctaatccttgttagactactgatttaaagaaggaaaaaaaaaagccaactctgtagacaccttcagagtttagttttataataaaaactgtttgaataattagacctttacattcctgaagataaacatgtaatcttttatcttattttgctcaataaaattgttcagaagatcaaagtggtaaagacaatgtaaaatttaacattttaatactgatgttgtacactgttttacttaacattttgggaagtaactgcctctgacttcaactcaagaaaacacttttttgttgctaatgtaatcggtttttgtaatggcgtcagcaaataaaaggatgcttattattcaaacttga

SEQ ID NO: 442195 - DNA, 4519 bp, Homo sapiens
ctttggaaaaatccatggaccactctcgacaccggcgaagttatcccttcctgtccccgaggggtgtgtcctagcgattcggcctgaccccttcagtttccaaaagttttataggatcacattgacaaaagtaccatggagttttatgagtcagcatattttattgttcttattccttcaatagttattacagtaattttcctcttcttctggcttttcatgaaagaaacattatatgatgaagttcttgcaaaacagaaaagagaacaaaagcttattcctaccaaaacagataaaaagaaagcagaaaagaaaaagaataaaaagaaagaaatccagaatggaaacctccatgaatccgactctgagagtgtacctcgagactttaaattatcagatgctttggcagtagaagatgatcaagttgcacctgttccattgaatgtcgttgaaacttcaagtagtgttagggaaagaaaaaagaaggaaaagaaacaaaagcctgtgcttgaagagcaggtcatcaaagaaagtgacgcatcaaagattcctggcaaaaaagtagaacctgtcccagttactaaacagcccacccctccctctgaagcagctgcctcgaagaagaaaccagggcagaagaagtctaaaaatggaagcgatgaccaggataaaaaggtggaaactctcatggtaccatcaaaaaggcaagaagcattgcccctccaccaagagactaaacaagaaagtggatcagggaagaagaaagcttcatcaaagaaacaaaagacagaaaatgtcttcgtagatgaaccccttattcatgcaactacttatattcctttgatggataatgctgactcaagtcctgtggtagataagagagaggttattgatttgcttaaacctgaccaagtagaagggatccagaaatctgggactaaaaaactgaagaccgaaactgacaaagaaaatgctgaagtgaagtttaaagattttcttctgtccttgaagactatgatgttttctgaagatgaggctctttgtgttgtagacttgctaaaggagaagtctggtgtaatacaagatgctttaaagaagtcaagtaagggagaattgactacgcttatacatcagcttcaagaaaaggacaagttactcgctgctgtgaaggaagatgctgctgctacaaaggatcggtgtaagcagttaacccaggaaatgatgacagagaaagaaagaagcaatgtggttataacaaggatgaaagatcgaattggaacattagaaaaggaacataatgtatttcaaaacaaaatacatgtcagttatcaagagactcaacagatgcagatgaagtttcagcaagttcgtgagcagatggaggcagagatagctcacttgaagcaggaaaatggtatactgagagatgcagtcagcaacactacaaatcaactggaaagcaagcagtctgcagaactaaataaactacgccaggattatgctaggttggtgaatgagctgactgagaaaacaggaaagctacagcaagaggaagtccaaaagaagaatgctgagcaagcagctactcagttgaaggttcaactacaagaagctgagagaaggtgggaagaagttcagagctacatcaggaagagaacagcggaacatgaggcagcacagcaagatttacagagtaaatttgtggccaaagaaaatgaagtacagagtctgcatagtaagcttacagataccttggtatcaaaacaacagttggagcaaagactaatgcagttaatggaatcagagcagaaaagggtgaacaaagaagagtctctacaaatgcaggttcaggatattttggagcagaatgaggctttgaaagctcaaattcagcagttccattcccagatagcagcccagacctccgcttcagttctagcagaagaattacataaagtgattgcagaaaaggataagcagataaaacagactgaagattctttagcaagtgaacgtgatcgtttaacaagtaaagaagaggaacttaaggatatacagaatatgaatttcttattaaaagctgaagtgcagaaattacaggccctggcaaatgagcaggctgctgctgcacatgaattggagaagatgcaacaaagtgtttatgttaaagatgataaaataagattgctggaagagcaactacaacatgaaatttcaaacaaaatggaagaatttaagattctaaatgaccaaaacaaagcattaaaatcagaagttcagaagctacagactcttgtttctgaacagcctaataaggatgttgtggaacaaatggaaaaatgcattcaagaaaaagatgagaagttaaagactgtggaagaattacttgaaactggacttattcaggtggcaactaaagaagaggagctgaatgcaataagaacagaaaattcatctctgacaaaagaagttcaagacttaaaagctaagcaaaatgatcaggtttcttttgcctctctagttgaagaacttaagaaagtgatccatgagaaagatggaaagatcaagtctgtagaagagcttctggaggcagaacttctcaaagttgctaacaaggagaaaactgttcaggatttgaaacaggaaataaaggctctaaaagaagaaataggaaatgtccagcttgaaaaggctcaacagttatctatcacttccaaagttcaggagcttcagaacttattaaaaggaaaagaggaacagatgaataccatgaaggctgttttggaagagaaagagaaagacctagccaatacagggaagtggttacaggatcttcaagaagaaaatgaatctttaaaagcacatgttcaggaagtagcacaacataacttgaaagaggcctcttctgcatcacagtttgaagaacttgagattgtgttgaaagaaaaggaaaatgaattgaagaggttagaagccatgctaaaagagagggagagtgatctttctagcaaaacacagctgttacaggatgtacaagatgaaaacaaattgtttaagtcccaaattgagcagcttaaacaacaaaactaccaacaggcatcttcttttccccctcatgaagaattattaaaagtaatttcagaaagagagaaagaaataagtggtctctggaatgagttagattctttgaaggatgcagttgaacaccagaggaagaaaaacaatgaaaggcagcaacaggtggaagctgttgagttggaggctaaagaagttctcaaaaaattatttccaaaggtgtctgtcccttctaatttgagttatggtgaatggttgcatggatttgaaaaaaaggcaaaagaatgtatggctggaacttcagggtcagaggaggttaaggttctagagcacaagttgaaagaagctgatgaaatgcacacattgttacagctagagtgtgaaaaatacaaatccgtccttgcagaaacagaaggaattttacagaagctacagagaagtgttgagcaagaagaaaataaatggaaagttaaggtcgatgaatcacacaagactattaaacagatgcagtcatcatttacatcttcagaacaagagctagagcgattaagaagcgaaaataaggatattgaaaatctgagaagagaacgagaacatttggaaatggaactagaaaaggcagagatggaacgatctacctatgttacagaagtcagagagttgaaggcacagttaaatgaaacactcacaaaacttagaactgaacaaaatgaaagacagaaggtagctggtgatttgcataaggctcaacagtcactggagcttatccagtcaaaaatagtaaaagctgctggagacactactgttattgaaaatagtgatgtttccccagaaacggagtcttctgagaaggagacaatgtctgtaagtctaaatcagactgtaacacagttacagcagttgcttcaggcggtaaaccaacagctcacaaaggagaaagagcactaccaggtgttagagtgaagtaattgggaaactgttcatttgaggataaaaaaggcattgtattatattttgccaaattaaagccttatttatgttttcaccctttctactttgtcagaaacactgaacagagttttgtcttttctaatccttgttagactactgatttaaagaaggaaaaaaaaaagccaactctgtagacaccttcagagtttagttttataataaaaactgtttgaataattagacctttacattcctgaagataaacatgtaatcttttatcttattttgctcaataaaattgttcagaagatcaaagtggtaaagacaatgtaaaatttaacattttaatactgatgttgtacactgttttacttaacattttgggaagtaactgcctctgacttcaactcaagaaaacacttttttgttgctaatgtaatcggtttttgtaatggcgtcagcaaataaaaggatgcttattattcaaacttga

SEQ ID NO: 442196 - DNA, 4234 bp, Homo sapiens
agaggatcccgaagccattgctacatatggctagccagttttcccagcaccatttattaaatagggaatcctttccccatggctggtttttctcaggttggtcaaagatcagatgctttggcagtagaagatgatcaagttgcacctgttccattgaatgtcgttgaaacttcaagtagtgttagggaaagaaaaaagaaggaaaagaaacaaaagcctgtgcttgaagagcaggtcatcaaagaaagtgacgcatcaaagattcctggcaaaaaagtagaacctgtcccagttactaaacagcccacccctccctctgaagcagctgcctcgaagaagaaaccagggcagaagaagtctaaaaatggaagcgatgaccaggataaaaaggtggaaactctcatggtaccatcaaaaaggcaagaagcattgcccctccaccaagagactaaacaagaaagtggatcagggaagaagaaagcttcatcaaagaaacaaaagacagaaaatgtcttcgtagatgaaccccttattcatgcaactacttatattcctttgatggataatgctgactcaagtcctgtggtagataagagagaggttattgatttgcttaaacctgaccaagtagaagggatccagaaatctgggactaaaaaactgaagaccgaaactgacaaagaaaatgctgaagtgaagtttaaagattttcttctgtccttgaagactatgatgttttctgaagatgaggctctttgtgttgtagacttgctaaaggagaagtctggtgtaatacaagatgctttaaagaagtcaagtaagggagaattgactacgcttatacatcagcttcaagaaaaggacaagttactcgctgctgtgaaggaagatgctgctgctacaaaggatcggtgtaagcagttaacccaggaaatgatgacagagaaagaaagaagcaatgtggttataacaaggatgaaagatcgaattggaacattagaaaaggaacataatgtatttcaaaacaaaatacatgtcagttatcaagagactcaacagatgcagatgaagtttcagcaagttcgtgagcagatggaggcagagatagctcacttgaagcaggaaaatggtatactgagagatgcagtcagcaacactacaaatcaactggaaagcaagcagtctgcagaactaaataaactacgccaggattatgctaggttggtgaatgagctgactgagaaaacaggaaagctacagcaagaggaagtccaaaagaagaatgctgagcaagcagctactcagttgaaggttcaactacaagaagctgagagaaggtgggaagaagttcagagctacatcaggaagagaacagcggaacatgaggcagcacagcaagatttacagagtaaatttgtggccaaagaaaatgaagtacagagtctgcatagtaagcttacagataccttggtatcaaaacaacagttggagcaaagactaatgcagttaatggaatcagagcagaaaagggtgaacaaagaagagtctctacaaatgcaggttcaggatattttggagcagaatgaggctttgaaagctcaaattcagcagttccattcccagatagcagcccagacctccgcttcagttctagcagaagaattacataaagtgattgcagaaaaggataagcagataaaacagactgaagattctttagcaagtgaacgtgatcgtttaacaagtaaagaagaggaacttaaggatatacagaatatgaatttcttattaaaagctgaagtgcagaaattacaggccctggcaaatgagcaggctgctgctgcacatgaattggagaagatgcaacaaagtgtttatgttaaagatgataaaataagattgctggaagagcaactacaacatgaaatttcaaacaaaatggaagaatttaagattctaaatgaccaaaacaaagcattaaaatcagaagttcagaagctacagactcttgtttctgaacagcctaataaggatgttgtggaacaaatggaaaaatgcattcaagaaaaagatgagaagttaaagactgtggaagaattacttgaaactggacttattcaggtggcaactaaagaagaggagctgaatgcaataagaacagaaaattcatctctgacaaaagaagttcaagacttaaaagctaagcaaaatgatcaggtttcttttgcctctctagttgaagaacttaagaaagtgatccatgagaaagatggaaagatcaagtctgtagaagagcttctggaggcagaacttctcaaagttgctaacaaggagaaaactgttcaggatttgaaacaggaaataaaggctctaaaagaagaaataggaaatgtccagcttgaaaaggctcaacagttatctatcacttccaaagttcaggagcttcagaacttattaaaaggaaaagaggaacagatgaataccatgaaggctgttttggaagagaaagagaaagacctagccaatacagggaagtggttacaggatcttcaagaagaaaatgaatctttaaaagcacatgttcaggaagtagcacaacataacttgaaagaggcctcttctgcatcacagtttgaagaacttgagattgtgttgaaagaaaaggaaaatgaattgaagaggttagaagccatgctaaaagagagggagagtgatctttctagcaaaacacagctgttacaggatgtacaagatgaaaacaaattgtttaagtcccaaattgagcagcttaaacaacaaaactaccaacaggcatcttcttttccccctcatgaagaattattaaaagtaatttcagaaagagagaaagaaataagtggtctctggaatgagttagattctttgaaggatgcagttgaacaccagaggaagaaaaacaatgaaaggcagcaacaggtggaagctgttgagttggaggctaaagaagttctcaaaaaattatttccaaaggtgtctgtcccttctaatttgagttatggtgaatggttgcatggatttgaaaaaaaggcaaaagaatgtatggctggaacttcagggtcagaggaggttaaggttctagagcacaagttgaaagaagctgatgaaatgcacacattgttacagctagagtgtgaaaaatacaaatccgtccttgcagaaacagaaggaattttacagaagctacagagaagtgttgagcaagaagaaaataaatggaaagttaaggtcgatgaatcacacaagactattaaacagatgcagtcatcatttacatcttcagaacaagagctagagcgattaagaagcgaaaataaggatattgaaaatctgagaagagaacgagaacatttggaaatggaactagaaaaggcagagatggaacgatctacctatgttacagaagtcagagagttgaaggcacagttaaatgaaacactcacaaaacttagaactgaacaaaatgaaagacagaaggtagctggtgatttgcataaggctcaacagtcactggagcttatccagtcaaaaatagtaaaagctgctggagacactactgttattgaaaatagtgatgtttccccagaaacggagtcttctgagaaggagacaatgtctgtaagtctaaatcagactgtaacacagttacagcagttgcttcaggcggtaaaccaacagctcacaaaggagaaagagcactaccaggtgttagagtgaagtaattgggaaactgttcatttgaggataaaaaaggcattgtattatattttgccaaattaaagccttatttatgttttcaccctttctactttgtcagaaacactgaacagagttttgtcttttctaatccttgttagactactgatttaaagaaggaaaaaaaaaagccaactctgtagacaccttcagagtttagttttataataaaaactgtttgaataattagacctttacattcctgaagataaacatgtaatcttttatcttattttgctcaataaaattgttcagaagatcaaagtggtaaagacaatgtaaaatttaacattttaatactgatgttgtacactgttttacttaacattttgggaagtaactgcctctgacttcaactcaagaaaacacttttttgttgctaatgtaatcggtttttgtaatggcgtcagcaaataaaaggatgcttattattcaaacttga

SEQ ID NO: 442197 - DNA, 4478 bp, Homo sapiens
cgccccgaagccgcccgtttcctgccgagcggcgcgacggcacctgagcgactgcggcggcggcggcggcggcggcggcgcctcggagcgggcggcccgggctgtagtgccggcgccgccgcgtcttcccggtctcctttcccggccgcacagggttttataggatcacattgacaaaagtaccatggagttttatgagtcagcatattttattgttcttattccttcaatagttattacagtaattttcctcttcttctggcttttcatgaaagaaacattatatgatgaagttcttgcaaaacagaaaagagaacaaaagcttattcctaccaaaacagataaaaagaaagcagaaaagaaaaagaataaaaagaaagaaatccagaatggaaacctccatgaatccgactctgagagtgtacctcgagactttaaattatcagatgctttggcagtagaagatgatcaagttgcacctgttccattgaatgtcgttgaaacttcaagtagtgttagggaaagaaaaaagaaggaaaagaaacaaaagcctgtgcttgaagagcaggtcatcaaagaaagtgacgcatcaaagattcctggcaaaaaagtagaacctgtcccagttactaaacagcccacccctccctctgaagcagctgcctcgaagaagaaaccagggcagaagaagtctaaaaatggaagcgatgaccaggataaaaaggtggaaactctcatggtaccatcaaaaaggcaagaagcattgcccctccaccaagagactaaacaagaaagtggatcagggaagaagaaagcttcatcaaagaaacaaaagacagaaaatgtcttcgtagatgaaccccttattcatgcaactacttatattcctttgatggataatgctgactcaagtcctgtggtagataagagagaggttattgatttgcttaaacctgaccaagtagaagggatccagaaatctgggactaaaaaactgaagaccgaaactgacaaagaaaatgctgaagtgaagtttaaagattttcttctgtccttgaagactatgatgttttctgaagatgaggctctttgtgttgtagacttgctaaaggagaagtctggtgtaatacaagatgctttaaagaagtcaagtaagggagaattgactacgcttatacatcagcttcaagaaaaggacaagttactcgctgctgtgaaggaagatgctgctgctacaaaggatcggtgtaagcagttaacccaggaaatgatgacagagaaagaaagaagcaatgtggttataacaaggatgaaagatcgaattggaacattagaaaaggaacataatgtatttcaaaacaaaatacatgtcagttatcaagagactcaacagatgcagatgaagtttcagcaagttcgtgagcagatggaggcagagatagctcacttgaagcaggaaaatggtatactgagagatgcagtcagcaacactacaaatcaactggaaagcaagcagtctgcagaactaaataaactacgccaggattatgctaggttggtgaatgagctgactgagaaaacaggaaagctacagcaagaggaagtccaaaagaagaatgctgagcaagcagctactcagttgaaggttcaactacaagaagctgagagaaggtgggaagaagttcagagctacatcaggaagagaacagcggaacatgaggcagcacagcaagatttacagagtaaatttgtggccaaagaaaatgaagtacagagtctgcatagtaagcttacagataccttggtatcaaaacaacagttggagcaaagactaatgcagttaatggaatcagagcagaaaagggtgaacaaagaagagtctctacaaatgcaggttcaggatattttggagcagaatgaggctttgaaagctcaaattcagcagttccattcccagatagcagcccagacctccgcttcagttctagcagaagaattacataaagtgattgcagaaaaggataagcagataaaacagactgaagattctttagcaagtgaacgtgatcgtttaacaagtaaagaagaggaacttaaggatatacagaatatgaatttcttattaaaagctgaagtgcagaaattacaggccctggcaaatgagcaggctgctgctgcacatgaattggagaagatgcaacaaagtgtttatgttaaagatgataaaataagattgctggaagagcaactacaacatgaaatttcaaacaaaatggaagaatttaagattctaaatgaccaaaacaaagcattaaaatcagaagttcagaagctacagactcttgtttctgaacagcctaataaggatgttgtggaacaaatggaaaaatgcattcaagaaaaagatgagaagttaaagactgtggaagaattacttgaaactggacttattcaggtggcaactaaagaagaggagctgaatgcaataagaacagaaaattcatctctgacaaaagaagttcaagacttaaaagctaagcaaaatgatcaggtttcttttgcctctctagttgaagaacttaagaaagtgatccatgagaaagatggaaagatcaagtctgtagaagagcttctggaggcagaacttctcaaagttgctaacaaggagaaaactgttcaggatttgaaacaggaaataaaggctctaaaagaagaaataggaaatgtccagcttgaaaaggctcaacagttatctatcacttccaaagttcaggagcttcagaacttattaaaaggaaaagaggaacagatgaataccatgaaggctgttttggaagagaaagagaaagacctagccaatacagggaagtggttacaggatcttcaagaagaaaatgaatctttaaaagcacatgttcaggaagtagcacaacataacttgaaagaggcctcttctgcatcacagtttgaagaacttgagattgtgttgaaagaaaaggaaaatgaattgaagaggttagaagccatgctaaaagagagggagagtgatctttctagcaaaacacagctgttacaggatgtacaagatgaaaacaaattgtttaagtcccaaattgagcagcttaaacaacaaaactaccaacaggcatcttcttttccccctcatgaagaattattaaaagtaatttcagaaagagagaaagaaataagtggtctctggaatgagttagattctttgaaggatgcagttgaacaccagaggaagaaaaacaatagttatggtgaatggttgcatggatttgaaaaaaaggcaaaagaatgtatggctggaacttcagggtcagaggaggttaaggttctagagcacaagttgaaagaagctgatgaaatgcacacattgttacagctagagtgtgaaaaatacaaatccgtccttgcagaaacagaaggaattttacagaagctacagagaagtgttgagcaagaagaaaataaatggaaagttaaggtcgatgaatcacacaagactattaaacagatgcagtcatcatttacatcttcagaacaagagctagagcgattaagaagcgaaaataaggatattgaaaatctgagaagagaacgagaacatttggaaatggaactagaaaaggcagagatggaacgatctacctatgttacagaagtcagagagttgaaggcacagttaaatgaaacactcacaaaacttagaactgaacaaaatgaaagacagaaggtagctggtgatttgcataaggctcaacagtcactggagcttatccagtcaaaaatagtaaaagctgctggagacactactgttattgaaaatagtgatgtttccccagaaacggagtcttctgagaaggagacaatgtctgtaagtctaaatcagactgtaacacagttacagcagttgcttcaggcggtaaaccaacagctcacaaaggagaaagagcactaccaggtgttagagtgaagtaattgggaaactgttcatttgaggataaaaaaggcattgtattatattttgccaaattaaagccttatttatgttttcaccctttctactttgtcagaaacactgaacagagttttgtcttttctaatccttgttagactactgatttaaagaaggaaaaaaaaaagccaactctgtagacaccttcagagtttagttttataataaaaactgtttgaataattagacctttacattcctgaagataaacatgtaatcttttatcttattttgctcaataaaattgttcagaagatcaaagtggtaaagacaatgtaaaatttaacattttaatactgatgttgtacactgttttacttaacattttgggaagtaactgcctctgacttcaactcaagaaaacacttttttgttgctaatgtaatcggtttttgtaatggcgtcagcaaataaaaggatgcttattattcaaacttga

SEQ ID NO: 442198 - DNA, 4594 bp, Homo sapiens
cgccccgaagccgcccgtttcctgccgagcggcgcgacggcacctgagcgactgcggcggcggcggcggcggcggcggcgcctcggagcgggcggcccgggctgtagtgccggcgccgccgcgtcttcccggtctcctttcccggccgcacagggttttataggatcacattgacaaaagtaccatggagttttatgagtcagcatattttattgttcttattccttcaatagttattacagtaattttcctcttcttctggcttttcatgaaagaaacattatatgatgaagttcttgcaaaacagaaaagagaacaaaagcttattcctaccaaaacagataaaaagaaagcagaaaagaaaaagaataaaaagaaagaaatccagaatggaaacctccatgaatccgactctgagagtgtacctcgagactttaaattatcagatgctttggcagtagaagatgatcaagttgcacctgttccattgaatgtcgttgaaacttcaagtagtgttagggaaagaaaaaagaaggaaaagaaacaaaagcctgtgcttgaagagcaggtcatcaaagaaagtgacgcatcaaagattcctggcaaaaaagtagaacctgtcccagttactaaacagcccacccctccctctgaagcagctgcctcgaagaagaaaccagggcagaagaagtctaaaaatggaagcgatgaccaggataaaaaggtggaaactctcatggtaccatcaaaaaggcaagaagcattgcccctccaccaagagactaaacaagaaagtggatcagggaagaagaaagcttcatcaaagaaacaaaagacagaaaatgtcttcgtagatgaaccccttattcatgcaactacttatattcctttgatggataatgctgactcaagtcctgtggtagataagagagaggttattgatttgcttaaacctgaccaagtagaagggatccagaaatctgggactaaaaaactgaagaccgaaactgacaaagaaaatgctgaagtgaagtttaaagattttcttctgtccttgaagactatgatgttttctgaagatgaggctctttgtgttgtagacttgctaaaggagaagtctggtgtaatacaagatgctttaaagaagtcaagtaagggagaattgactacgcttatacatcagcttcaagaaaaggacaagttactcgctgctgtgaaggaagatgctgctgctacaaaggatcggtgtaagcagttaacccaggaaatgatgacagagaaagaaagaagcaatgtggttataacaaggatgaaagatcgaattggaacattagaaaaggaacataatgtatttcaaaacaaaatacatgtcagttatcaagagactcaacagatgcagatgaagtttcagcaagttcgtgagcagatggaggcagagatagctcacttgaagcaggaaaatggtatactgagagatgcagtcagcaacactacaaatcaactggaaagcaagcagtctgcagaactaaataaactacgccaggattatgctaggttggtgaatgagctgactgagaaaacaggaaagctacagcaagaggaagtccaaaagaagaatgctgagcaagcagctactcagttgaaggttcaactacaagaagctgagagaaggtgggaagaagttcagagctacatcaggaagagaacagcggaacatgaggcagcacagcaagatttacagagtaaatttgtggccaaagaaaatgaagtacagagtctgcatagtaagcttacagataccttggtatcaaaacaacagttggagcaaagactaatgcagttaatggaatcagagcagaaaagggtgaacaaagaagagtctctacaaatgcaggttcaggatattttggagcagaatgaggctttgaaagctcaaattcagcagttccattcccagatagcagcccagacctccgcttcagttctagcagaagaattacataaagtgattgcagaaaaggataagcagataaaacagactgaagattctttagcaagtgaacgtgatcgtttaacaagtaaagaagaggaacttaaggatatacagaatatgaatttcttattaaaagctgaagtgcagaaattacaggccctggcaaatgagcaggctgctgctgcacatgaattggagaagatgcaacaaagtgtttatgttaaagatgataaaataagattgctggaagagcaactacaacatgaaatttcaaacaaaatggaagaatttaagattctaaatgaccaaaacaaagcattaaaatcagaagttcagaagctacagactcttgtttctgaacagcctaataaggatgttgtggaacaaatggaaaaatgcattcaagaaaaagatgagaagttaaagactgtggaagaattacttgaaactggacttattcaggtggcaactaaagaagaggagctgaatgcaataagaacagaaaattcatctctgacaaaagaagttcaagacttaaaagctaagcaaaatgatcaggtttcttttgcctctctagttgaagaacttaagaaagtgatccatgagaaagatggaaagatcaagtctgtagaagagcttctggaggcagaacttctcaaagttgctaacaaggagaaaactgttcaggatttgaaacaggaaataaaggctctaaaagaagaaataggaaatgtccagcttgaaaaggctcaacagttatctatcacttccaaagttcaggagcttcagaacttattaaaaggaaaagaggaacagatgaataccatgaaggctgttttggaagagaaagagaaagacctagccaatacagggaagtggttacaggatcttcaagaagaaaatgaatctttaaaagcacatgttcaggaagtagcacaacataacttgaaagaggcctcttctgcatcacagtttgaagaacttgagattgtgttgaaagaaaaggaaaatgaattgaagaggttagaagccatgctaaaagagagggagagtgatctttctagcaaaacacagctgttacaggatgtacaagatgaaaacaaattgtttaagtcccaaattgagcagcttaaacaacaaaactaccaacaggcatcttcttttccccctcatgaagaattattaaaagtaatttcagaaagagagaaagaaataagtggtctctggaatgagttagattctttgaaggatgcagttgaacaccagaggaagaaaaacaatgaaaggcagcaacaggtggaagctgttgagttggaggctaaagaagttctcaaaaaattatttccaaaggtgtctgtcccttctaatttgagttatggtgaatggttgcatggatttgaaaaaaaggcaaaagaatgtatggctggaacttcagggtcagaggaggttaaggttctagagcacaagttgaaagaagctgatgaaatgcacacattgttacagctagagtgtgaaaaatacaaatccgtccttgcagaaacagaaggaattttacagaagctacagagaagtgttgagcaagaagaaaataaatggaaagttaaggtcgatgaatcacacaagactattaaacagatgcagtcatcatttacatcttcagaacaagagctagagcgattaagaagcgaaaataaggatattgaaaatctgagaagagaacgagaacatttggaaatggaactagaaaaggcagagatggaacgatctacctatgttacagaagtcagagagttgaaggcacagttaaatgaaacactcacaaaacttagaactgaacaaaatgaaagacagaaggtagctggtgatttgcataaggctcaacagtcactggagcttatccagtcaaaaatagtaaaagctgctggagacactactgttattgaaaatagtgatgtttccccagaaacggagtcttctgagaaggagacaatgtctgtaagtctaaatcagactgtaacacagttacagcagttgcttcaggcggtaaaccaacagctcacaaaggagaaagagcactaccaggtgttagagtgaagtaattgggaaactgttcatttgaggataaaaaaggcattgtattatattttgccaaattaaagccttatttatgttttcaccctttctactttgtcagaaacactgaacagagttttgtcttttctaatccttgttagactactgatttaaagaaggaaaaaaaaaagccaactctgtagacaccttcagagtttagttttataataaaaactgtttgaataattagacctttacattcctgaagataaacatgtaatcttttatcttattttgctcaataaaattgttcagaagatcaaagtggtaaagacaatgtaaaatttaacattttaatactgatgttgtacactgttttacttaacattttgggaagtaactgcctctgacttcaactcaagaaaacacttttttgttgctaatgtaatcggtttttgtaatggcgtcagcaaataaaaggatgcttattattcaaacttgattattattcaaaaaaaaaagttctaa

SEQ ID NO: 442199 - DNA, 5072 bp, Homo sapiens
  misc_feature (4710)..(4710): n is a, c, g, or t
  misc_feature (4834)..(4834): n is a, c, g, or t
  misc_feature (4865)..(4865): n is a, c, g, or t
  misc_feature (4883)..(4883): n is a, c, g, or t
  misc_feature (4915)..(4915): n is a, c, g, or t
  misc_feature (4927)..(4927): n is a, c, g, or t
  misc_feature (4935)..(4935): n is a, c, g, or t
  misc_feature (4937)..(4937): n is a, c, g, or t
  misc_feature (4942)..(4942): n is a, c, g, or t
  misc_feature (4995)..(4995): n is a, c, g, or t
cgccccgaagccgcccgtttcctgccgagcggcgcgacggcacctgagcgactgcggcggcggcggcggcggcggcggcgcctcggagcgggcggcccgggctgtagtgccggcgccgccgcgtcttcccggtctcctttcccggccgcacagggttttataggatcacattgacaaaagtaccatggagttttatgagtcagcatattttattgttcttattccttcaatagttattacagtaattttcctcttcttctggcttttcatgaaagaaacattatatgatgaagttcttgcaaaacagaaaagagaacaaaagcttattcctaccaaaacagataaaaagaaagcagaaaagaaaaagaataaaaagaaagaaatccagaatggaaacctccatgaatccgactctgagagtgtacctcgagactttaaattatcagatgctttggcagtagaagatgatcaagttgcacctgttccattgaatgtcgttgaaacttcaagtagtgttagggaaagaaaaaagaaggaaaagaaacaaaagcctgtgcttgaagagcaggtcatcaaagaaagtgacgcatcaaagattcctggcaaaaaagtagaacctgtcccagttactaaacagcccacccctccctctgaagcagctgcctcgaagaagaaaccagggcagaagaagtctaaaaatggaagcgatgaccaggataaaaaggtggaaactctcatggtaccatcaaaaaggcaagaagcattgcccctccaccaagagactaaacaagaaagtggatcagggaagaagaaagcttcatcaaagaaacaaaagacagaaaatgtcttcgtagatgaaccccttattcatgcaactacttatattcctttgatggataatgctgactcaagtcctgtggtagataagagagaggttattgatttgcttaaacctgaccaagtagaagggatccagaaatctgggactaaaaaactgaagaccgaaactgacaaagaaaatgctgaagtgaagtttaaagattttcttctgtccttgaagactatgatgttttctgaagatgaggctctttgtgttgtagacttgctaaaggagaagtctggtgtaatacaagatgctttaaagaagtcaagtaagggagaattgactacgcttatacatcagcttcaagaaaaggacaagttactcgctgctgtgaaggaagatgctgctgctacaaaggatcggtgtaagcagttaacccaggaaatgatgacagagaaagaaagaagcaatgtggttataacaaggatgaaagatcgaattggaacattagaaaaggaacataatgtatttcaaaacaaaatacatgtcagttatcaagagactcaacagatgcagatgaagtttcagcaagttcgtgagcagatggaggcagagatagctcacttgaagcaggaaaatggtatactgagagatgcagtcagcaacactacaaatcaactggaaagcaagcagtctgcagaactaaataaactacgccaggattatgctaggttggtgaatgagctgactgagaaaacaggaaagctacagcaagaggaagtccaaaagaagaatgctgagcaagcagctactcagttgaaggttcaactacaagaagctgagagaaggtgggaagaagttcagagctacatcaggaagagaacagcggaacatgaggcagcacagcaagatttacagagtaaatttgtggccaaagaaaatgaagtacagagtctgcatagtaagcttacagataccttggtatcaaaacaacagttggagcaaagactaatgcagttaatggaatcagagcagaaaagggtgaacaaagaagagtctctacaaatgcaggttcaggatattttggagcagaatgaggctttgaaagctcaaattcagcagttccattcccagatagcagcccagacctccgcttcagttctagcagaagaattacataaagtgattgcagaaaaggataagcagataaaacagactgaagattctttagcaagtgaacgtgatcgtttaacaagtaaagaagaggaacttaaggatatacagaatatgaatttcttattaaaagctgaagtgcagaaattacaggccctggcaaatgagcaggctgctgctgcacatgaattggagaagatgcaacaaagtgtttatgttaaagatgataaaataagattgctggaagagcaactacaacatgaaatttcaaacaaaatggaagaatttaagattctaaatgaccaaaacaaagcattaaaatcagaagttcagaagctacagactcttgtttctgaacagcctaataaggatgttgtggaacaaatggaaaaatgcattcaagaaaaagatgagaagttaaagactgtggaagaattacttgaaactggacttattcaggtggcaactaaagaagaggagctgaatgcaataagaacagaaaattcatctctgacaaaagaagttcaagacttaaaagctaagcaaaatgatcaggtttcttttgcctctctagttgaagaacttaagaaagtgatccatgagaaagatggaaagatcaagtctgtagaagagcttctggaggcagaacttctcaaagttgctaacaaggagaaaactgttcaggatttgaaacaggaaataaaggctctaaaagaagaaataggaaatgtccagcttgaaaaggctcaacagttatctatcacttccaaagttcaggagcttcagaacttattaaaaggaaaagaggaacagatgaataccatgaaggctgttttggaagagaaagagaaagacctagccaatacagggaagtggttacaggatcttcaagaagaaaatgaatctttaaaagcacatgttcaggaagtagcacaacataacttgaaagaggcctcttctgcatcacagtttgaagaacttgagattgtgttgaaagaaaaggaaaatgaattgaagaggttagaagccatgctaaaagagagggagagtgatctttctagcaaaacacagctgttacaggatgtacaagatgaaaacaaattgtttaagtcccaaattgagcagcttaaacaacaaaactaccaacaggcatcttcttttccccctcatgaagaattattaaaagtaatttcagaaagagagaaagaaataagtggtctctggaatgagttagattctttgaaggatgcagttgaacaccagaggaagaaaaacaatgaaaggcagcaacaggtggaagctgttgagttggaggctaaagaagttctcaaaaaattatttccaaaggtgtctgtcccttctaatttgagttatggtgaatggttgcatggatttgaaaaaaaggcaaaagaatgtatggctggaacttcagggtcagaggaggttaaggttctagagcacaagttgaaagaagctgatgaaatgcacacattgttacagctagagtgtgaaaaatacaaatccgtccttgcagaaacagaaggaattttacagaagctacagagaagtgttgagcaagaagaaaataaatggaaagttaaggtcgatgaatcacacaagactattaaacagatgcagtcatcatttacatcttcagaacaagagctagagcgattaagaagcgaaaataaggatattgaaaatctgagaagagaacgagaacatttggaaatggaactagaaaaggcagagatggaacgatctacctatgttacagaagtcagagagttgaaggcacagttaaatgaaacactcacaaaacttagaactgaacaaaatgaaagacagaaggtagctggtgatttgcataaggctcaacagtcactggagcttatccagtcaaaaatagtaaaagctgctggagacactactgttattgaaaatagtgatgtttccccagaaacggagtcttctgagaaggagacaatgtctgtaagtctaaatcagactgtaacacagttacagcagttgcttcaggcggtaaaccaacagctcacaaaggagaaagagcactaccaggtgttagagtgaagtaattgggaaactgttcatttgaggataaaaaaggcattgtattatattttgccaaattaaagccttatttatgttttcaccctttctactttgtcagaaacactgaacagagttttgtcttttctaatccttgttagactactgatttaaagaaggaaaaaaaaaagccaactctgtagacaccttcagagtttagttttataataaaaactgtttgaataattagacctttacattcctgaagataaacatgtaatcttttatcttattttgctcaataaaattgttcagaagatcaaagtggtaaagacaatgtaaaatttaacattttaatactgatgttgtacactgttttacttaacattttgggaagtaactgcctctgacttcaactcaagaaaacacttttttgttgctaatgtaatcggtttttgtaatggcgtcagcaaataaaaggatgcttattattcaaacttgaaatgccctcctcgcctcacggtggagtctgccgcgctccctctaaggaggctattcatgatctccgtcactgcatcctgccctcgtcggtcgttgcgctgacggtatatttactcaagccgccattgtcctcacacatccgncatactctagaagacctccgcccacgctataacggcgccacctcaccgccggtcctccgttttctatatgttcgcctccgcaggcaccagaatgacccaagcgcggatgccacaccctgcttcnataccctgcgttccttgtacctccctccgcnttcttccactcgcgcccncgacctgctccttccccttgcgcgcgggtcantgtatatccgtntatacacncnttcgngtgcacctcgcgcgcgacatctatctacacctactatctctatatgtcacgtnatccccctccttgatatataccaccgaccgccaccgctcgcgttagtcgcgcgcacactgtgtgtgtatcttcgccc

SEQ ID NO: 442200 - DNA, 2459 bp, Homo sapiens
  misc_feature (132)..(132): n is a, c, g, or t
actgatggacattttggtcataaggtgctgttggggtgcaacactgaataaggatgccaccaaagcagctacagcagctgcagatttcacagccaaagtgtgggatgctgtctcaggagatgagttgatgancctggctcataaacacattgtcaagactgtggatttcacgcaggatagtaattatttgttaaccgggggacaggataaactgttacgcatatatgacttgaaccaacctgaagcagaacctaaggaagttgtggaacaaatggaaaaatgcattcaagaaaaagatgagaagttaaagactgtggaagaattacttgaaactggacttattcaggtggcaactaaagaagaggagctgaatgcaataagaacagaaaattcatctctgacaaaagaagttcaagacttaaaagctaagcaaaatgatcaggtttcttttgcctctctagttgaagaacttaagaaagtgatccatgagaaagatggaaagatcaagtctgtagaagagcttctggaggcagaacttctcaaagttgctaacaaggagaaaactgttcaggatttgaaacaggaaataaaggctctaaaagaagaaataggaaatgtccagcttgaaaaggctcaacagttatctatcacttccaaagttcaggagcttcagaacttattaaaaggaaaagaggaacagatgaataccatgaaggctgttttggaagagaaagagaaagacctagccaatacagggaagtggttacaggatcttcaagaagaaaatgaatctttaaaagcacatgttcaggaagtagcacaacataacttgaaagaggcctcttctgcatcacagtttgaagaacttgagattgtgttgaaagaaaaggaaaatgaattgaagaggttagaagccatgctaaaagagagggagagtgatctttctagcaaaacacagctgttacaggatgtacaagatgaaaacaaattgtttaagtcccaaattgagcagcttaaacaacaaaactaccaacaggcatcttcttttccccctcatgaagaattattaaaagtaatttcagaaagagagaaagaaataagtggtctctggaatgagttagattctttgaaggatgcagttgaacaccagaggaagaaaaacaatgaaaggcagcaacaggtggaagctgttgagttggaggctaaagaagttctcaaaaaattatttccaaaggtgtctgtcccttctaatttgagttatggtgaatggttgcatggatttgaaaaaaaggcaaaagaatgtatggctggaacttcagggtcagaggaggttaaggttctagagcacaagttgaaagaagctgatgaaatgcacacattgttacagctagagtgtgaaaaatacaaatccgtccttgcagaaacagaaggaattttacagaagctacagagaagtgttgagcaagaagaaaataaatggaaagttaaggtcgatgaatcacacaagactattaaacagatgcagtcatcatttacatcttcagaacaagagctagagcgattaagaagcgaaaataaggatattgaaaatctgagaagagaacgagaacatttggaaatggaactagaaaaggcagagatggaacgatctacctatgttacagaagtcagagagttgaaggcacagttaaatgaaacactcacaaaacttagaactgaacaaaatgaaagacagaaggtagctggtgatttgcataaggctcaacagtcactggagcttatccagtcaaaaatagtaaaagctgctggagacactactgttattgaaaatagtgatgtttccccagaaacggagtcttctgagaaggagacaatgtctgtaagtctaaatcagactgtaacacagttacagcagttgcttcaggcggtaaaccaacagctcacaaaggagaaagagcactaccaggtgttagagtgaagtaattgggaaactgttcatttgaggataaaaaaggcattgtattatattttgccaaattaaagccttatttatgttttcaccctttctactttgtcagaaacactgaacagagttttgtcttttctaatccttgttagactactgatttaaagaaggaaaaaaaaaagccaactctgtagacaccttcagagtttagttttataataaaaactgtttgaataattagacctttacattcctgaagataaacatgtaatcttttatcttattttgctcaataaaattgttcagaagatcaaagtggtaaagacaatgtaaaatttaacattttaatactgatgttgtacactgttttacttaacattttgggaagtaactgcctctgacttcaactcaagaaaacacttttttgttgctaatgtaatcggtttttgtaatggcgtcagcaaataaaaggatgcttattattcaaacttga

SEQ ID NO: 442201 - DNA, 2194 bp, Homo sapiens
cggacgcgtgggtcgacccacgcgtccggctacagactcttgtttctgaacagcctaataaggatgttgtggacaaatggaaaatgcattcaagaaaaagatgagaagttaaagactgtggaagaattacttgaaactggacttattcaggtggcaactaaagaagaggagctgaatgcaataagaacagaaaattcatctctgacaaaagaagttcaagacttaaaagctaagcaaaatgatcaggtttcttttgcctctctagttgaagaacttaagaaagtgatccatgagaaagatggaaagatcaagtctgtagaagagcttctggaggcagaacttctcaaagttgctaacaaggagaaaactgttcagttatctatcacttccaaagttcaggagcttcagaacttattaaaaggaaaagaggaacagatgaataccatgaaggctgttttggaagagaaagagaaagacctagccaatacagggaagtggttacaggatcttcaagaagaaaatgaatctttaaaagcacatgttcaggaagtagcacaacataacttgaaagaggcctcttctgcatcacagtttgaagaacttgagattgtgttgaaagaaaaggaaaatgaattgaagaggttagaagccatgctaaaagagagggagagtgatctttctagcaaaacacagctgttacaggatgtacaagatgaaaacaaattgtttaagtcccaaattgagcagcttaaacaacaaaactaccaacaggcatcttcttttccccctcatgaagaattattaaaagtaatttcagaaagagagaaagaaataagtggtctctggaatgagttagattctttgaaggatgcagttgaacaccagaggaagaaaaacaatgaaaggcagcaacaggtggaagctgttgagttggaggctaaagaagttctcaaaaaattatttccaaaggtgtctgtcccttctaatttgagttatggtgaatggttgcatggatttgaaaaaaaggcaaaagaatgtatggctggaacttcagggtcagaggaggttaaggttctagagcacaagttgaaagaagctgatgaaatgcacacattgttacagctagagtgtgaaaaatacaaatccgtccttgcagaaacagaaggaattttacagaagctacagagaagtgttgagcaagaagaaaataaatggaaagttaaggtcgatgaatcacacaagactattaaacagatgcagtcatcatttacatcttcagaacaagagctagagcgattaagaagcgaaaataaggatattgaaaatctgagaagagaacgagaacatttggaaatggaactagaaaaggcagagatggaacgatctacctatgttacagaagtcagagagttgaaggcacagttaaatgaaacactcacaaaacttagaactgaacaaaatgaaagacagaaggtagctggtgatttgcataaggctcaacagtcactggagcttatccagtcaaaaatagtaaaagctgctggagacactactgttattgaaaatagtgatgtttccccagaaacggagtcttctgagaaggagacaatgtctgtaagtctaaatcagactgtaacacagttacagcagttgcttcaggcggtaaaccaacagctcacaaaggagaaagagcactaccaggtgttagagtgaagtaattgggaaactgttcatttgaggataaaaaaggcattgtattatattttgccaaattaaagccttatttatgttttcaccctttctactttgtcagaaacactgaacagagttttgtcttttctaatccttgttagactactgatttaaagaaggaaaaaaaaaagccaactctgtagacaccttcagagtttagttttataataaaaactgtttgaataattagacctttacattcctgaagataaacatgtaatcttttatcttattttgctcaataaaattgttcagaagatcaaagtggtaaagacaatgtaaaatttaacattttaatactgatgttgtacactgttttacttaacattttgggaagtaactgcctctgacttcaactcaagaaaacacttttttgttgctaatgtaatcggtttttgtaatggcgtcagcaaataaaaggatgcttattattcaaacttga

SEQ ID NO: 442202 - DNA, 1346 bp, Homo sapiens
  misc_feature (18)..(18): n is a, c, g, or t
  misc_feature (36)..(37): n is a, c, g, or t
  misc_feature (39)..(39): n is a, c, g, or t
gggggggccgccctgganagaggattggtttttttnngncccttcgggtaaagaaaggcagcaacaggtggaagctgttgagttggaggctaaagaagttctcaaaaaattatttccaaaggtgtctgtcccttctaatttgagttatggtgaatggttgcatggatttgaaaaaaaggcaaaagaatgtatggctggaacttcagggtcagaggaggttaaggttctagagcacaagttgaaagaagctgatgaaatgcacacattgttacagctagagtgtgaaaaatacaaatccgtccttgcagaaacagaaggaattttacagaagctacagagaagtgttgagcaagaagaaaataaatggaaagttaaggtcgatgaatcacacaagactattaaacagatgcagtcatcatttacatcttcagaacaagagctagagcgattaagaagcgaaaataaggatattgaaaatctgagaagagaacgagaacatttggaaatggaactagaaaaggcagagatggaacgatctacctatgttacagaagtcagagagttgaaggcacagttaaatgaaacactcacaaaacttagaactgaacaaaatgaaagacagaaggtagctggtgatttgcataaggctcaacagtcactggagcttatccagtcaaaaatagtaaaagctgctggagacactactgttattgaaaatagtgatgtttccccagaaacggagtcttctgagaaggagacaatgtctgtaagtctaaatcagactgtaacacagttacagcagttgcttcaggcggtaaaccaacagctcacaaaggagaaagagcactaccaggtgttagagtgaagtaattgggaaactgttcatttgaggataaaaaaggcattgtattatattttgccaaattaaagccttatttatgttttcaccctttctactttgtcagaaacactgaacagagttttgtcttttctaatccttgttagactactgatttaaagaaggaaaaaaaaaagccaactctgtagacaccttcagagtttagttttataataaaaactgtttgaataattagacctttacattcctgaagataaacatgtaatcttttatcttattttgctcaataaaattgttcagaagatcaaagtggtaaagacaatgtaaaatttaacattttaatactgatgttgtacactgttttacttaacattttgggaagtaactgcctctgacttcaactcaagaaaacacttttttgttgctaatgtaatcggtttttgtaatggcgtcagcaaataaaaggatgcttattattcaaacttga

SEQ ID NO: 442203 - DNA, 1346 bp, Homo sapiens
acgacgaccacgcaacgctttgtgccgttaatactcacaaacacctagcaaagaaaggcagcaacaggtggaagctgttgagttggaggctaaagaagttctcaaaaaattatttccaaaggtgtctgtcccttctaatttgagttatggtgaatggttgcatggatttgaaaaaaaggcaaaagaatgtatggctggaacttcagggtcagaggaggttaaggttctagagcacaagttgaaagaagctgatgaaatgcacacattgttacagctagagtgtgaaaaatacaaatccgtccttgcagaaacagaaggaattttacagaagctacagagaagtgttgagcaagaagaaaataaatggaaagttaaggtcgatgaatcacacaagactattaaacagatgcagtcatcatttacatcttcagaacaagagctagagcgattaagaagcgaaaataaggatattgaaaatctgagaagagaacgagaacatttggaaatggaactagaaaaggcagagatggaacgatctacctatgttacagaagtcagagagttgaaggcacagttaaatgaaacactcacaaaacttagaactgaacaaaatgaaagacagaaggtagctggtgatttgcataaggctcaacagtcactggagcttatccagtcaaaaatagtaaaagctgctggagacactactgttattgaaaatagtgatgtttccccagaaacggagtcttctgagaaggagacaatgtctgtaagtctaaatcagactgtaacacagttacagcagttgcttcaggcggtaaaccaacagctcacaaaggagaaagagcactaccaggtgttagagtgaagtaattgggaaactgttcatttgaggataaaaaaggcattgtattatattttgccaaattaaagccttatttatgttttcaccctttctactttgtcagaaacactgaacagagttttgtcttttctaatccttgttagactactgatttaaagaaggaaaaaaaaaagccaactctgtagacaccttcagagtttagttttataataaaaactgtttgaataattagacctttacattcctgaagataaacatgtaatcttttatcttattttgctcaataaaattgttcagaagatcaaagtggtaaagacaatgtaaaatttaacattttaatactgatgttgtacactgttttacttaacattttgggaagtaactgcctctgacttcaactcaagaaaacacttttttgttgctaatgtaatcggtttttgtaatggcgtcagcaaataaaaggatgcttattattcaaacttga

SEQ ID NO: 442204 - DNA, 1361 bp, Homo sapiens
  misc_feature (19)..(19): n is a, c, g, or t
cttattttccttctttatngaccaacaggcatcttcttttccccctcatgaagaattattaaaagtaatttcagaaagagagaaagaaataagtggtctctggaatgagttagattctttgaaggatgcagttgaacaccagaggaagaaaaacaatagttatggtgaatggttgcatggatttgaaaaaaaggcaaaagaatgtatggctggaacttcagggtcagaggaggttaaggttctagagcacaagttgaaagaagctgatgaaatgcacacattgttacagctagagtgtgaaaaatacaaatccgtccttgcagaaacagaaggaattttacagaagctacagagaagtgttgagcaagaagaaaataaatggaaagttaaggtcgatgaatcacacaagactattaaacagatgcagtcatcatttacatcttcagaacaagagctagagcgattaagaagcgaaaataaggatattgaaaatctgagaagagaacgagaacatttggaaatggaactagaaaaggcagagatggaacgatctacctatgttacagaagtcagagagttgaaggcacagttaaatgaaacactcacaaaacttagaactgaacaaaatgaaagacagaaggtagctggtgatttgcataaggctcaacagtcactggagcttatccagtcaaaaatagtaaaagctgctggagacactactgttattgaaaatagtgatgtttccccagaaacggagtcttctgagaaggagacaatgtctgtaagtctaaatcagactgtaacacagttacagcagttgcttcaggcggtaaaccaacagctcacaaaggagaaagagcactaccaggtgttagagtgaagtaattgggaaactgttcatttgaggataaaaaaggcattgtattatattttgccaaattaaagccttatttatgttttcaccctttctactttgtcagaaacactgaacagagttttgtcttttctaatccttgttagactactgatttaaagaaggaaaaaaaaaagccaactctgtagacaccttcagagtttagttttataataaaaactgtttgaataattagacctttacattcctgaagataaacatgtaatcttttatcttattttgctcaataaaattgttcagaagatcaaagtggtaaagacaatgtaaaatttaacattttaatactgatgttgtacactgttttacttaacattttgggaagtaactgcctctgacttcaactcaagaaaacacttttttgttgctaatgtaatcggtttttgtaatggcgtcagcaaataaaaggatgcttattattcaaacttga

SEQ ID NO: 442205 - DNA, 4235 bp, Homo sapiens
cgccccgaagccgcccgtttcctgccgagcggcgcgacggcacctgagcgactgcggcggcggcggcggcggcggcggcgcctcggagcgggcggcccgggctgtagtgccggcgccgccgcgtcttcccggtctcctttcccggccgcacagggttttataggatcacattgacaaaagtaccatggagttttatgagtcagcatattttattgttcttattccttcaatagttattacagtaattttcctcttcttctggcttttcatgaaagaaacattatatgatgaagttcttgcaaaacagaaaagagaacaaaagcttattcctaccaaaacagataaaaagaaagcagaaaagaaaaagaataaaaagaaagaaatccagaatggaaacctccatgaatccgactctgagagtgtacctcgagactttaaattatcagatgctttggcagtagaagatgatcaagttgcacctgttccattgaatgtcgttgaaacttcaagtagtgttagggaaagaaaaaagaaggaaaagaaacaaaagcctgtgcttgaagagcaggtcatcaaagaaagtgacgcatcaaagattcctggcaaaaaagtagaacctgtcccagttactaaacagcccacccctccctctgaagcagctgcctcgaagaagaaaccagggcagaagaagtctaaaaatggaagcgatgaccaggataaaaaggtggaaactctcatggtaccatcaaaaaggcaagaagcattgcccctccaccaagagactaaacaagaaagtggatcagggaagaagaaagcttcatcaaagaaacaaaagacagaaaatgtcttcgtagatgaaccccttattcatgcaactacttatattcctttgatggataatgctgactcaagtcctgtggtagataagagagaggttattgatttgcttaaacctgaccaagtagaagggatccagaaatctgggactaaaaaactgaagaccgaaactgacaaagaaaatgctgaagtgaagtttaaagattttcttctgtccttgaagactatgatgttttctgaagatgaggctctttgtgttgtagacttgctaaaggagaagtctggtgtaatacaagatgctttaaagaagtcaagtaagggagaattgactacgcttatacatcagcttcaagaaaaggacaagttactcgctgctgtgaaggaagatgctgctgctacaaaggatcggtgtaagcagttaacccaggaaatgatgacagagaaagaaagaagcaatgtggttataacaaggatgaaagatcgaattggaacattagaaaaggaacataatgtatttcaaaacaaaatacatgtcagttatcaagagactcaacagatgcagatgaagtttcagcaagttcgtgagcagatggaggcagagatagctcacttgaagcaggaaaatggtatactgagagatgcagtcagcaacactacaaatcaactggaaagcaagcagtctgcagaactaaataaactacgccaggattatgctaggttggtgaatgagctgactgagaaaacaggaaagctacagcaagaggaagtccaaaagaagaatgctgagcaagcagctactcagttgaaggttcaactacaagaagctgagagaaggtgggaagaagttcagagctacatcaggaagagaacagcggaacatgaggcagcacagcaagatttacagagtaaatttgtggccaaagaaaatgaagtacagagtctgcatagtaagcttacagataccttggtatcaaaacaacagttggagcaaagactaatgcagttaatggaatcagagcagaaaagggtgaacaaagaagagtctctacaaatgcaggttcaggatattttggagcagaatgaggctttgaaagctcaaattcagcagttccattcccagatagcagcccagacctccgcttcagttctagcagaagaattacataaagtgattgcagaaaaggataagcagataaaacagactgaagattctttagcaagtgaacgtgatcgtttaacaagtaaagaagaggaacttaaggatatacagaatatgaatttcttattaaaagctgaagtgcagaaattacaggccctggcaaatgagcaggctgctgctgcacatgaattggagaagatgcaacaaagtgtttatgttaaagatgataaaataagattgctggaagagcaactacaacatgaaatttcaaacaaaatggaagaatttaagattctaaatgaccaaaacaaagcattaaaatcagaagttcagaagctacagactcttgtttctgaacagcctaataaggatgttgtggaacaaatggaaaaatgcattcaagaaaaagatgagaagttaaagactgtggaagaattacttgaaactggacttattcaggtggcaactaaagaagaggagctgaatgcaataagaacagaaaattcatctctgacaaaagaagttcaagacttaaaagctaagcaaaatgatcaggtttcttttgcctctctagttgaagaacttaagaaagtgatccatgagaaagatggaaagatcaagtctgtagaagagcttctggaggcagaacttctcaaagttgctaacaaggagaaaactgttcaggatttgaaacaggaaataaaggctctaaaagaagaaataggaaatgtccagcttgaaaaggctcaacagttatctatcacttccaaagttcaggagcttcagaacttattaaaaggaaaagaggaacagatgaataccatgaaggctgttttggaagagaaagagaaagacctagccaatacagggaagtggttacaggatcttcaagaagaaaatgaatctttaaaagcacatgttcaggaagtagcacaacataacttgaaagaggcctcttctgcatcacagtttgaagaacttgagattgtgttgaaagaaaaggaaaatgaattgaagaggttagaagccatgctaaaagagagggagagtgatctttctagcaaaacacagctgttacaggatgtacaagatgaaaacaaattgtttaagtcccaaattgagcagcttaaacaacaaaactaccaacaggcatcttcttttccccctcatgaagaattattaaaagtaatttcagaaagagagaaagaaataagtggtctctggaatgagttagattctttgaaggatgcagttgaacaccagaggaagaaaaacaatgaaaggcagcaacaggtggaagctgttgagttggaggctaaagaagttctcaaaaaattatttccaaaggtgtctgtcccttctaatttgagttatggtgaatggttgcatggatttgaaaaaaaggcaaaagaatgtatggctggaacttcagggtcagaggaggttaaggttctagagcacaagttgaaagaagctgatgaaatgcacacattgttacagctagagtgtgaaaaatacaaatccgtccttgcagaaacagaaggaattttacagaagctacagagaagtgttgagcaagaagaaaataaatggaaagttaaggtcgatgaatcacacaagactattaaacagatgcagtcatcatttacatcttcagaacaagagctagagcgattaagaagcgaaaataaggatattgaaaatctgagaagagaacgagaacatttggaaatggaactagaaaaggcagagatggaacgatctacctatgttacagaagtcagagagttgaaggcacagttaaatgaaacactcacaaaacttagaactgaacaaaatgaaagacagaaggtagctggtgatttgcataaggctcaacagtcactggagcttatccagtcaaaaatagtaaaagctgctggagacactactgttattgaaaatagtgatgtttccccagaaacggagtcttctgagaaggagacaatgtctgtaagtctaaatcagactgtaacacagttacagcagttgcttcaggcggtaaaccaacagctcacaaaggagaaagagcactaccaggtgttagacacgatggttggtgatgcagcagccatcttgtgaccaagaagaaaggccaaaagaattgcaggagaattggccctaaaatcaatgaaactctcacccacccctttaacctcttgtctccagacttctgggtatgtaaaaacacaacacaaca

SEQ ID NO: 442206 - DNA, 1223 bp, Homo sapiens
tcctgggagcaaaacaatgaaccaacagcccccaagcagggaactagatgatgaactcaaccaatttacaatagctgcaaaaaagttaaaatccttagtaatatatttaacaaaggagtccaaagaccgctacatgtaaaactacaaaacactgctgaaaaaaatcacagacaatgcaaacaaatggaaacacatcccatgctcatggatgggtagaaccagtattgtgaaaatgaccataccactgaaagcaatctacaaattcaatgcaatcctcatcggaatgcagtcatcatttacatcttcagaacaagagctagagcgattaagaagcgaaaataaggatattgaaaatctgagaagagaacgagaacatttggaaatggaactagaaaaggcagagatggaacgatctacctatgttacagaagtcagagagttgaaggcacagttaaatgaaacactcacaaaacttagaactgaacaaaatgaaagacagaaggtagctggtgatttgcataaggctcaacagtcactggagcttatccagtcaaaaatagtaaaagctgctggagacactactgttattgaaaatagtgatgtttccccagaaacggagtcttctgagaaggagacaatgtctgtaagtctaaatcagactgtaacacagttacagcagttgcttcaggcggtaaaccaacagctcacaaaggagaaagagcactaccaggtgttagagtgaagtaattgggaaactgttcatttgaggataaaaaaggcattgtattatattttgccaaattaaagccttatttatgttttcaccctttctactttgtcagaaacactgaacagagttttgtcttttctaatccttgttagactactgatttaaagaaggaaaaaaaaaagccaactctgtagacaccttcagagtttagttttataataaaaactgtttgaataattagacctttacattcctgaagataaacatgtaatcttttatcttattttgctcaataaaattgttcagaagatcaaagtggtaaagacaatgtaaaatttaacattttaatactgatgttgtacactgttttacttaacattttgggaagtaactgcctctgacttcaactcaagaaaacacttttttgttgctaatgtaatcggtttttgtaatggcgtcagcaaataaaaggatgcttattattcaaacttga

SEQ ID NO: 442207 - DNA, 874 bp, Homo sapiens
  misc_feature (5)..(5): n is a, c, g, or t
  misc_feature (84)..(84): n is a, c, g, or t
ggatntggaaatttgggaggggaggagaacattgggaatggaattggaaaggcagagtggaacgatcaacttatttaacagaantcagagttgaaggcacagttaaatgaaacactcacaaaacttagaactgaacaaaatgaaagacagaaggtagctggtgatttgcataaggctcaacagtcactggagcttatccagtcaaaaatagtaaaagctgctggagacactactgttattgaaaatagtgatgtttccccagaaacggagtcttctgagaaggagacaatgtctgtaagtctaaatcagactgtaacacagttacagcagttgcttcaggcggtaaaccaacagctcacaaaggagaaagagcactaccaggtgttagagtgaagtaattgggaaactgttcatttgaggataaaaaaggcattgtattatattttgccaaattaaagccttatttatgttttcaccctttctactttgtcagaaacactgaacagagttttgtcttttctaatccttgttagactactgatttaaagaaggaaaaaaaaaagccaactctgtagacaccttcagagtttagttttataataaaaactgtttgaataattagacctttacattcctgaagataaacatgtaatcttttatcttattttgctcaataaaattgttcagaagatcaaagtggtaaagacaatgtaaaatttaacattttaatactgatgttgtacactgttttacttaacattttgggaagtaactgcctctgacttcaactcaagaaaacacttttttgttgctaatgtaatcggtttttgtaatggcgtcagcaaataaaaggatgcttattattcaaacttga

SEQ ID NO: 442208 - DNA, 3393 bp, Homo sapiens
  misc_feature (3298)..(3298): n is a, c, g, or t
  misc_feature (3312)..(3312): n is a, c, g, or t
cgccccgaagccgcccgtttcctgccgagcggcgcgacggcacctgagcgactgcggcggcggcggcggcggcggcggcgcctcggagcgggcggcccgggctgtagtgccggcgccgccgcgtcttcccggtctcctttcccggccgcacagggttttataggatcacattgacaaaagtaccatggagttttatgagtcagcatattttattgttcttattccttcaatagttattacagtaattttcctcttcttctggcttttcatgaaagaaacattatatgatgaagttcttgcaaaacagaaaagagaacaaaagcttattcctaccaaaacagataaaaagaaagcagaaaagaaaaagaataaaaagaaagaaatccagaatggaaacctccatgaatccgactctgagagtgtacctcgagactttaaattatcagatgctttggcagtagaagatgatcaagttgcacctgttccattgaatgtcgttgaaacttcaagtagtgttagggaaagaaaaaagaaggaaaagaaacaaaagcctgtgcttgaagagcaggtcatcaaagaaagtgacgcatcaaagattcctggcaaaaaagtagaacctgtcccagttactaaacagcccacccctccctctgaagcagctgcctcgaagaagaaaccagggcagaagaagtctaaaaatggaagcgatgaccaggataaaaaggtggaaactctcatggtaccatcaaaaaggcaagaagcattgcccctccaccaagagactaaacaagaaagtggatcagggaagaagaaagcttcatcaaagaaacaaaagacagaaaatgtcttcgtagatgaaccccttattcatgcaactacttatattcctttgatggataatgctgactcaagtcctgtggtagataagagagaggttattgatttgcttaaacctgaccaagtagaagggatccagaaatctgggactaaaaaactgaagaccgaaactgacaaagaaaatgctgaagtgaagtttaaagattttcttctgtccttgaagactatgatgttttctgaagatgaggctctttgtgttgtagacttgctaaaggagaagtctggtgtaatacaagatgctttaaagaagtcaagtaagggagaattgactacgcttatacatcagcttcaagaaaaggacaagttactcgctgctgtgaaggaagatgctgctgctacaaaggatcggtgtaagcagttaacccaggaaatgatgacagagaaagaaagaagcaatgtggttataacaaggatgaaagatcgaattggaacattagaaaaggaacataatgtatttcaaaacaaaatacatgtcagttatcaagagactcaacagatgcagatgaagtttcagcaagttcgtgagcagatggaggcagagatagctcacttgaagcaggaaaatggtatactgagagatgcagtcagcaacactacaaatcaactggaaagcaagcagtctgcagaactaaataaactacgccaggattatgctaggttggtgaatgagctgactgagaaaacaggaaagctacagcaagaggaagtccaaaagaagaatgctgagcaagcagctactcagttgaaggttcaactacaagaagctgagagaaggtgggaagaagttcagagctacatcaggaagagaacagcggaacatgaggcagcacagcaagatttacagagtaaatttgtggccaaagaaaatgaagtacagagtctgcatagtaagcttacagataccttggtatcaaaacaacagttggagcaaagactaatgcagttaatggaatcagagcagaaaagggtgaacaaagaagagtctctacaaatgcaggttcaggatattttggagcagaatgaggctttgaaagctcaaattcagcagttccattcccagatagcagcccagacctccgcttcagttctagcagaagaattacataaagtgattgcagaaaaggataagcagataaaacagactgaagattctttagcaagtgaacgtgatcgtttaacaagtaaagaagaggaacttaaggatatacagaatatgaatttcttattaaaagctgaagtgcagaaattacaggccctggcaaatgagcaggctgctgctgcacatgaattggagaagatgcaacaaagtgtttatgttaaagatgataaaataagattgctggaagagcaactacaacatgaaatttcaaacaaaatggaagaatttaagattctaaatgaccaaaacaaagcattaaaatcagaagttcagaagctacagactcttgtttctgaacagcctaataaggatgttgtggaacaaatggaaaaatgcattcaagaaaaagatgagaagttaaagactgtggaagaattacttgaaactggacttattcaggtggcaactaaagaagaggagctgaatgcaataagaacagaaaattcatctctgacaaaagaagttcaagacttaaaagctaagcaaaatgatcaggtttcttttgcctctctagttgaagaacttaagaaagtgatccatgagaaagatggaaagatcaagtctgtagaagagcttctggaggcagaacttctcaaagttgctaacaaggagaaaactgttcaggatttgaaacaggaaataaaggctctaaaagaagaaataggaaatgtccagcttgaaaaggctcaacagttatctatcacttccaaagttcaggagcttcagaacttattaaaaggaaaagaggaacagatgaataccatgaaggctgttttggaagagaaagagaaagacctagccaatacagggaagtggttacaggatcttcaagaagaaaatgaatctttaaaagcacatgttcaggaagtagcacaacataacttgaaagaggcctcttctgcatcacagtttgaagaacttgagattgtgttgaaagaaaaggaaaatgaattgaagaggttagaagccatgctaaaagagagggagagtgatctttctagcaaaacacagctgttacaggatgtacaagatgaaaacaaattgtttaagtcccaaattgagcagcttaaacaacaaaactaccaacaggcatcttcttttccccctcatgaagaattattaaaagtaatttcagaaagagagaaagaaataagtggtctctggaatgagttagattctttgaaggatgcagttgaacaccagaggaagaaaaacaattgaaaggcaacaaacaaggtgggnaagcctgtttgaantttgggagggcttaaaaggaaagtttcctcaaaaaaaaatttaattttccaaaaagggtggtcccgggtcccctttccaaa

SEQ ID NO: 442209 - DNA, 3906 bp, Homo sapiens
cgccccgaagccgcccgtttcctgccgagcggcgcgacggcacctgagcgactgcggcggcggcggcggcggcggcggcgcctcggagcgggcggcccgggctgtagtgccggcgccgccgcgtcttcccggtctcctttcccggccgcacagggttttataggatcacattgacaaaagtaccatggagttttatgagtcagcatattttattgttcttattccttcaatagttattacagtaattttcctcttcttctggcttttcatgaaagaaacattatatgatgaagttcttgcaaaacagaaaagagaacaaaagcttattcctaccaaaacagataaaaagaaagcagaaaagaaaaagaataaaaagaaagaaatccagaatggaaacctccatgaatccgactctgagagtgtacctcgagactttaaattatcagatgctttggcagtagaagatgatcaagttgcacctgttccattgaatgtcgttgaaacttcaagtagtgttagggaaagaaaaaagaaggaaaagaaacaaaagcctgtgcttgaagagcaggtcatcaaagaaagtgacgcatcaaagattcctggcaaaaaagtagaacctgtcccagttactaaacagcccacccctccctctgaagcagctgcctcgaagaagaaaccagggcagaagaagtctaaaaatggaagcgatgaccaggataaaaaggtggaaactctcatggtaccatcaaaaaggcaagaagcattgcccctccaccaagagactaaacaagaaagtggatcagggaagaagaaagcttcatcaaagaaacaaaagacagaaaatgtcttcgtagatgaaccccttattcatgcaactacttatattcctttgatggataatgctgactcaagtcctgtggtagataagagagaggttattgatttgcttaaacctgaccaagtagaagggatccagaaatctgggactaaaaaactgaagaccgaaactgacaaagaaaatgctgaagtgaagtttaaagattttcttctgtccttgaagactatgatgttttctgaagatgaggctctttgtgttgtagacttgctaaaggagaagtctggtgtaatacaagatgctttaaagaagtcaagtaagggagaattgactacgcttatacatcagcttcaagaaaaggacaagttactcgctgctgtgaaggaagatgctgctgctacaaaggatcggtgtaagcagttaacccaggaaatgatgacagagaaagaaagaagcaatgtggttataacaaggatgaaagatcgaattggaacattagaaaaggaacataatgtatttcaaaacaaaatacatgtcagttatcaagagactcaacagatgcagatgaagtttcagcaagttcgtgagcagatggaggcagagatagctcacttgaagcaggaaaatggtatactgagagatgcagtcagcaacactacaaatcaactggaaagcaagcagtctgcagaactaaataaactacgccaggattatgctaggttggtgaatgagctgactgagaaaacaggaaagctacagcaagaggaagtccaaaagaagaatgctgagcaagcagctactcagttgaaggttcaactacaagaagctgagagaaggtgggaagaagttcagagctacatcaggaagagaacagcggaacatgaggcagcacagcaagatttacagagtaaatttgtggccaaagaaaatgaagtacagagtctgcatagtaagcttacagataccttggtatcaaaacaacagttggagcaaagactaatgcagttaatggaatcagagcagaaaagggtgaacaaagaagagtctctacaaatgcaggttcaggatattttggagcagaatgaggctttgaaagctcaaattcagcagttccattcccagatagcagcccagacctccgcttcagttctagcagaagaattacataaagtgattgcagaaaaggataagcagataaaacagactgaagattctttagcaagtgaacgtgatcgtttaacaagtaaagaagaggaacttaaggatatacagaatatgaatttcttattaaaagctgaagtgcagaaattacaggccctggcaaatgagcaggctgctgctgcacatgaattggagaagatgcaacaaagtgtttatgttaaagatgataaaataagattgctggaagagcaactacaacatgaaatttcaaacaaaatggaagaatttaagattctaaatgaccaaaacaaagcattaaaatcagaagttcagaagctacagactcttgtttctgaacagcctaataaggatgttgtggaacaaatggaaaaatgcattcaagaaaaagatgagaagttaaagactgtggaagaattacttgaaactggacttattcaggtggcaactaaagaagaggagctgaatgcaataagaacagaaaattcatctctgacaaaagaagttcaagacttaaaagctaagcaaaatgatcaggtttcttttgcctctctagttgaagaacttaagaaagtgatccatgagaaagatggaaagatcaagtctgtagaagagcttctggaggcagaacttctcaaagttgctaacaaggagaaaactgttcaggatttgaaacaggaaataaaggctctaaaagaagaaataggaaatgtccagcttgaaaaggctcaacagttatctatcacttccaaagttcaggagcttcagaacttattaaaaggaaaagaggaacagatgaataccatgaaggctgttttggaagagaaagagaaagacctagccaatacagggaagtggttacaggatcttcaagaagaaaatgaatctttaaaagcacatgttcaggaagtagcacaacataacttgaaagaggcctcttctgcatcacagtttgaagaacttgagattgtgttgcgccgaccggcacctgcctggacgaggttagaacgcggctaaagagaggggcagggactttcagcaaaccaggcggtacggtggcccatgaaacactgtgtggccatgggcgggtaaacaaattcacagggccgtttcctccagagtaaaatgtaccgtctagagagaacggccgcgtgaaacccgggacgacgcgaaaacaccggcgcgcgcggtacccacggacctcgttgattacatgatggagtcgatgttttttctctactcttggtgtcattatagtgcgcacagcacaggagcacaaacaccacaccacacatacgacgccgacaacgacccaacctcgcgacaccatagaagcagaggcgaccaatcagacggcaggacctcacaccagcgggcggcgcaaggcggaaaaacgacgccagtcgcacagcgcagggagagcgagacgaagacgacgaacactcgacacagacctcaccaagcaacacagcgcagggcccagcgaaagccgagcgcaccaagccgccgacgacacgccgacccccgagcgcgaaggaagcgcagagcacgacccgggcgatgcggcagaccgagacgaccgcacacgaaggcaccggagacggacaggaggagagcgagggcacacagacgagaggcacggaggcagagggaacacaaagagcactcggaccgagacgggcgggagagagagacacaacggagaacagaaggcgaaagagcacgagagacagagcagacgcgacggcagagagggcaacagaagacagagccgacagccacaggcaaaacgacagagagaccgaggcagcgcgcacggaggaggccacagagagagcgacgcagccgagcagcgagaagagaccgacggtgagaggagcgacggaagacgg

SEQ ID NO: 442210 - DNA, 2602 bp, Homo sapiens
cgccccgaagccgcccgtttcctgccgagcggcgcgacggcacctgagcgactgcggcggcggcggcggcggcggcggcgcctcggagcgggcggcccgggctgtagtgccggcgccgccgcgtcttcccggtctcctttcccggccgcacagggttttataggatcacattgacaaaagtaccatggagttttatgagtcagcatattttattgttcttattccttcaatagttattacagtaattttcctcttcttctggcttttcatgaaagaaacattatatgatgaagttcttgcaaaacagaaaagagaacaaaagcttattcctaccaaaacagataaaaagaaagcagaaaagaaaaagaataaaaagaaagaaatccagaatggaaacctccatgaatccgactctgagagtgtacctcgagactttaaattatcagatgctttggcagtagaagatgatcaagttgcacctgttccattgaatgtcgttgaaacttcaagtagtgttagggaaagaaaaaagaaggaaaagaaacaaaagcctgtgcttgaagagcaggtcatcaaagaaagtgacgcatcaaagattcctggcaaaaaagtagaacctgtcccagttactaaacagcccacccctccctctgaagcagctgcctcgaagaagaaaccagggcagaagaagtctaaaaatggaagcgatgaccaggataaaaaggtggaaactctcatggtaccatcaaaaaggcaagaagcattgcccctccaccaagagactaaacaagaaagtggatcagggaagaagaaagcttcatcaaagaaacaaaagacagaaaatgtcttcgtagatgaaccccttattcatgcaactacttatattcctttgatggataatgctgactcaagtcctgtggtagataagagagaggttattgatttgcttaaacctgaccaagtagaagggatccagaaatctgggactaaaaaactgaagaccgaaactgacaaagaaaatgctgaagtgaagtttaaagattttcttctgtccttgaagactatgatgttttctgaagatgaggctctttgtgttgtagacttgctaaaggagaagtctggtgtaatacaagatgctttaaagaagtcaagtaagggagaattgactacgcttatacatcagcttcaagaaaaggacaagttactcgctgctgtgaaggaagatgctgctgctacaaaggatcggtgtaagcagttaacccaggaaatgatgacagagaaagaaagaagcaatgtggttataacaaggatgaaagatcgaattggaacattagaaaaggaacataatgtatttcaaaacaaaatacatgtcagttatcaagagactcaacagatgcagatgaagtttcagcaagttcgtgagcagatggaggcagagatagctcacttgaagcaggaaaatggtatactgagagatgcagtcagcaacactacaaatcaactggaaagcaagcagtctgcagaactaaataaactacgccaggattatgctaggttggtgaatgagctgactgagaaaacaggaaagctacagcaagaggaagtccaaaagaagaatgctgagcaagcagctactcagttgaaggttcaactacaagaagctgagagaaggtgggaagaagttcagagctacatcaggaagagaacagcggaacatgaggcagcacagcaagatttacagagtaaatttgtggccaaagaaaatgaagtacagagtctgcatagtaagcttacagataccttggtatcaaaacaacagttggagcaaagactaatgcagttaatggaatcagagcagaaaagggtgaacaaagaagagtctctacaaatgcaggttcaggatattttggagcagaatgaggctttgaaagctcaaattcagcagttccattcccagatagcagcccagacctccgcttcagttctagcagaagaattacataaagtgattgcagaaaaggataagcagataaaacagactgaagattctttagcaagtgaacgtgatcgtttaacaagtaaagaagaggaacttaaggatatacagaatatgaatttcttattaaaagctgaagtgcagaaattacaggccctggcaaatgagcaggctgctgctgcacatgaattggagaagatgcaacaaagtgtttatgttaaagatgataaaataagattgctggaagagcaactacaacatgaaatttcaaacaaaatggaagaatttaagattctaaatgaccaaaacaaagcattaaaatcagaagttcagaagctacagactcttgtttctgaacagctataaggatgttgtggaacaatggtgcgttcagaaacgatgagaagtcgacggggacgattctgaacggactatcagggggatacagaaggcgaatcataaaccaatccctcgtcaaatcgattaagcaccagcgggttgccccattggacaacaggtccacaggataccgtcagccgcacaccaatagaggcaacgaccgcaaatcatgagatcgcgcaaacgaggaacaccgagggacattag

SEQ ID NO: 442211 - DNA, 2022 bp, Homo sapiens
cgccccgaagccgcccgtttcctgccgagcggcgcgacggcacctgagcgactgcggcggcggcggcggcggcggcggcgcctcggagcgggcggcccgggctgtagtgccggcgccgccgcgtcttcccggtctcctttcccggccgcacagggttttataggatcacattgacaaaagtaccatggagttttatgagtcagcatattttattgttcttattccttcaatagttattacagtaattttcctcttcttctggcttttcatgaaagaaacattatatgatgaagttcttgcaaaacagaaaagagaacaaaagcttattcctaccaaaacagataaaaagaaagcagaaaagaaaaagaataaaaagaaagaaatccagaatggaaacctccatgaatccgactctgagagtgtacctcgagactttaaattatcagatgctttggcagtagaagatgatcaagttgcacctgttccattgaatgtcgttgaaacttcaagtagtgttagggaaagaaaaaagaaggaaaagaaacaaaagcctgtgcttgaagagcaggtcatcaaagaaagtgacgcatcaaagattcctggcaaaaaagtagaacctgtcccagttactaaacagcccacccctccctctgaagcagctgcctcgaagaagaaaccagggcagaagaagtctaaaaatggaagcgatgaccaggataaaaaggtggaaactctcatggtaccatcaaaaaggcaagaagcattgcccctccaccaagagactaaacaagaaagtggatcagggaagaagaaagcttcatcaaagaaacaaaagacagaaaatgtcttcgtagatgaaccccttattcatgcaactacttatattcctttgatggataatgctgactcaagtcctgtggtagataagagagaggttattgatttgcttaaacctgaccaagtagaagggatccagaaatctgggactaaaaaactgaagaccgaaactgacaaagaaaatgctgaagtgaagtttaaagattttcttctgtccttgaagactatgatgttttctgaagatgaggctctttgtgttgtagacttgctaaaggagaagtctggtgtaatacaagatgctttaaagaagtcaagtaagggagaattgactacgcttatacatcagcttcaagaaaaggacaagttactcgctgctgtgaaggaagatgctgctgctacaaaggatcggtgtaagcagttaacccaggaaatgatgacagagaaagaaagaagcaatgtggttataacaaggatgaaagatcgaattggaacattagaaaaggaacataatgtatttcaaaacaaaatacatgtcagttatcaagagactcaacagatgcagatgaagtttcagcaagttcgtgagcagatggaggcagagatagctcacttgaagcaggaaaatggtatactgagagatgcagtcagcaacactacaaatcaactggaaagcaagcagtctgcagaactaaataaactacgccaggattatgctaggttggtgaatgagctgactgagaaaacaggaaagctacagcaagaggaagtccaaaagaagaatgctgagcaagcagctactcagttgaaggttcaactacaagaagctgagagaaggtgggaagaagttcagagctacatcaggaagagaacagcggaacatgaggcagcacagcaagatttacagagtaaatttgtggccaaagaaaatgaagtacagagtctgcatagtaagcttacagataccttggtatcaaaacaacagttggagcaaagactaatgcagttaatggaatcagagcagaaaagggtgaacaaagaagagtctctacaaatgcaggttcaggatattttggagcagaatgaggctttgaaagctcaaattcagcagttccattcccagatagcagcccagacctccgcttcagttctagcaaagaccccaaaaggggtaacgagctcgagttc

SEQ ID NO: 442212 - DNA, 2060 bp, Homo sapiens
  misc_feature (2058)..(2058): n is a, c, g, or t
cgccccgaagccgcccgtttcctgccgagcggcgcgacggcacctgagcgactgcggcggcggcggcggcggcggcggcgcctcggagcgggcggcccgggctgtagtgccggcgccgccgcgtcttcccggtctcctttcccggccgcacagggttttataggatcacattgacaaaagtaccatggagttttatgagtcagcatattttattgttcttattccttcaatagttattacagtaattttcctcttcttctggcttttcatgaaagaaacattatatgatgaagttcttgcaaaacagaaaagagaacaaaagcttattcctaccaaaacagataaaaagaaagcagaaaagaaaaagaataaaaagaaagaaatccagaatggaaacctccatgaatccgactctgagagtgtacctcgagactttaaattatcagatgctttggcagtagaagatgatcaagttgcacctgttccattgaatgtcgttgaaacttcaagtagtgttagggaaagaaaaaagaaggaaaagaaacaaaagcctgtgcttgaagagcaggtcatcaaagaaagtgacgcatcaaagattcctggcaaaaaagtagaacctgtcccagttactaaacagcccacccctccctctgaagcagctgcctcgaagaagaaaccagggcagaagaagtctaaaaatggaagcgatgaccaggataaaaaggtggaaactctcatggtaccatcaaaaaggcaagaagcattgcccctccaccaagagactaaacaagaaagtggatcagggaagaagaaagcttcatcaaagaaacaaaagacagaaaatgtcttcgtagatgaaccccttattcatgcaactacttatattcctttgatggataatgctgactcaagtcctgtggtagataagagagaggttattgatttgcttaaacctgaccaagtagaagggatccagaaatctgggactaaaaaactgaagaccgaaactgacaaagaaaatgctgaagtgaagtttaaagattttcttctgtccttgaagactatgatgttttctgaagatgaggctctttgtgttgtagacttgctaaaggagaagtctggtgtaatacaagatgctttaaagaagtcaagtaagggagaattgactacgcttatacatcagcttcaagaaaaggacaagttactcgctgctgtgaaggaagatgctgctgctacaaaggatcggtgtaagcagttaacccaggaaatgatgacagagaaagaaagaagcaatgtggttataacaaggatgaaagatcgaattggaacattagaaaaggaacataatgtatttcaaaacaaaatacatgtcagttatcaagagactcaacagatgcagatgaagtttcagcaagttcgtgagcagatggaggcagagatagctcacttgaagcaggaaaatggtatactgagagatgcagtcagcaacactacaaatcaactggaaagcaagcagtctgcagaactaaataaactacgccaggattatgctaggttggtgaatgagctgactgagaaaacaggaaagctacagcaagaggaagtccaaaagaagaatgctgagcaagcagctactcagttgaaggttcaactacaagaagctgagagaaggtgggaagaagttcagagctacatcaggaagagaacagcggaacatgaggcagcacagcaagatttacagagtaaatttgtggccaaagaaaatgaagtacagagtctgcatagtaagcttacagataccttggtatcaaaacaacagttggagcaaagactaatgcagttaatggaatcagagcagaaaagggtgaacaaagaagagtctctacaaatgcaggttcaggatattttggagcagaatgaggctttgaaagctcaaattcagcagttccattcccagatagcagcccagtacctcctgcttcatgttctagctagaaggaattacgataaagtgcattgcacaataaaccatgtgttagaaattagaacgtggtaccngc

SEQ ID NO: 442213 - DNA, 2117 bp, Homo sapiens
cgccccgaagccgcccgtttcctgccgagcggcgcgacggcacctgagcgactgcggcggcggcggcggcggcggcggcgcctcggagcgggcggcccgggctgtagtgccggcgccgccgcgtcttcccggtctcctttcccggccgcacagggttttataggatcacattgacaaaagtaccatggagttttatgagtcagcatattttattgttcttattccttcaatagttattacagtaattttcctcttcttctggcttttcatgaaagaaacattatatgatgaagttcttgcaaaacagaaaagagaacaaaagcttattcctaccaaaacagataaaaagaaagcagaaaagaaaaagaataaaaagaaagaaatccagaatggaaacctccatgaatccgactctgagagtgtacctcgagactttaaattatcagatgctttggcagtagaagatgatcaagttgcacctgttccattgaatgtcgttgaaacttcaagtagtgttagggaaagaaaaaagaaggaaaagaaacaaaagcctgtgcttgaagagcaggtcatcaaagaaagtgacgcatcaaagattcctggcaaaaaagtagaacctgtcccagttactaaacagcccacccctccctctgaagcagctgcctcgaagaagaaaccagggcagaagaagtctaaaaatggaagcgatgaccaggataaaaaggtggaaactctcatggtaccatcaaaaaggcaagaagcattgcccctccaccaagagactaaacaagaaagtggatcagggaagaagaaagcttcatcaaagaaacaaaagacagaaaatgtcttcgtagatgaaccccttattcatgcaactacttatattcctttgatggataatgctgactcaagtcctgtggtagataagagagaggttattgatttgcttaaacctgaccaagtagaagggatccagaaatctgggactaaaaaactgaagaccgaaactgacaaagaaaatgctgaagtgaagtttaaagattttcttctgtccttgaagactatgatgttttctgaagatgaggctctttgtgttgtagacttgctaaaggagaagtctggtgtaatacaagatgctttaaagaagtcaagtaagggagaattgactacgcttatacatcagcttcaagaaaaggacaagttactcgctgctgtgaaggaagatgctgctgctacaaaggatcggtgtaagcagttaacccaggaaatgatgacagagaaagaaagaagcaatgtggttataacaaggatgaaagatcgaattggaacattagaaaaggaacataatgtatttcaaaacaaaatacatgtcagttatcaagagactcaacagatgcagatgaagtttcagcaagttcgtgagcagatggaggcagagatagctcacttgaagcaggaaaatggtatactgagagatgcagtcagcaacactacaaatcaactggaaagcaagcagtctgcagaactaaataaactacgccaggattatgctaggttggtgaatgagctgactgagaaaacaggaaagctacagcaagaggaagtccaaaagaagaatgctgagcaagcagctactcagttgaaggttcaactacaagaagctgagagaaggtgggaagaagttcagagctacatcaggaagagaacagcggaacatgaggcagcacagcaagatttacagagtaaatttgtggccaaagaaaatgaagtacagagtctgcatagtaagcttacagataccttggtatcaaaacaacagttggagcaaagactaatgcagttaatggaatcagagcagaaaagggtgaacaaagaagagtctctacaaatgcaggttcaggatattttggaacaaaatagcacataagtagacctacataaaagtaatcaactgatttttatgaaggagcaaaggtaatacaatggagaaaatataatatttccaacaaatagtattaaaacaactggacacctatgtgcaaaaaaaaatcataacacggatctatgccattcacaaaaaataactccaaatggatcataaacctaaatgtaagatg

SEQ ID NO: 442214 - DNA, 1109 bp, Homo sapiens
cgccccgaagccgcccgtttcctgccgagcggcgcgacggcacctgagcgactgcggcggcggcggcggcggcggcggcgcctcggagcgggcggcccgggctgtagtgccggcgccgccgcgtcttcccggtctcctttcccggccgcacagggttttataggatcacattgacaaaagtaccatggagttttatgagtcagcatattttattgttcttattccttcaatagttattacagtaattttcctcttcttctggcttttcatgaaagaaacattatatgatgaagttcttgcaaaacagaaaagagaacaaaagcttattcctaccaaaacagataaaaagaaagcagaaaagaaaaagaataaaaagaaagaaatccagaatggaaacctccatgaatccgactctgagagtgtacctcgagactttaaattatcagatgctttggcagtagaagatgatcaagttgcacctgttccattgaatgtcgttgaaacttcaagtagtgttagggaaagaaaaaagaaggaaaagaaacaaaagcctgtgcttgaagagcaggtcatcaaagaaagtgacgcatcaaagattcctggcaaaaaagtagaacctgtcccagctgtccacccatcccctgccccaaaaccaggtttcaataaatttacgttcatttccaaaaaaaaaaaaaaaaaaaaaaaaaaaaaaaaaaaaaaaaaaagaaaaaaaaaaaaaaaaaaaaaaaaaaaaaaaaacaaaaaaaaaaaaaaaaaaaaaaaagaaagaggggggggggggggaggaaagaaccccgggggggggggaagagcaacggaggacaccgcagcggctagcggaaggccaacgcgacggaccgacaccacagcagagggggacacaccacacagacaggccaaacaagggcgagggcggtaggctaaaaaagagcgcgaccgaggagggacaaacaaaagagatgcagaaggccaacaaggagagaaaacaacaatcaacaggcggagggggacaaaaaacgcaaaaaaccacacccaaagaagacgagccgaagcaggagaaaaaaacacaagcgagaagacaggggaca

SEQ ID NO: 442215 - DNA, 284 bp, Homo sapiens
tgcttagcctttctatacatctggtgcagcatattggctaatccactgtacataataactgttagcagtcccattcattcttcagtcctagaggtatcagcataatcaaagaatgatgcaaattaagttaattgtggtgttcctttatttttacattgaaggcacagttaaatgaaacactcacaaaacttagaactgaacaaaatgaaagacagaaggtagctggtgatttgcataaggtaggcactgttcgtcctagagatgtagtatcatgagcctgtgtt

SEQ ID NO: 442216 - DNA, 455 bp, Homo sapiens
agagacggggtttcaccgtgttagccaggatggtcttgatctcctgaccttgtgatccgcccgccttggcctcccaaagtgttgggattacaggcgtgagccactgcgcctagccttgtatgcctttatacttgataagttttagtttagttcaatcagctggtctgtgagtactacccaaaatatacttttttcagtgtctaagatttttgctttttatggtcatgtaacattttcatttagagttctgattaatttattatcagattaaaaggaaaagaggaacagatgaataccatgaaggctgttttggaagagaaagagaaagacctagccaatacagggaagtggttacaggtgagaaattaaaaacaataaaaaatagcctttttatacttgactatcaatttaatttacacctattctttttaaggatcttcaagaagaaaatgaat

SEQ ID NO: 442217 - DNA, 371 bp, Homo sapiens
caggcctgtcaacttgttttattctaaatgtcttgtgatatgtaattcgtgactactggctgttggtgatcaaacttgctttcagaatgatagttactctttattgaacacttaccatgggccagatactttcataacaatttatatacattaacttctcttaaaatttaaagctgttatgattattgtatagctataaagctttctcttaaatacttttatgttgacactatttttctttcttagacctccgcttcagttctagcagaagaattacataaagtgtaagcctaccttttcacactcttataattgtgtagtcaccactaactgatacttgttagatgcgacacttatgattaactttatac

SEQ ID NO: 442218 - DNA, 4568 bp, Homo sapiens
cgccccgaagccgcccgtttcctgccgagcggcgcgacggcacctgagcgactgcggcggcggcggcggcggcggcggcgcctcggagcgggcggcccgggctgtagtgccggcgccgccgcgtcttcccggtctcctttcccggccgcacagggttttataggatcacattgacaaaagtaccatggagttttatgagtcagcatattttattgttcttattccttcaatagttattacagtaattttcctcttcttctggcttttcatgaaagaaacattatatgatgaagttcttgcaaaacagaaaagagaacaaaagcttattcctaccaaaacagataaaaagaaagcagaaaagaaaaagaataaaaagaaagaaatccagaatggaaacctccatgaatccgactctgagagtgtacctcgagactttaaattatcagatgctttggcagtagaagatgatcaagttgcacctgttccattgaatgtcgttgaaacttcaagtagtgttagggaaagaaaaaagaaggaaaagaaacaaaagcctgtgcttgaagagcaggtcatcaaagaaagtgacgcatcaaagattcctggcaaaaaagtagaacctgtcccagttactaaacagcccacccctccctctgaagcagctgcctcgaagaagaaaccagggcagaagaagtctaaaaatggaagcgatgaccaggataaaaaggtggaaactctcatggtaccatcaaaaaggcaagaagcattgcccctccaccaagagactaaacaagaaagtggatcagggaagaagaaagcttcatcaaagaaacaaaagacagaaaatgtcttcgtagatgaaccccttattcatgcaactacttatattcctttgatggataatgctgactcaagtcctgtggtagataagagagaggttattgatttgcttaaacctgaccaagtagaagggatccagaaatctgggactaaaaaactgaagaccgaaactgacaaagaaaatgctgaagtgaagtttaaagattttcttctgtccttgaagactatgatgttttctgaagatgaggctctttgtgttgtagacttgctaaaggagaagtctggtgtaatacaagatgctttaaagaagtcaagtaagggagaattgactacgcttatacatcagcttcaagaaaaggacaagttactcgctgctgtgaaggaagatgctgctgctacaaaggatcggtgtaagcagttaacccaggaaatgatgacagagaaagaaagaagcaatgtggttataacaaggatgaaagatcgaattggaacattagaaaaggaacataatgtatttcaaaacaaaatacatgtcagttatcaagagactcaacagatgcagatgaagtttcagcaagttcgtgagcagatggaggcagagatagctcacttgaagcaggaaaatggtatactgagagatgcagtcagcaacactacaaatcaactggaaagcaagcagtctgcagaactaaataaactacgccaggattatgctaggttggtgaatgagctgactgagaaaacaggaaagctacagcaagaggaagtccaaaagaagaatgctgagcaagcagctactcagttgaaggttcaactacaagaagctgagagaaggtgggaagaagttcagagctacatcaggaagagaacagcggaacatgaggcagcacagcaagatttacagagtaaatttgtggccaaagaaaatgaagtacagagtctgcatagtaagcttacagataccttggtatcaaaacaacagttggagcaaagactaatgcagttaatggaatcagagcagaaaagggtgaacaaagaagagtctctacaaatgcaggttcaggatattttggagcagaatgaggctttgaaagctcaaattcagcagttccattcccagatagcagcccagacctccgcttcagttctagcagaagaattacataaagtgattgcagaaaaggataagcagataaaacagactgaagattctttagcaagtgaacgtgatcgtttaacaagtaaagaagaggaacttaaggatatacagaatatgaatttcttattaaaagctgaagtgcagaaattacaggccctggcaaatgagcaggctgctgctgcacatgaattggagaagatgcaacaaagtgtttatgttaaagatgataaaataagattgctggaagagcaactacaacatgaaatttcaaacaaaatggaagaatttaagattctaaatgaccaaaacaaagcattaaaatcagaagttcagaagctacagactcttgtttctgaacagcctaataaggatgttgtggaacaaatggaaaaatgcattcaagaaaaagatgagaagttaaagactgtggaagaattacttgaaactggacttattcaggtggcaactaaagaagaggagctgaatgcaataagaacagaaaattcatctctgacaaaagaagttcaagacttaaaagctaagcaaaatgatcaggtttcttttgcctctctagttgaagaacttaagaaagtgatccatgagaaagatggaaagatcaagtctgtagaagagcttctggaggcagaacttctcaaagttgctaacaaggagaaaactgttcaggatttgaaacaggaaataaaggctctaaaagaagaaataggaaatgtccagcttgaaaaggctcaacagttatctatcacttccaaagttcaggagcttcagaacttattaaaaggaaaagaggaacagatgaataccatgaaggctgttttggaagagaaagagaaagacctagccaatacagggaagtggttacaggatcttcaagaagaaaatgaatctttaaaagcacatgttcaggaagtagcacaacataacttgaaagaggcctcttctgcatcacagtttgaagaacttgagattgtgttgaaagaaaaggaaaatgaattgaagaggttagaagccatgctaaaagagagggagagtgatctttctagcaaaacacagctgttacaggatgtacaagatgaaaacaaattgtttaagtcccaaattgagcagcttaaacaacaaaactaccaacaggcatcttcttttccccctcatgaagaattattaaaagtaatttcagaaagagagaaagaaataagtggtctctggaatgagttagattctttgaaggatgcagttgaacaccagaggaagaaaaacaatgaaaggcagcaacaggtggaagctgttgagttggaggctaaagaagttctcaaaaaattatttccaaaggtgtctgtcccttctaatttgagttatggtgaatggttgcatggatttgaaaaaaaggcaaaagaatgtatggctggaacttcagggtcagaggaggttaaggttctagagcacaagttgaaagaagctgatgaaatgcacacattgttacagctagagtgtgaaaaatacaaatccgtccttgcagaaacagaaggaattttacagaagctacagagaagtgttgagcaagaagaaaataaatggaaagttaaggtcgatgaatcacacaagactattaaacagatgcagtcatcatttacatcttcagaacaagagctagagcgattaagaagcgaaaataaggatattgaaaatctgagaagagaacgagaacatttggaaatggaactagaaaaggcagagatggaacgatctacctatgttacagaagtcagagagttgaaggcacagttaaatgaaacactcacaaaacttagaactgaacaaaatgaaagacagaaggtagctggtgatttgcataaggctcaacagtcactggagcttatccagtcaaaaatagtaaaagctgctggagacactactgttattgaaaatagtgatgtttccccagaaacggagtcttctgagaaggagacaatgtctgtaagtctaaatcagactgtaacacagttacagcagttgcttcaggcggtaaaccaacagctcacaaaggagaaagagcactaccaggtgttagagtgaagtaattgggaaactgttcatttgaggataaaaaaggcattgtattatattttgccaaattaaagccttatttatgttttcaccctttctactttgtcagaaacactgaacagagttttgtcttttctaatccttgttagactactgatttaaagaaggaaaaaaaaaagccaactctgtagacaccttcagagtttagttttataataaaaactgtttgaataattagacctttacattcctgaagataaacatgtaatcttttatcttattttgctcaataaaattgttcagaagatcaaagtggtaaagacaatgtaaaatttaacattttaatactgatgttgtacactgttttacttaacattttgggaagtaactgcctctgacttcaactcaagaaaacacttttttgttgctaatgtaatcggtttttgtaatggcgtcagcaaataaaaggatgcttattattcaaacttga

SEQ ID NO: 442219 - DNA, 440 bp, Homo sapiens
tactactactaaaattcgcggccgcgtcgacaaggctcaacagtcactggagcttatccagtcaaaaatagtaaaagctgctggagacactactgttattgaaaatagtgatgtttccccagaaacggagtcttctgagaaggagacaatgtctgtaagtctaaatcagactgtaacacagttacagcagttgcttcaggcggtaaaccaacagctcacaaaggagaaagagcactaccaggtgttagagtgaagtaattgggaaactgttcatttgaggataaaaaaggcattgtattatattttgccaaattaaagccttatttatgttttcaccctttctactttgtcagaaacactgaacagagttttgtcttttctaatccttgttagactttaaatcagtagtctaacaaggatgtcgagcgggggcaaattta

SEQ ID NO: 442220 - DNA, 4655 bp, Homo sapiens
cgccccgaagccgcccgtttcctgccgagcggcgcgacggcacctgagcgactgcggcggcggcggcggcggcggcggcgcctcggagcgggcggcccgggctgtagtgccggcgccgccgcgtcttcccggtctcctttcccggccgcacagggttttataggatcacattgacaaaagtaccatggagttttatgagtcagcatattttattgttcttattccttcaatagttattacagtaattttcctcttcttctggcttttcatgaaagaaacattatatgatgaagttcttgcaaaacagaaaagagaacaaaagcttattcctaccaaaacagataaaaagaaagcagaaaagaaaaagaataaaaagaaagaaatccagaatggaaacctccatgaatccgactctgagagtgtacctcgagactttaaattatcagatgctttggcagtagaagatgatcaagttgcacctgttccattgaatgtcgttgaaacttcaagtagtgttagggaaagaaaaaagaaggaaaagaaacaaaagcctgtgcttgaagagcaggtcatcaaagaaagtgacgcatcaaagattcctggcaaaaaagtagaacctgtcccagttactaaacagcccacccctccctctgaagcagctgcctcgaagaagaaaccagggcagaagaagtctaaaaatggaagcgatgaccaggataaaaaggtggaaactctcatggtaccatcaaaaaggcaagaagcattgcccctccaccaagagactaaacaagaaagtggatcagggaagaagaaagcttcatcaaagaaacaaaagacagaaaatgtcttcgtagatgaaccccttattcatgcaactacttatattcctttgatggataatgctgactcaagtcctgtggtagataagagagaggttattgatttgcttaaacctgaccaagtagaagggatccagaaatctgggactaaaaaactgaagaccgaaactgacaaagaaaatgctgaagtgaagtttaaagattttcttctgtccttgaagactatgatgttttctgaagatgaggctctttgtgttgtagacttgctaaaggagaagtctggtgtaatacaagatgctttaaagaagtcaagtaagggagaattgactacgcttatacatcagcttcaagaaaaggacaagttactcgctgctgtgaaggaagatgctgctgctacaaaggatcggtgtaagcagttaacccaggaaatgatgacagagaaagaaagaagcaatgtggttataacaaggatgaaagatcgaattggaacattagaaaaggaacataatgtatttcaaaacaaaatacatgtcagttatcaagagactcaacagatgcagatgaagtttcagcaagttcgtgagcagatggaggcagagatagctcacttgaagcaggaaaatggtatactgagagatgcagtcagcaacactacaaatcaactggaaagcaagcagtctgcagaactaaataaactacgccaggattatgctaggttggtgaatgagctgactgagaaaacaggaaagctacagcaagaggaagtccaaaagaagaatgctgagcaagcagctactcagttgaaggttcaactacaagaagctgagagaaggtgggaagaagttcagagctacatcaggaagagaacagcggaacatgaggcagcacagcaagatttacagagtaaatttgtggccaaagaaaatgaagtacagagtctgcatagtaagcttacagataccttggtatcaaaacaacagttggagcaaagactaatgcagttaatggaatcagagcagaaaagggtgaacaaagaagagtctctacaaatgcaggttcaggatattttggagcagaatgaggctttgaaagctcaaattcagcagttccattcccagatagcagcccagacctccgcttcagttctagcagaagaattacataaagtgattgcagaaaaggataagcagataaaacagactgaagattctttagcaagtgaacgtgatcgtttaacaagtaaagaagaggaacttaaggatatacagaatatgaatttcttattaaaagctgaagtgcagaaattacaggccctggcaaatgagcaggctgctgctgcacatgaattggagaagatgcaacaaagtgtttatgttaaagatgataaaataagattgctggaagagcaactacaacatgaaatttcaaacaaaatggaagaatttaagattctaaatgaccaaaacaaagcattaaaatcagaagttcagaagctacagactcttgtttctgaacagcctaataaggatgttgtggaacaaatggaaaaatgcattcaagaaaaagatgagaagttaaagactgtggaagaattacttgaaactggacttattcaggtggcaactaaagaagaggagctgaatgcaataagaacagaaaattcatctctgacaaaagaagttcaagacttaaaagctaagcaaaatgatcaggtttcttttgcctctctagttgaagaacttaagaaagtgatccatgagaaagatggaaagatcaagtctgtagaagagcttctggaggcagaacttctcaaagttgctaacaaggagaaaactgttcaggatttgaaacaggaaataaaggctctaaaagaagaaataggaaatgtccagcttgaaaaggctcaacagttatctatcacttccaaagttcaggagcttcagaacttattaaaaggaaaagaggaacagatgaataccatgaaggctgttttggaagagaaagagaaagacctagccaatacagggaagtggttacaggatcttcaagaagaaaatgaatctttaaaagcacatgttcaggaagtagcacaacataacttgaaagaggcctcttctgcatcacagtttgaagaacttgagattgtgttgaaagaaaaggaaaatgaattgaagaggttagaagccatgctaaaagagagggagagtgatctttctagcaaaacacagctgttacaggatgtacaagatgaaaacaaattgtttaagtcccaaattgagcagcttaaacaacaaaactaccaacaggcatcttcttttccccctcatgaagaattattaaaagtaatttcagaaagagagaaagaaataagtggtctctggaatgagttagattctttgaaggatgcagttgaacaccagaggaagaaaaacaatgaccttcgggagaaaaactgggaagcaatggaagcattggcatcaactgaaaaaatgctgcaggacaaagtgaacaagacttccaaggaaaggcagcaacaggtggaagctgttgagttggaggctaaagaagttctcaaaaaattatttccaaaggtgtctgtcccttctaatttgagttatggtgaatggttgcatggatttgaaaaaaaggcaaaagaatgtatggctggaacttcagggtcagaggaggttaaggttctagagcacaagttgaaagaagctgatgaaatgcacacattgttacagctagagtgtgaaaaatacaaatccgtccttgcagaaacagaaggaattttacagaagctacagagaagtgttgagcaagaagaaaataaatggaaagttaaggtcgatgaatcacacaagactattaaacagatgcagtcatcatttacatcttcagaacaagagctagagcgattaagaagcgaaaataaggatattgaaaatctgagaagagaacgagaacatttggaaatggaactagaaaaggcagagatggaacgatctacctatgttacagaagtcagagagttgaaggcacagttaaatgaaacactcacaaaacttagaactgaacaaaatgaaagacagaaggtagctggtgatttgcataaggctcaacagtcactggagcttatccagtcaaaaatagtaaaagctgctggagacactactgttattgaaaatagtgatgtttccccagaaacggagtcttctgagaaggagacaatgtctgtaagtctaaatcagactgtaacacagttacagcagttgcttcaggcggtaaaccaacagctcacaaaggagaaagagcactaccaggtgttagagtgaagtaattgggaaactgttcatttgaggataaaaaaggcattgtattatattttgccaaattaaagccttatttatgttttcaccctttctactttgtcagaaacactgaacagagttttgtcttttctaatccttgttagactactgatttaaagaaggaaaaaaaaaagccaactctgtagacaccttcagagtttagttttataataaaaactgtttgaataattagacctttacattcctgaagataaacatgtaatcttttatcttattttgctcaataaaattgttcagaagatcaaagtggtaaagacaatgtaaaatttaacattttaatactgatgttgtacactgttttacttaacattttgggaagtaactgcctctgacttcaactcaagaaaacacttttttgttgctaatgtaatcggtttttgtaatggcgtcagcaaataaaaggatgcttattattcaaacttga

SEQ ID NO: 442221 - DNA, 4643 bp, Homo sapiens
ctttggaaaaatccatggaccactctcgacaccggcgaagttatcccttcctgtccccgaggggtgtgtcctagcgattcggcctgaccccttcagtttccaaaagtagattttcgttccgtcacccaggctggagtgcagtggtgtgaccttggcttgctgcaaccctttgcctcctgggttcaagtgattctcattgcctcagcctcctaagtagctgggattacaggttttataggatcacattgacaaaagtaccatggagttttatgagtcagcatattttattgttcttattccttcaatagttattacagtaattttcctcttcttctggcttttcatgaaagaaacattatatgatgaagttcttgcaaaacagaaaagagaacaaaagcttattcctaccaaaacagataaaaagaaagcagaaaagaaaaagaataaaaagaaagaaatccagaatggaaacctccatgaatccgactctgagagtgtacctcgagactttaaattatcagatgctttggcagtagaagatgatcaagttgcacctgttccattgaatgtcgttgaaacttcaagtagtgttagggaaagaaaaaagaaggaaaagaaacaaaagcctgtgcttgaagagcaggtcatcaaagaaagtgacgcatcaaagattcctggcaaaaaagtagaacctgtcccagttactaaacagcccacccctccctctgaagcagctgcctcgaagaagaaaccagggcagaagaagtctaaaaatggaagcgatgaccaggataaaaaggtggaaactctcatggtaccatcaaaaaggcaagaagcattgcccctccaccaagagactaaacaagaaagtggatcagggaagaagaaagcttcatcaaagaaacaaaagacagaaaatgtcttcgtagatgaaccccttattcatgcaactacttatattcctttgatggataatgctgactcaagtcctgtggtagataagagagaggttattgatttgcttaaacctgaccaagtagaagggatccagaaatctgggactaaaaaactgaagaccgaaactgacaaagaaaatgctgaagtgaagtttaaagattttcttctgtccttgaagactatgatgttttctgaagatgaggctctttgtgttgtagacttgctaaaggagaagtctggtgtaatacaagatgctttaaagaagtcaagtaagggagaattgactacgcttatacatcagcttcaagaaaaggacaagttactcgctgctgtgaaggaagatgctgctgctacaaaggatcggtgtaagcagttaacccaggaaatgatgacagagaaagaaagaagcaatgtggttataacaaggatgaaagatcgaattggaacattagaaaaggaacataatgtatttcaaaacaaaatacatgtcagttatcaagagactcaacagatgcagatgaagtttcagcaagttcgtgagcagatggaggcagagatagctcacttgaagcaggaaaatggtatactgagagatgcagtcagcaacactacaaatcaactggaaagcaagcagtctgcagaactaaataaactacgccaggattatgctaggttggtgaatgagctgactgagaaaacaggaaagctacagcaagaggaagtccaaaagaagaatgctgagcaagcagctactcagttgaaggttcaactacaagaagctgagagaaggtgggaagaagttcagagctacatcaggaagagaacagcggaacatgaggcagcacagcaagatttacagagtaaatttgtggccaaagaaaatgaagtacagagtctgcatagtaagcttacagataccttggtatcaaaacaacagttggagcaaagactaatgcagttaatggaatcagagcagaaaagggtgaacaaagaagagtctctacaaatgcaggttcaggatattttggagcagaatgaggctttgaaagctcaaattcagcagttccattcccagatagcagcccagacctccgcttcagttctagcagaagaattacataaagtgattgcagaaaaggataagcagataaaacagactgaagattctttagcaagtgaacgtgatcgtttaacaagtaaagaagaggaacttaaggatatacagaatatgaatttcttattaaaagctgaagtgcagaaattacaggccctggcaaatgagcaggctgctgctgcacatgaattggagaagatgcaacaaagtgtttatgttaaagatgataaaataagattgctggaagagcaactacaacatgaaatttcaaacaaaatggaagaatttaagattctaaatgaccaaaacaaagcattaaaatcagaagttcagaagctacagactcttgtttctgaacagcctaataaggatgttgtggaacaaatggaaaaatgcattcaagaaaaagatgagaagttaaagactgtggaagaattacttgaaactggacttattcaggtggcaactaaagaagaggagctgaatgcaataagaacagaaaattcatctctgacaaaagaagttcaagacttaaaagctaagcaaaatgatcaggtttcttttgcctctctagttgaagaacttaagaaagtgatccatgagaaagatggaaagatcaagtctgtagaagagcttctggaggcagaacttctcaaagttgctaacaaggagaaaactgttcaggatttgaaacaggaaataaaggctctaaaagaagaaataggaaatgtccagcttgaaaaggctcaacagttatctatcacttccaaagttcaggagcttcagaacttattaaaaggaaaagaggaacagatgaataccatgaaggctgttttggaagagaaagagaaagacctagccaatacagggaagtggttacaggatcttcaagaagaaaatgaatctttaaaagcacatgttcaggaagtagcacaacataacttgaaagaggcctcttctgcatcacagtttgaagaacttgagattgtgttgaaagaaaaggaaaatgaattgaagaggttagaagccatgctaaaagagagggagagtgatctttctagcaaaacacagctgttacaggatgtacaagatgaaaacaaattgtttaagtcccaaattgagcagcttaaacaacaaaactaccaacaggcatcttcttttccccctcatgaagaattattaaaagtaatttcagaaagagagaaagaaataagtggtctctggaatgagttagattctttgaaggatgcagttgaacaccagaggaagaaaaacaatgaaaggcagcaacaggtggaagctgttgagttggaggctaaagaagttctcaaaaaattatttccaaaggtgtctgtcccttctaatttgagttatggtgaatggttgcatggatttgaaaaaaaggcaaaagaatgtatggctggaacttcagggtcagaggaggttaaggttctagagcacaagttgaaagaagctgatgaaatgcacacattgttacagctagagtgtgaaaaatacaaatccgtccttgcagaaacagaaggaattttacagaagctacagagaagtgttgagcaagaagaaaataaatggaaagttaaggtcgatgaatcacacaagactattaaacagatgcagtcatcatttacatcttcagaacaagagctagagcgattaagaagcgaaaataaggatattgaaaatctgagaagagaacgagaacatttggaaatggaactagaaaaggcagagatggaacgatctacctatgttacagaagtcagagagttgaaggcacagttaaatgaaacactcacaaaacttagaactgaacaaaatgaaagacagaaggtagctggtgatttgcataaggctcaacagtcactggagcttatccagtcaaaaatagtaaaagctgctggagacactactgttattgaaaatagtgatgtttccccagaaacggagtcttctgagaaggagacaatgtctgtaagtctaaatcagactgtaacacagttacagcagttgcttcaggcggtaaaccaacagctcacaaaggagaaagagcactaccaggtgttagagtgaagtaattgggaaactgttcatttgaggataaaaaaggcattgtattatattttgccaaattaaagccttatttatgttttcaccctttctactttgtcagaaacactgaacagagttttgtcttttctaatccttgttagactactgatttaaagaaggaaaaaaaaaagccaactctgtagacaccttcagagtttagttttataataaaaactgtttgaataattagacctttacattcctgaagataaacatgtaatcttttatcttattttgctcaataaaattgttcagaagatcaaagtggtaaagacaatgtaaaatttaacattttaatactgatgttgtacactgttttacttaacattttgggaagtaactgcctctgacttcaactcaagaaaacacttttttgttgctaatgtaatcggtttttgtaatggcgtcagcaaataaaaggatgcttattattcaaacttga

SEQ ID NO: 442222 - DNA, 4643 bp, Homo sapiens
cgttcattctgactggagaaataaactgtccagtacgtaacagccacctcctctgagcagctgctcgagaaagaaccagtgcacaagaagtctaaaatggaagcgatgatcaggataaaatggtgggaactctcatggtaccgatcacagaggcatgaagattgcccctccagcaagagactaaacaagaaagtggatcaggcaagaagaaagcttcatcaaagaaacaaaagacagaaaatgtcttcgtagatgaaccccttattcatgcaactacttatattttattgttcttattccttcaatagttattacagtaattttcctcttcttctggcttttcatgaaagaaacattatatgatgaagttcttgcaaaacagaaaagagaacaaaagcttattcctaccaaaacagataaaaagaaagcagaaaagaaaaagaataaaaagaaagaaatccagaatggaaacctccatgaatccgactctgagagtgtacctcgagactttaaattatcagatgctttggcagtagaagatgatcaagttgcacctgttccattgaatgtcgttgaaacttcaagtagtgttagggaaagaaaaaagaaggaaaagaaacaaaagcctgtgcttgaagagcaggtcatcaaagaaagtgacgcatcaaagattcctggcaaaaaagtagaacctgtcccagttactaaacagcccacccctccctctgaagcagctgcctcgaagaagaaaccagggcagaagaagtctaaaaatggaagcgatgaccaggataaaaaggtggaaactctcatggtaccatcaaaaaggcaagaagcattgcccctccaccaagagactaaacaagaaagtggatcagggaagaagaaagcttcatcaaagaaacaaaagacagaaaatgtcttcgtagatgaaccccttattcatgcaactacttatattcctttgatggataatgctgactcaagtcctgtggtagataagagagaggttattgatttgcttaaacctgaccaagtagaagggatccagaaatctgggactaaaaaactgaagaccgaaactgacaaagaaaatgctgaagtgaagtttaaagattttcttctgtccttgaagactatgatgttttctgaagatgaggctctttgtgttgtagacttgctaaaggagaagtctggtgtaatacaagatgctttaaagaagtcaagtaagggagaattgactacgcttatacatcagcttcaagaaaaggacaagttactcgctgctgtgaaggaagatgctgctgctacaaaggatcggtgtaagcagttaacccaggaaatgatgacagagaaagaaagaagcaatgtggttataacaaggatgaaagatcgaattggaacattagaaaaggaacataatgtatttcaaaacaaaatacatgtcagttatcaagagactcaacagatgcagatgaagtttcagcaagttcgtgagcagatggaggcagagatagctcacttgaagcaggaaaatggtatactgagagatgcagtcagcaacactacaaatcaactggaaagcaagcagtctgcagaactaaataaactacgccaggattatgctaggttggtgaatgagctgactgagaaaacaggaaagctacagcaagaggaagtccaaaagaagaatgctgagcaagcagctactcagttgaaggttcaactacaagaagctgagagaaggtgggaagaagttcagagctacatcaggaagagaacagcggaacatgaggcagcacagcaagatttacagagtaaatttgtggccaaagaaaatgaagtacagagtctgcatagtaagcttacagataccttggtatcaaaacaacagttggagcaaagactaatgcagttaatggaatcagagcagaaaagggtgaacaaagaagagtctctacaaatgcaggttcaggatattttggagcagaatgaggctttgaaagctcaaattcagcagttccattcccagatagcagcccagacctccgcttcagttctagcagaagaattacataaagtgattgcagaaaaggataagcagataaaacagactgaagattctttagcaagtgaacgtgatcgtttaacaagtaaagaagaggaacttaaggatatacagaatatgaatttcttattaaaagctgaagtgcagaaattacaggccctggcaaatgagcaggctgctgctgcacatgaattggagaagatgcaacaaagtgtttatgttaaagatgataaaataagattgctggaagagcaactacaacatgaaatttcaaacaaaatggaagaatttaagattctaaatgaccaaaacaaagcattaaaatcagaagttcagaagctacagactcttgtttctgaacagcctaataaggatgttgtggaacaaatggaaaaatgcattcaagaaaaagatgagaagttaaagactgtggaagaattacttgaaactggacttattcaggtggcaactaaagaagaggagctgaatgcaataagaacagaaaattcatctctgacaaaagaagttcaagacttaaaagctaagcaaaatgatcaggtttcttttgcctctctagttgaagaacttaagaaagtgatccatgagaaagatggaaagatcaagtctgtagaagagcttctggaggcagaacttctcaaagttgctaacaaggagaaaactgttcaggatttgaaacaggaaataaaggctctaaaagaagaaataggaaatgtccagcttgaaaaggctcaacagttatctatcacttccaaagttcaggagcttcagaacttattaaaaggaaaagaggaacagatgaataccatgaaggctgttttggaagagaaagagaaagacctagccaatacagggaagtggttacaggatcttcaagaagaaaatgaatctttaaaagcacatgttcaggaagtagcacaacataacttgaaagaggcctcttctgcatcacagtttgaagaacttgagattgtgttgaaagaaaaggaaaatgaattgaagaggttagaagccatgctaaaagagagggagagtgatctttctagcaaaacacagctgttacaggatgtacaagatgaaaacaaattgtttaagtcccaaattgagcagcttaaacaacaaaactaccaacaggcatcttcttttccccctcatgaagaattattaaaagtaatttcagaaagagagaaagaaataagtggtctctggaatgagttagattctttgaaggatgcagttgaacaccagaggaagaaaaacaatgaaaggcagcaacaggtggaagctgttgagttggaggctaaagaagttctcaaaaaattatttccaaaggtgtctgtcccttctaatttgagttatggtgaatggttgcatggatttgaaaaaaaggcaaaagaatgtatggctggaacttcagggtcagaggaggttaaggttctagagcacaagttgaaagaagctgatgaaatgcacacattgttacagctagagtgtgaaaaatacaaatccgtccttgcagaaacagaaggaattttacagaagctacagagaagtgttgagcaagaagaaaataaatggaaagttaaggtcgatgaatcacacaagactattaaacagatgcagtcatcatttacatcttcagaacaagagctagagcgattaagaagcgaaaataaggatattgaaaatctgagaagagaacgagaacatttggaaatggaactagaaaaggcagagatggaacgatctacctatgttacagaagtcagagagttgaaggcacagttaaatgaaacactcacaaaacttagaactgaacaaaatgaaagacagaaggtagctggtgatttgcataaggctcaacagtcactggagcttatccagtcaaaaatagtaaaagctgctggagacactactgttattgaaaatagtgatgtttccccagaaacggagtcttctgagaaggagacaatgtctgtaagtctaaatcagactgtaacacagttacagcagttgcttcaggcggtaaaccaacagctcacaaaggagaaagagcactaccaggtgttagagtgaagtaattgggaaactgttcatttgaggataaaaaaggcattgtattatattttgccaaattaaagccttatttatgttttcaccctttctactttgtcagaaacactgaacagagttttgtcttttctaatccttgttagactactgatttaaagaaggaaaaaaaaaagccaactctgtagacaccttcagagtttagttttataataaaaactgtttgaataattagacctttacattcctgaagataaacatgtaatcttttatcttattttgctcaataaaattgttcagaagatcaaagtggtaaagacaatgtaaaatttaacattttaatactgatgttgtacactgttttacttaacattttgggaagtaactgcctctgacttcaactcaagaaaacacttttttgttgctaatgtaatcggtttttgtaatggcgtcagcaaataaaaggatgcttattattcaaacttga

SEQ ID NO: 442223 - DNA, 4652 bp, Homo sapiens
cgccccgaagccgcccgtttcctgccgagcggcgcgacggcacctgagcgactgcggcggcggcggcggcggcggcggcgcctcggagcgggcggcccgggctgtagtgccggcgccgccgcgtcttcccggtctcctttcccggccgcacagggttttataggatcacattgacaaaagtaccatggagttttatgagtcagcatattttattgttcttattccttcaatagttattacagtaattttcctcttcttctggcttttcatgaaagaaacattatatgatgaagttcttgcaaaacagaaaagagaacaaaagcttattcctaccaaaacagataaaaagaaagcagaaaagaaaaagaataaaaagaaagaaatccagaatggaaacctccatgaatccgactctgagagtgtacctcgagactttaaattatcagatgctttggcagtagaagatgatcaagttgcacctgttccattgaatgtcgttgaaacttcaagtagtgttagggaaagaaaaaagaaggaaaagaaacaaaagcctgtgcttgaagagcaggtcatcaaagaaagtgacgcatcaaagattcctggcaaaaaagtagaacctgtcccagttactaaacagcccacccctccctctgaagcagctgcctcgaagaagaaaccagggcagaagaagtctaaaaatggaagcgatgaccaggataaaaaggtggaaactctcatggtaccatcaaaaaggcaagaagcattgcccctccaccaagagactaaacaagaaagtggatcagggaagaagaaagcttcatcaaagaaacaaaagacagaaaatgtcttcgtagatgaaccccttattcatgcaactacttatattcctttgatggataatgctgactcaagtcctgtggtagataagagagaggttattgatttgcttaaacctgaccaagtagaagggatccagaaatctgggactaaaaaactgaagaccgaaactgacaaagaaaatgctgaagtgaagtttaaagattttcttctgtccttgaagactatgatgttttctgaagatgaggctctttgtgttgtagacttgctaaaggagaagtctggtgtaatacaagatgctttaaagaagtcaagtaagggagaattgactacgcttatacatcagcttcaagaaaaggacaagttactcgctgctgtgaaggaagatgctgctgctacaaaggatcggtgtaagcagttaacccaggaaatgatgacagagaaagaaagaagcaatgtggttataacaaggatgaaagatcgaattggaacattagaaaaggaacataatgtatttcaaaacaaaatacatgtcagttatcaagagactcaacagatgcagatgaagtttcagcaagttcgtgagcagatggaggcagagatagctcacttgaagcaggaaaatggtatactgagagatgcagtcagcaacactacaaatcaactggaaagcaagcagtctgcagaactaaataaactacgccaggattatgctaggttggtgaatgagctgactgagaaaacaggaaagctacagcaagaggaagtccaaaagaagaatgctgagcaagcagctactcagttgaaggttcaactacaagaagctgagagaaggtgggaagaagttcagagctacatcaggaagagaacagcggaacatgaggcagcacagcaagatttacagagtaaatttgtggccaaagaaaatgaagtacagagtctgcatagtaagcttacagataccttggtatcaaaacaacagttggagcaaagactaatgcagttaatggaatcagagcagaaaagggtgaacaaagaagagtctctacaaatgcaggttcaggatattttggagcagaatgaggctttgaaagctcaaattcagcagttccattcccagatagcagcccagacctccgcttcagttctagcagaagaattacataaagtgattgcagaaaaggataagcagataaaacagactgaagattctttagcaagtgaacgtgatcgtttaacaagtaaagaagaggaacttaaggatatacagaatatgaatttcttattaaaagctgaagtgcagaaattacaggccctggcaaatgagcaggctgctgctgcacatgaattggagaagatgcaacaaagtgtttatgttaaagatgataaaataagattgctggaagagcaactacaacatgaaatttcaaacaaaatggaagaatttaagattctaaatgaccaaaacaaagcattaaaatcagaagttcagaagctacagactcttgtttctgaacagcctaataaggatgttgtggaacaaatggaaaaatgcattcaagaaaaagatgagaagttaaagactgtggaagaattacttgaaactggacttattcaggtggcaactaaagaagaggagctgaatgcaataagaacagaaaattcatctctgacaaaagaagttcaagacttaaaagctaagcaaaatgatcaggtttcttttgcctctctagttgaagaacttaagaaagtgatccatgagaaagatggaaagatcaagtctgtagaagagcttctggaggcagaacttctcaaagttgctaacaaggagaaaactgttcaggatttgaaacaggaaataaaggctctaaaagaagaaataggaaatgtccagcttgaaaaggctcaacagttatctatcacttccaaagttcaggagcttcagaacttattaaaaggaaaagaggaacagatgaataccatgaaggctgttttggaagagaaagagaaagacctagccaatacagggaagtggttacaggatcttcaagaagaaaatgaatctttaaaagcacatgttcaggaagtagcacaacataacttgaaagaggcctcttctgcatcacagtttgaagaacttgagattgtgttgaaagaaaaggaaaatgaattgaagaggttagaagccatgctaaaagagagggagagtgatctttctagcaaaacacagctgttacaggatgtacaagatgaaaacaaattgtttaagtcccaaattgagcagcttaaacaacaaaactaccaacaggcatcttcttttccccctcatgaagaattattaaaagtaatttcagaaagagagaaagaaataagtggtctctggaatgagttagattctttgaaggatgcagttgaacaccagaggaagaaaaacaatgaaaggcagcaacaggtggaagctgttgagttggaggctaaagaagttctcaaaaaattatttccaaaggtgtctgtcccttctaatttgagttatggtgaatggttgcatggatttgaaaaaaaggcaaaagaatgtatggctggaacttcagggtcagaggaggttaaggttctagagcacaagttgaaagaagctgatgaaatgcacacattgttacagctagagtgtgaaaaatacaaatccgtccttgcagaaacagaaggaattttacagaagctacagagaagtgttgagcaagaagaaaataaatggaaagttaaggtcgatgaatcacacaagactattaaacagatgcagtcatcatttacatcttcagaacaagagctagagcgattaagaagcgaaaataaggatattgaaaatctgagaagagaacgagaacatttggaaatggaactagaaaaggcagagatggaacgatctacctatgttacagaagtcagagagctgaaagatctgttgactgaattgcagaaaaaacttgatgattcatattctgaagcagtaagacagaatgaagagctaaatttgttgaaggcacagttaaatgaaacactcacaaaacttagaactgaacaaaatgaaagacagaaggtagctggtgatttgcataaggctcaacagtcactggagcttatccagtcaaaaatagtaaaagctgctggagacactactgttattgaaaatagtgatgtttccccagaaacggagtcttctgagaaggagacaatgtctgtaagtctaaatcagactgtaacacagttacagcagttgcttcaggcggtaaaccaacagctcacaaaggagaaagagcactaccaggtgttagagtgaagtaattgggaaactgttcatttgaggataaaaaaggcattgtattatattttgccaaattaaagccttatttatgttttcaccctttctactttgtcagaaacactgaacagagttttgtcttttctaatccttgttagactactgatttaaagaaggaaaaaaaaaagccaactctgtagacaccttcagagtttagttttataataaaaactgtttgaataattagacctttacattcctgaagataaacatgtaatcttttatcttattttgctcaataaaattgttcagaagatcaaagtggtaaagacaatgtaaaatttaacattttaatactgatgttgtacactgttttacttaacattttgggaagtaactgcctctgacttcaactcaagaaaacacttttttgttgctaatgtaatcggtttttgtaatggcgtcagcaaataaaaggatgcttattattcaaacttga

SEQ ID NO: 442224 - DNA, 3476 bp, Homo sapiens
gcagtgagtgttgggcctggagttaccagtggtgttaatgtgaatatcttgagtggcatgggcaatggtactatttcttcctctgctgctgttagcagtgttcctaatgcagctgcagggatgactgggggatcggtttcaagtcagcagcaacaaccaacagttaacccaggaaatgatgacagagaaagaaagaagcaatgtggttataacaaggatgaaagatcgaattggaacattagaaaaggaacataatgtatttcaaaacaaaatacatgtcagttatcaagagactcaacagatgcagatgaagtttcagcaagttcgtgagcagatggaggcagagatagctcacttgaagcaggaaaatggtatactgagagatgcagtcagcaacactacaaatcaactggaaagcaagcagtctgcagaactaaataaactacgccaggattatgctaggttggtgaatgagctgactgagaaaacaggaaagctacagcaagaggaagtccaaaagaagaatgctgagcaagcagctactcagttgaaggttcaactacaagaagctgagagaaggtgggaagaagttcagagctacatcaggaagagaacagcggaacatgaggcagcacagcaagatttacagagtaaatttgtggccaaagaaaatgaagtacagagtctgcatagtaagcttacagataccttggtatcaaaacaacagttggagcaaagactaatgcagttaatggaatcagagcagaaaagggtgaacaaagaagagtctctacaaatgcaggttcaggatattttggagcagaatgaggctttgaaagctcaaattcagcagttccattcccagatagcagcccagacctccgcttcagttctagcagaagaattacataaagtgattgcagaaaaggataagcagataaaacagactgaagattctttagcaagtgaacgtgatcgtttaacaagtaaagaagaggaacttaaggatatacagaatatgaatttcttattaaaagctgaagtgcagaaattacaggccctggcaaatgagcaggctgctgctgcacatgaattggagaagatgcaacaaagtgtttatgttaaagatgataaaataagattgctggaagagcaactacaacatgaaatttcaaacaaaatggaagaatttaagattctaaatgaccaaaacaaagcattaaaatcagaagttcagaagctacagactcttgtttctgaacagcctaataaggatgttgtggaacaaatggaaaaatgcattcaagaaaaagatgagaagttaaagactgtggaagaattacttgaaactggacttattcaggtggcaactaaagaagaggagctgaatgcaataagaacagaaaattcatctctgacaaaagaagttcaagacttaaaagctaagcaaaatgatcaggtttcttttgcctctctagttgaagaacttaagaaagtgatccatgagaaagatggaaagatcaagtctgtagaagagcttctggaggcagaacttctcaaagttgctaacaaggagaaaactgttcaggatttgaaacaggaaataaaggctctaaaagaagaaataggaaatgtccagcttgaaaaggctcaacagttatctatcacttccaaagttcaggagcttcagaacttattaaaaggaaaagaggaacagatgaataccatgaaggctgttttggaagagaaagagaaagacctagccaatacagggaagtggttacaggatcttcaagaagaaaatgaatctttaaaagcacatgttcaggaagtagcacaacataacttgaaagaggcctcttctgcatcacagtttgaagaacttgagattgtgttgaaagaaaaggaaaatgaattgaagaggttagaagccatgctaaaagagagggagagtgatctttctagcaaaacacagctgttacaggatgtacaagatgaaaacaaattgtttaagtcccaaattgagcagcttaaacaacaaaactaccaacaggcatcttcttttccccctcatgaagaattattaaaagtaatttcagaaagagagaaagaaataagtggtctctggaatgagttagattctttgaaggatgcagttgaacaccagaggaagaaaaacaatgaaaggcagcaacaggtggaagctgttgagttggaggctaaagaagttctcaaaaaattatttccaaaggtgtctgtcccttctaatttgagttatggtgaatggttgcatggatttgaaaaaaaggcaaaagaatgtatggctggaacttcagggtcagaggaggttaaggttctagagcacaagttgaaagaagctgatgaaatgcacacattgttacagctagagtgtgaaaaatacaaatccgtccttgcagaaacagaaggaattttacagaagctacagagaagtgttgagcaagaagaaaataaatggaaagttaaggtcgatgaatcacacaagactattaaacagatgcagtcatcatttacatcttcagaacaagagctagagcgattaagaagcgaaaataaggatattgaaaatctgagaagagaacgagaacatttggaaatggaactagaaaaggcagagatggaacgatctacctatgttacagaagtcagagagttgaaggcacagttaaatgaaacactcacaaaacttagaactgaacaaaatgaaagacagaaggtagctggtgatttgcataaggctcaacagtcactggagcttatccagtcaaaaatagtaaaagctgctggagacactactgttattgaaaatagtgatgtttccccagaaacggagtcttctgagaaggagacaatgtctgtaagtctaaatcagactgtaacacagttacagcagttgcttcaggcggtaaaccaacagctcacaaaggagaaagagcactaccaggtgttagagtgaagtaattgggaaactgttcatttgaggataaaaaaggcattgtattatattttgccaaattaaagccttatttatgttttcaccctttctactttgtcagaaacactgaacagagttttgtcttttctaatccttgttagactactgatttaaagaaggaaaaaaaaaagccaactctgtagacaccttcagagtttagttttataataaaaactgtttgaataattagacctttacattcctgaagataaacatgtaatcttttatcttattttgctcaataaaattgttcagaagatcaaagtggtaaagacaatgtaaaatttaacattttaatactgatgttgtacactgttttacttaacattttgggaagtaactgcctctgacttcaactcaagaaaacacttttttgttgctaatgtaatcggtttttgtaatggcgtcagcaaataaaaggatgcttattattcaaacttga

SEQ ID NO: 442225 - DNA, 4625 bp, Homo sapiens
cgccccgaagccgcccgtttcctgccgagcggcgcgacggcacctgagcgactgcggcggcggcggcggcggcggcggcgcctcggagcgggcggcccgggctgtagtgccggcgccgccgcgtcttcccggtctcctttcccggccgcacagggttttataggatcacattgacaaaagtaccatggagttttatgagtcagcatattttattgttcttattccttcaatagttattacagtaattttcctcttcttctggcttttcatgaaagaaacattatatgatgaagttcttgcaaaacagaaaagagaacaaaagcttattcctaccaaaacagataaaaagaaagcagaaaagaaaaagaataaaaagaaagaaatccagaatggaaacctccatgaatccgactctgagagtgtacctcgagactttaaattatcagatgctttggcagtagaagatgatcaagttgcacctgttccattgaatgtcgttgaaacttcaagtagtgttagggaaagaaaaaagaaggaaaagaaacaaaagcctgtgcttgaagagcaggtcatcaaagaaagtgacgcatcaaagattcctggcaaaaaagtagaacctgtcccagttactaaacagcccacccctccctctgaagcagctgcctcgaagaagaaaccagggcagaagaagtctaaaaatggaagcgatgaccaggataaaaaggtggaaactctcatggtaccatcaaaaaggcaagaagcattgcccctccaccaagagactaaacaagaaagtggatcagggaagaagaaagcttcatcaaagaaacaaaagacagaaaatgtcttcgtagatgaaccccttattcatgcaactacttatattcctttgatggataatgctgactcaagtcctgtggtagataagagagaggttattgatttgcttaaacctgaccaagtagaagggatccagaaatctgggactaaaaaactgaagaccgaaactgacaaagaaaatgctgaagtgaagtttaaagattttcttctgtccttgaagactatgatgttttctgaagatgaggctctttgtgttgtagacttgctaaaggagaagtctggtgtaatacaagatgctttaaagaagtcaagtaagggagaattgactacgcttatacatcagcttcaagaaaaggacaagttactcgctgctgtgaaggaagatgctgctgctacaaaggatcggtgtaagcagttaacccaggaaatgatgacagagaaagaaagaagcaatgtggttataacaaggatgaaagatcgaattggaacattagaaaaggaacataatgtatttcaaaacaaaatacatgtcagttatcaagagactcaacagatgcagatgaagtttcagcaagttcgtgagcagatggaggcagagatagctcacttgaagcaggaaaatggtatactgagagatgcagtcagcaacactacaaatcaactggaaagcaagcagtctgcagaactaaataaactacgccaggattatgctaggttggtgaatgagctgactgagaaaacaggaaagctacagcaagaggaagtccaaaagaagaatgctgagcaagcagctactcagttgaaggttcaactacaagaagctgagagaaggtgggaagaagttcagagctacatcaggaagagaacagcggaacatgaggcagcacagcaagatttacagagtaaatttgtggccaaagaaaatgaagtacagagtctgcatagtaagcttacagataccttggtatcaaaacaacagttggagcaaagactaatgcagttaatggaatcagagcagaaaagggtgaacaaagaagagtctctacaaatgcaggttcaggatattttggagcagaatgaggctttgaaagctcaaattcagcagttccattcccagatagcagcccagacctccgcttcagttctagcagaagaattacataaagtgattgcagaaaaggataagcagataaaacagactgaagattctttagcaagtgaacgtgatcgtttaacaagtaaagaagaggaacttaaggatatacagaatatgaatttcttattaaaagctgaagtgcagaaattacaggccctggcaaatgagcaggctgctgctgcacatgaattggagaagatgcaacaaagtgtttatgttaaagatgataaaataagattgctggaagagcaactacaacatgaaatttcaaacaaaatggaagaatttaagattctaaatgaccaaaacaaagcattaaaatcagaagttcagaagctacagactcttgtttctgaacagcctaataaggatgttgtggaacaaatggaaaaatgcattcaagaaaaagatgagaagttaaagactgtggaagaattacttgaaactggacttattcaggtggcaactaaagaagaggagctgaatgcaataagaacagaaaattcatctctgacaaaagaagttcaagacttaaaagctaagcaaaatgatcaggtttcttttgcctctctagttgaagaacttaagaaagtgatccatgagaaagatggaaagatcaagtctgtagaagagcttctggaggcagaacttctcaaagttgctaacaaggagaaaactgttcaggatttgaaacaggaaataaaggctctaaaagaagaaataggaaatgtccagcttgaaaaggctcaacagttatctatcacttccaaagttcaggagcttcagaacttattaaaaggaaaagaggaacagatgaataccatgaaggctgttttggaagagaaagagaaagacctagccaatacagggaagtggttacaggatcttcaagaagaaaatgaatctttaaaagcacatgttcaggaagtagcacaacataacttgaaagaggcctcttctgcatcacagtttgaagaacttgagattgtgttgaaagaaaaggaaaatgaattgaagaggttagaagccatgctaaaagagagggagagtgatctttctagcaaaacacagctgttacaggatgtacaagatgaaaacaaattgtttaagtcccaaattgagcagcttaaacaacaaaactaccaacaggcatcttcttttccccctcatgaagaattattaaaagtaatttcagaaagagagaaagaaataagtggtctctggaatgagttagattctttgaaggatgcagttgaacaccagaggaagaaaaacaatgaaaggcagcaacaggtggaagctgttgagttggaggctaaagaagttctcaaaaaattatttccaaaggtgtctgtcccttctaatttgagttatggtgaatggttgcatggatttgaaaaaaaggcaaaagaatgtatggctggaacttcagggtcagaggaggttaaggttctagagcacaagttgaaagaagctgatgaaatgcacacattgttacagctagagtgtgaaaaatacaaatccgtccttgcagaaacagaaggaattttacagaagctacagagaagtgttgagcaagaagaaaataaatggaaagttaaggtcgatgaatcacacaagactattaaacagatgcagtcatcatttacatcttcagaacaagagctagagcgattaagaagcgaaaataaggatattgaaaatctgagaagagaacgagaacatttggaaatggaactagaaaaggcagagatggaacgatctacctatgttacagaagtcagagagttgaaggcacagttaaatgaaacactcacaaaacttagaactgaacaaaatgaaagacagaaggtagctggtgatttgcataaggctcaacagtcactggagcttatccagtcaaaaatagtaaaagctgctggagacactactgttattgaaaatagtgatgtttccccagaaacggagtcttctgagaaggagacaatgtctgtaagtctaaatcagactgtaacacagttacagcagttgcttcaggcggtaaaccaacagctcacaaaggagaaagagcactaccaggtgttagagtgaagtaattgggaaactgttcatttgaggataaaaaaggcattgtattatattttgccaaattaaagccttatttatgttttcaccctttctactttgtcagaaacactgaacagagttttgtcttttctaatccttgttagactactgatttaaagaaggaaaaaaaaaagccaactctgtagacaccttcagagtttagttttataataaaaactgtttgaataattagacctttacattcctgaagataaacatgtaatcttttatcttattttgctcaataaaattgttcagaagatcaaagtggtaaagacaatgtaaaatttaacattttaatactgatgttgtacactgttttacttaacattttgggaagtaactgcctctgacttcaactcaagaaaacacttttttgttgctaatgtaatcggtttttgtaatggcgtcagcaaataaaaggatgcttattattcaaacttgaagagatgcggccagatcctctccattcatatttcgtcatcgacgggacagtccactg

SEQ ID NO: 442226 - DNA, 4385 bp, Homo sapiens
cgccccgaagccgcccgtttcctgccgagcggcgcgacggcacctgagcgactgcggcggcggcggcggcggcggcggcgcctcggagcgggcggcccgggctgtagtgccggcgccgccgcgtcttcccggtctcctttcccggccgcacagggttttataggatcacattgacaaaagtaccatggagttttatgagtcagcatattttattgttcttattccttcaatagttattacagtaattttcctcttcttctggcttttcatgaaagaaacattatatgatgaagttcttgcaaaacagaaaagagaacaaaagcttattcctaccaaaacagataaaaagaaagcagaaaagaaaaagaataaaaagaaagaaatccagaatggaaacctccatgaatccgactctgagagtgtacctcgagactttaaattatcagatgctttggcagtagaagatgatcaagttgcacctgttccattgaatgtcgttgaaacttcaagtagtgttagggaaagaaaaaagaaggaaaagaaacaaaagcctgtgcttgaagagcaggtcatcaaagaaagtgacgcatcaaagattcctggcaaaaaagtagaacctgtcccagttactaaacagcccacccctccctctgaagcagctgcctcgaagaagaaaccagggcagaagaagtctaaaaatggaagcgatgaccaggataaaaaggtggaaactctcatggtaccatcaaaaaggcaagaagcattgcccctccaccaagagactaaacaagaaagtggatcagggaagaagaaagcttcatcaaagaaacaaaagacagaaaatgtcttcgtagatgaaccccttattcatgcaactacttatattcctttgatggataatgctgactcaagtcctgtggtagataagagagaggttattgatttgcttaaacctgaccaagtagaagggatccagaaatctgggactaaaaaactgaagaccgaaactgacaaagaaaatgctgaagtgaagtttaaagattttcttctgtccttgaagactatgatgttttctgaagatgaggctctttgtgttgtagacttgctaaaggagaagtctggtgtaatacaagatgctttaaagaagtcaagtaagggagaattgactacgcttatacatcagcttcaagaaaaggacaagttactcgctgctgtgaaggaagatgctgctgctacaaaggatcggtgtaagcagttaacccaggaaatgatgacagagaaagaaagaagcaatgtggttataacaaggatgaaagatcgaattggaacattagaaaaggaacataatgtatttcaaaacaaaatacatgtcagttatcaagagactcaacagatgcagatgaagtttcagcaagttcgtgagcagatggaggcagagatagctcacttgaagcaggaaaatggtatactgagagatgcagtcagcaacactacaaatcaactggaaagcaagcagtctgcagaactaaataaactacgccaggattatgctaggttggtgaatgagctgactgagaaaacaggaaagctacagcaagaggaagtccaaaagaagaatgctgagcaagcagctactcagttgaaggttcaactacaagaagctgagagaaggtgggaagaagttcagagctacatcaggaagagaacagcggaacatgaggcagcacagcaagatttacagagtaaatttgtggccaaagaaaatgaagtacagagtctgcatagtaagcttacagataccttggtatcaaaacaacagttggagcaaagactaatgcagttaatggaatcagagcagaaaagggtgaacaaagaagagtctctacaaatgcaggttcaggatattttggagcagaatgaggctttgaaagctcaaattcagcagttccattcccagatagcagcccagacctccgcttcagttctagcagaagaattacataaagtgattgcagaaaaggataagcagataaaacagactgaagattctttagcaagtgaacgtgatcgtttaacaagtaaagaagaggaacttaaggatatacagaatatgaatttcttattaaaagctgaagtgcagaaattacaggccctggcaaatgagcaggctgctgctgcacatgaattggagaagatgcaacaaagtgtttatgttaaagatgataaaataagattgctggaagagcaactacaacatgaaatttcaaacaaaatggaagaatttaagattctaaatgaccaaaacaaagcattaaaatcagaagttcagaagctacagactcttgtttctgaacagcctaataaggatgttgtggaacaaatggaaaaatgcattcaagaaaaagatgagaagttaaagactgtggaagaattacttgaaactggacttattcaggtggcaactaaagaagaggagctgaatgcaataagaacagaaaattcatctctgacaaaagaagttcaagacttaaaagctaagcaaaatgatcaggtttcttttgcctctctagttgaagaacttaagaaagtgatccatgagaaagatggaaagatcaagtctgtagaagagcttctggaggcagaacttctcaaagttgctaacaaggagaaaactgttcaggatttgaaacaggaaataaaggctctaaaagaagaaataggaaatgtccagcttgaaaaggctcaacagttatctatcacttccaaagttcaggagcttcagaacttattaaaaggaaaagaggaacagatgaataccatgaaggctgttttggaagagaaagagaaagacctagccaatacagggaagtggttacaggatcttcaagaagaaaatgaatctttaaaagcacatgttcaggaagtagcacaacataacttgaaagaggcctcttctgcatcacagtttgaagaacttgagattgtgttgaaagaaaaggaaaatgaattgaagaggttagaagccatgctaaaagagagggagagtgatctttctagcaaaacacagctgttacaggatgtacaagatgaaaacaaattgtttaagtcccaaattgagcagcttaaacaacaaaactaccaacaggcatcttcttttccccctcatgaagaattattaaaagtaatttcagaaagagagaaagaaataagtggtctctggaatgagttagattctttgaaggatgcagttgaacaccagaggaagaaaaacaatgaaaggcagcaacaggtggaagctgttgagttggaggctaaagaagttctcaaaaaattatttccaaaggtgtctgtcccttctaatttgagttatggtgaatggttgcatggatttgaaaaaaaggcaaaagaatgtatggctggaacttcagggtcagaggaggttaaggttctagagcacaagttgaaagaagctgatgaaatgcacacattgttacagctagagtgtgaaaaatacaaatccgtccttgcagaaacagaaggaattttacagaagctacagagaagtgttgagcaagaagaaaataaatggaaagttaaggtcgatgaatcacacaagactattaaacagatgcagtcatcatttacatcttcagaacaagagctagagcgattaagaagcgaaaataaggatattgaaaatctgagaagagaacgagaacatttggaaatggaactagaaaaggcagagatggaacgatctacctatgttacagaagtcagagagttgaaggcacagttaaatgaaacactcacaaaacttagaactgaacaaaatgaaagacagaaggtagctggtgatttgcataaggctcaacagtcactggagcttatccagtcaaaaatagtaaaagctgctggagacactactgttattgaaaatagtgatgtttccccagaaacggagtcttctgagaaggagacaatgtctgtaagtctaaatcagactgtaacacagttacagcagttgcttcaggcggtaaaccaacagctcacaaaggagaaagagcactaccaggtgttagagtgaagtaattgggaaactgttcatttgaggataaaaaaggcattgtattatattttgccaaattaaagccttatttatgttttcaccctttctactttgtcagaaacactgaacagagttttgtcttttctaatccttgttagactactgatttaaagaaggaaaaaaaaaagccaactctgtagacaccttcagagtttagttttataataaaaactgtttgaataattagacctttacattcctgaagataaacatgtaatcttttatcttattttgctcaataaaattgttcagaaga

SEQ ID NO: 442227 - DNA, 4645 bp, Homo sapiens
cgccccgaagccgcccgtttcctgccgagcggcgcgacggcacctgagcgactgcggcggcggcggcggcggcggcggcgcctcggagcgggcggcccgggctgtagtgccggcgccgccgcgtcttcccggtctcctttcccggccgcacagggttttataggatcacattgacaaaagtaccatggagttttatgagtcagcatattttattgttcttattccttcaatagttattacagtaattttcctcttcttctggcttttcatgaaagaaacattatatgatgaagttcttgcaaaacagaaaagagaacaaaagcttattcctaccaaaacagataaaaagaaagcagaaaagaaaaagaataaaaagaaagaaatccagaatggaaacctccatgaatccgactctgagagtgtacctcgagactttaaattatcagatgctttggcagtagaagatgatcaagttgcacctgttccattgaatgtcgttgaaacttcaagtagtgttagggaaagaaaaaagaaggaaaagaaacaaaagcctgtgcttgaagagcaggtcatcaaagaaagtgacgcatcaaagattcctggcaaaaaagtagaacctgtcccagttactaaacagcccacccctccctctgaagcagctgcctcgaagaagaaaccagggcagaagaagtctaaaaatggaagcgatgaccaggataaaaaggtggaaactctcatggtaccatcaaaaaggcaagaagcattgcccctccaccaagagactaaacaagaaagtggatcagggaagaagaaagcttcatcaaagaaacaaaagacagaaaatgtcttcgtagatgaaccccttattcatgcaactacttatattcctttgatggataatgctgactcaagtcctgtggtagataagagagaggttattgatttgcttaaacctgaccaagtagaagggatccagaaatctgggactaaaaaactgaagaccgaaactgacaaagaaaatgctgaagtgaagtttaaagattttcttctgtccttgaagactatgatgttttctgaagatgaggctctttgtgttgtagacttgctaaaggagaagtctggtgtaatacaagatgctttaaagaagtcaagtaagggagaattgactacgcttatacatcagcttcaagaaaaggacaagttactcgctgctgtgaaggaagatgctgctgctacaaaggatcggtgtaagcagttaacccaggaaatgatgacagagaaagaaagaagcaatgtggttataacaaggatgaaagatcgaattggaacattagaaaaggaacataatgtatttcaaaacaaaatacatgtcagttatcaagagactcaacagatgcagatgaagtttcagcaagttcgtgagcagatggaggcagagatagctcacttgaagcaggaaaatggtatactgagagatgcagtcagcaacactacaaatcaactggaaagcaagcagtctgcagaactaaataaactacgccaggattatgctaggttggtgaatgagctgactgagaaaacaggaaagctacagcaagaggaagtccaaaagaagaatgctgagcaagcagctactcagttgaaggttcaactacaagaagctgagagaaggtgggaagaagttcagagctacatcaggaagagaacagcggaacatgaggcagcacagcaagatttacagagtaaatttgtggccaaagaaaatgaagtacagagtctgcatagtaagcttacagataccttggtatcaaaacaacagttggagcaaagactaatgcagttaatggaatcagagcagaaaagggtgaacaaagaagagtctctacaaatgcaggttcaggatattttggagcagaatgaggctttgaaagctcaaattcagcagttccattcccagatagcagcccagacctccgcttcagttctagcagaagaattacataaagtgattgcagaaaaggataagcagataaaacagactgaagattctttagcaagtgaacgtgatcgtttaacaagtaaagaagaggaacttaaggatatacagaatatgaatttcttattaaaagctgaagtgcagaaattacaggccctggcaaatgagcaggctgctgctgcacatgaattggagaagatgcaacaaagtgtttatgttaaagatgataaaataagattgctggaagagcaactacaacatgaaatttcaaacaaaatggaagaatttaagattctaaatgaccaaaacaaagcattaaaatcagaagttcagaagctacagactcttgtttctgaacagcctaataaggatgttgtggaacaaatggaaaaatgcattcaagaaaaagatgagaagttaaagactgtggaagaattacttgaaactggacttattcaggtggcaactaaagaagaggagctgaatgcaataagaacagaaaattcatctctgacaaaagaagttcaagacttaaaagctaagcaaaatgatcaggtttcttttgcctctctagttgaagaacttaagaaagtgatccatgagaaagatggaaagatcaagtctgtagaagagcttctggaggcagaacttctcaaagttgctaacaaggagaaaactgttcaggatttgaaacaggaaataaaggctctaaaagaagaaataggaaatgtccagcttgaaaaggctcaacagttatctatcacttccaaagttcaggagcttcagaacttattaaaaggaaaagaggaacagatgaataccatgaaggctgttttggaagagaaagagaaagacctagccaatacagggaagtggttacaggatcttcaagaagaaaatgaatctttaaaagcacatgttcaggaagtagcacaacataacttgaaagaggcctcttctgcatcacagtttgaagaacttgagattgtgttgaaagaaaaggaaaatgaattgaagaggttagaagccatgctaaaagagagggagagtgatctttctagcaaaacacagctgttacaggatgtacaagatgaaaacaaattgtttaagtcccaaattgagcagcttaaacaacaaaactaccaacaggcatcttcttttccccctcatgaagaattattaaaagtaatttcagaaagagagaaagaaataagtggtctctggaatgagttagattctttgaaggatgcagttgaacaccagaggaagaaaaacaatgaaaggcagcaacaggtggaagctgttgagttggaggctaaagaagttctcaaaaaattatttccaaaggtgtctgtcccttctaatttgagttatggtgaatggttgcatggatttgaaaaaaaggcaaaagaatgtatggctggaacttcagggtcagaggaggttaaggttctagagcacaagttgaaagaagctgatgaaatgcacacattgttacagctagagtgtgaaaaatacaaatccgtccttgcagaaacagaaggaattttacagaagctacagagaagtgttgagcaagaagaaaataaatggaaagttaaggtcgatgaatcacacaagactattaaacagatgcagtcatcatttacatcttcagaacaagagctagagcgattaagaagcgaaaataaggatattgaaaatctgagaagagaacgagaacatttggaaatggaactagaaaaggcagagatggaacgatctacctatgttacagaagtcagagagttgaaggcacagttaaatgaaacactcacaaaacttagaactgaacaaaatgaaagacagaaggtagctggtgatttgcataaggctcaacagtcactggagcttatccagtcaaaaatagtaaaagctgctggagacactactgttattgaaaatagtgatgtttccccagaaacggagtcttctgagaaggagacaatgtctgtaagtctaaatcagactgtaacacagttacagcagttgcttcaggcggtaaaccaacagctcacaaaggagaaagagcactaccaggtgttaggagcgttttgtctcactttagagtgatcatcctctggcctaccttgacacatgctctccttcaaaatgctaattcagagtgaagtaattgggaaactgttcatttgaggataaaaaaggcattgtattatattttgccaaattaaagccttatttatgttttcaccctttctactttgtcagaaacactgaacagagttttgtcttttctaatccttgttagactactgatttaaagaaggaaaaaaaaaagccaactctgtagacaccttcagagtttagttttataataaaaactgtttgaataattagacctttacattcctgaagataaacatgtaatcttttatcttattttgctcaataaaattgttcagaagatcaaagtggtaaagacaatgtaaaatttaacattttaatactgatgttgtacactgttttacttaacattttgggaagtaactgcctctgacttcaactcaagaaaacacttttttgttgctaatgtaatcggtttttgtaatggcgtcagcaaataaaaggatgcttattattcaaacttga

SEQ ID NO: 442228 - DNA, 4232 bp, Homo sapiens
cgccccgaagccgcccgtttcctgccgagcggcgcgacggcacctgagcgactgcggcggcggcggcggcggcggcggcgcctcggagcgggcggcccgggctgtagtgccggcgccgccgcgtcttcccggtctcctttcccggccgcacagggttttataggatcacattgacaaaagtaccatggagttttatgagtcagcatattttattgttcttattccttcaatagttattacagtaattttcctcttcttctggcttttcatgaaagaaacattatatgatgaagttcttgcaaaacagaaaagagaacaaaagcttattcctaccaaaacagataaaaagaaagcagaaaagaaaaagaataaaaagaaagaaatccagaatggaaacctccatgaatccgactctgagagtgtacctcgagactttaaattatcagatgctttggcagtagaagatgatcaagttgcacctgttccattgaatgtcgttgaaacttcaagtagtgttagggaaagaaaaaagaaggaaaagaaacaaaagcctgtgcttgaagagcaggtcatcaaagaaagtgacgcatcaaagattcctggcaaaaaagtagaacctgtcccagttactaaacagcccacccctccctctgaagcagctgcctcgaagaagaaaccagggcagaagaagtctaaaaatggaagcgatgaccaggataaaaaggtggaaactctcatggtaccatcaaaaaggcaagaagcattgcccctccaccaagagactaaacaagaaagtggatcagggaagaagaaagcttcatcaaagaaacaaaagacagaaaatgtcttcgtagatgaaccccttattcatgcaactacttatattcctttgatggataatgctgactcaagtcctgtggtagataagagagaggttattgatttgcttaaacctgaccaagtagaagggatccagaaatctgggactaaaaaactgaagaccgaaactgacaaagaaaatgctgaagtgaagtttaaagattttcttctgtccttgaagactatgatgttttctgaagatgaggctctttgtgttgtagacttgctaaaggagaagtctggtgtaatacaagatgctttaaagaagtcaagtaagggagaattgactacgcttatacatcagcttcaagaaaaggacaagttactcgctgctgtgaaggaagatgctgctgctacaaaggatcggtgtaagcagttaacccaggaaatgatgacagagaaagaaagaagcaatgtggttataacaaggatgaaagatcgaattggaacattagaaaaggaacataatgtatttcaaaacaaaatacatgtcagttatcaagagactcaacagatgcagatgaagtttcagcaagttcgtgagcagatggaggcagagatagctcacttgaagcaggaaaatggtatactgagagatgcagtcagcaacactacaaatcaactggaaagcaagcagtctgcagaactaaataaactacgccaggattatgctaggttggtgaatgagctgactgagaaaacaggaaagctacagcaagaggaagtccaaaagaagaatgctgagcaagcagctactcagttgaaggttcaactacaagaagctgagagaaggtgggaagaagttcagagctacatcaggaagagaacagcggaacatgaggcagcacagcaagatttacagagtaaatttgtggccaaagaaaatgaagtacagagtctgcatagtaagcttacagataccttggtatcaaaacaacagttggagcaaagactaatgcagttaatggaatcagagcagaaaagggtgaacaaagaagagtctctacaaatgcaggttcaggatattttggagcagaatgaggctttgaaagctcaaattcagcagttccattcccagatagcagcccagacctccgcttcagttctagcagaagaattacataaagtgattgcagaaaaggataagcagataaaacagactgaagattctttagcaagtgaacgtgatcgtttaacaagtaaagaagaggaacttaaggatatacagaatatgaatttcttattaaaagctgaagtgcagaaattacaggccctggcaaatgagcaggctgctgctgcacatgaattggagaagatgcaacaaagtgtttatgttaaagatgataaaataagattgctggaagagcaactacaacatgaaatttcaaacaaaatggaagaatttaagattctaaatgaccaaaacaaagcattaaaatcagaagttcagaagctacagactcttgtttctgaacagcctaataaggatgttgtggaacaaatggaaaaatgcattcaagaaaaagatgagaagttaaagactgtggaagaattacttgaaactggacttattcaggtggcaactaaagaagaggagctgaatgcaataagaacagaaaattcatctctgacaaaagaagttcaagacttaaaagctaagcaaaatgatcaggtttcttttgcctctctagttgaagaacttaagaaagtgatccatgagaaagatggaaagatcaagtctgtagaagagcttctggaggcagaacttctcaaagttgctaacaaggagaaaactgttcaggatttgaaacaggaaataaaggctctaaaagaagaaataggaaatgtccagcttgaaaaggctcaacagttatctatcacttccaaagttcaggagcttcagaacttattaaaaggaaaagaggaacagatgaataccatgaaggctgttttggaagagaaagagaaagacctagccaatacagggaagtggttacaggatcttcaagaagaaaatgaatctttaaaagcacatgttcaggaagtagcacaacataacttgaaagaggcctcttctgcatcacagtttgaagaacttgagattgtgttgaaagaaaaggaaaatgaattgaagaggttagaagccatgctaaaagagagggagagtgatctttctagcaaaacacagctgttacaggatgtacaagatgaaaacaaattgtttaagtcccaaattgagcagcttaaacaacaaaactaccaacaggcatcttcttttccccctcatgaagaattattaaaagtaatttcagaaagagagaaagaaataagtggtctctggaatgagttagattctttgaaggatgcagttgaacaccagaggaagaaaaacaatgaaaggcagcaacaggtggaagctgttgagttggaggctaaagaagttctcaaaaaattatttccaaaggtgtctgtcccttctaatttgagttatggtgaatggttgcatggatttgaaaaaaaggcaaaagaatgtatggctggaacttcagggtcagaggaggttaaggttctagagcacaagttgaaagaagctgatgaaatgcacacattgttacagctagagtgtgaaaaatacaaatccgtccttgcagaaacagaaggaattttacagaagctacagagaagtgttgagcaagaagaaaataaatggaaagttaaggtcgatgaatcacacaagactattaaacagatgcagtcatcatttacatcttcagaacaagagctagagcgattaagaagcgaaaataaggatattgaaaatctgagaagagaacgagaacatttggaaatggaactagaaaaggcagagatggaacgatctacctatgttacagaagtcagagagttgaaggcacagttaaatgaaacactcacaaaacttagaactgaacaaaatgaaagacagaaggtagctggtgatttgcataaggctcaacagtcactggagcttatccagtcaaaaatagtaaaagctgctggagacactactgttattgaaaatagtgatgtttccccagaaacggagtcttctgagaaggagacaatgtctgtaagtctaaatcagactgtaacacagttacagcagttgcttcaggcggtaaaccaacagctcacaaaggagaaagagcactaccaggtgttagagtgaagtaattgggaaactgttcatttgaggataaaaaaggcattgtctccttctcagaagatccgtttctggggaacatcactattttcagtaacagtagtgtctccagcagctttgtcgacggctggggaatttagtagtagtaggc

SEQ ID NO: 442229 - DNA, 1281 bp, Homo sapiens
cacgtcgtatataggtagatcgaccatctctgcctatactagtaccatttccaaaggtgtctgtcccttctaatatgagttatggtgaatggttgcatggatttgaaaaaaaggcaaaagaatgtatggctggaacttcagggtcagaggaggttaaggttctagagcacaagttgaaagaagctgatgaaatgcacacattgttacagctagagtgtgaaaaatacaaatccgtccttgcagaaacagaaggaattttacagaagctacagagaagtgttgagcaagaagaaaataaatggaaagttaaggtcgatgaatcacacaagactattaaacagatgcagtcatcatttacatcttcagaacaagagctagagcgattaagaagcgaaaataaggatattgaaaatctgagaagagaacgagaacatttggaaatggaactagaaaaggcagagatggaacgatctacctatgttacagaagtcagagagttgaaggcacagttaaatgaaacactcacaaaacttagaactgaacaaaatgaaagacagaaggtagctggtgatttgcataaggctcaacagtcactggagcttatccagtcaaaaatagtaaaagctgctggagacactactgttattgaaaatagtgatgtttccccagaaacggagtcttctgagaaggagacaatgtctgtaagtctaaatcagactgtaacacagttacagcagttgcttcaggcggtaaaccaacagctcacaaaggagaaagagcactaccaggtgttagagtgaagtaattgggaaactgttcatttgaggataaaaaaggcattgtattatattttgccaaattaaagccttatttatgttttcaccctttctactttgtcagaaacactgaacagagttttgtcttttctaatccttgttagactactgatttaaagaaggaaaaaaaaaagccaactctgtagacaccttcagagtttagttttataataaaaactgtttgaataattagacctttacattcctgaagataaacatgtaatcttttatcttattttgctcaataaaattgttcagaagatcaaagtggtaaagacaatgtaaaatttaacattttaatactgatgttgtacactgttttacttaacattttgggaagtaactgcctctgacttcaactcaagaaaacacttttttgttgctaatgtaatcggtttttgtaatggcgtcagcaaataaaaggatgcttattattcaaacttga

SEQ ID NO: 442230 - DNA, 4023 bp, Homo sapiens
cgccccgaagccgcccgtttcctgccgagcggcgcgacggcacctgagcgactgcggcggcggcggcggcggcggcggcgcctcggagcgggcggcccgggctgtagtgccggcgccgccgcgtcttcccggtctcctttcccggccgcacagggttttataggatcacattgacaaaagtaccatggagttttatgagtcagcatattttattgttcttattccttcaatagttattacagtaattttcctcttcttctggcttttcatgaaagaaacattatatgatgaagttcttgcaaaacagaaaagagaacaaaagcttattcctaccaaaacagataaaaagaaagcagaaaagaaaaagaataaaaagaaagaaatccagaatggaaacctccatgaatccgactctgagagtgtacctcgagactttaaattatcagatgctttggcagtagaagatgatcaagttgcacctgttccattgaatgtcgttgaaacttcaagtagtgttagggaaagaaaaaagaaggaaaagaaacaaaagcctgtgcttgaagagcaggtcatcaaagaaagtgacgcatcaaagattcctggcaaaaaagtagaacctgtcccagttactaaacagcccacccctccctctgaagcagctgcctcgaagaagaaaccagggcagaagaagtctaaaaatggaagcgatgaccaggataaaaaggtggaaactctcatggtaccatcaaaaaggcaagaagcattgcccctccaccaagagactaaacaagaaagtggatcagggaagaagaaagcttcatcaaagaaacaaaagacagaaaatgtcttcgtagatgaaccccttattcatgcaactacttatattcctttgatggataatgctgactcaagtcctgtggtagataagagagaggttattgatttgcttaaacctgaccaagtagaagggatccagaaatctgggactaaaaaactgaagaccgaaactgacaaagaaaatgctgaagtgaagtttaaagattttcttctgtccttgaagactatgatgttttctgaagatgaggctctttgtgttgtagacttgctaaaggagaagtctggtgtaatacaagatgctttaaagaagtcaagtaagggagaattgactacgcttatacatcagcttcaagaaaaggacaagttactcgctgctgtgaaggaagatgctgctgctacaaaggatcggtgtaagcagttaacccaggaaatgatgacagagaaagaaagaagcaatgtggttataacaaggatgaaagatcgaattggaacattagaaaaggaacataatgtatttcaaaacaaaatacatgtcagttatcaagagactcaacagatgcagatgaagtttcagcaagttcgtgagcagatggaggcagagatagctcacttgaagcaggaaaatggtatactgagagatgcagtcagcaacactacaaatcaactggaaagcaagcagtctgcagaactaaataaactacgccaggattatgctaggttggtgaatgagctgactgagaaaacaggaaagctacagcaagaggaagtccaaaagaagaatgctgagcaagcagctactcagttgaaggttcaactacaagaagctgagagaaggtgggaagaagttcagagctacatcaggaagagaacagcggaacatgaggcagcacagcaagatttacagagtaaatttgtggccaaagaaaatgaagtacagagtctgcatagtaagcttacagataccttggtatcaaaacaacagttggagcaaagactaatgcagttaatggaatcagagcagaaaagggtgaacaaagaagagtctctacaaatgcaggttcaggatattttggagcagaatgaggctttgaaagctcaaattcagcagttccattcccagatagcagcccagacctccgcttcagttctagcagaagaattacataaagtgattgcagaaaaggataagcagataaaacagactgaagattctttagcaagtgaacgtgatcgtttaacaagtaaagaagaggaacttaaggatatacagaatatgaatttcttattaaaagctgaagtgcagaaattacaggccctggcaaatgagcaggctgctgctgcacatgaattggagaagatgcaacaaagtgtttatgttaaagatgataaaataagattgctggaagagcaactacaacatgaaatttcaaacaaaatggaagaatttaagattctaaatgaccaaaacaaagcattaaaatcagaagttcagaagctacagactcttgtttctgaacagcctaataaggatgttgtggaacaaatggaaaaatgcattcaagaaaaagatgagaagttaaagactgtggaagaattacttgaaactggacttattcaggtggcaactaaagaagaggagctgaatgcaataagaacagaaaattcatctctgacaaaagaagttcaagacttaaaagctaagcaaaatgatcaggtttcttttgcctctctagttgaagaacttaagaaagtgatccatgagaaagatggaaagatcaagtctgtagaagagcttctggaggcagaacttctcaaagttgctaacaaggagaaaactgttcaggatttgaaacaggaaataaaggctctaaaagaagaaataggaaatgtccagcttgaaaaggctcaacagttatctatcacttccaaagttcaggagcttcagaacttattaaaaggaaaagaggaacagatgaataccatgaaggctgttttggaagagaaagagaaagacctagccaatacagggaagtggttacaggatcttcaagaagaaaatgaatctttaaaagcacatgttcaggaagtagcacaacataacttgaaagaggcctcttctgcatcacagtttgaagaacttgagattgtgttgaaagaaaaggaaaatgaattgaagaggttagaagccatgctaaaagagagggagagtgatctttctagcaaaacacagctgttacaggatgtacaagatgaaaacaaattgtttaagtcccaaattgagcagcttaaacaacaaaactaccaacaggcatcttcttttccccctcatgaagaattattaaaagtaatttcagaaagagagaaagaaataagtggtctctggaatgagttagattctttgaaggatgcagttgaacaccagaggaagaaaaacaatgaaaggcagcaacaggtggaagctgttgagttggaggctaaagaagttctcaaaaaattatttccaaaggtgtctgtcccttctaatttgagttatggtgaatggttgcatggatttgaaaaaaaggcaaaagaatgtatggctggaacttcagggtcagaggaggttaaggttctagagcacaagttgaaagaagctgatgaaatgcacacattgttacagctagagtgtgaaaaatacaaatccgtccttgcagaaacagaaggaattttacagaagctacagagaagtgttgagcaagaagaaaataaatggaaagttaaggtcgatgaatcacacaagactattaaacagatgcagtcatcatttacatcttcagaacaagagctagagcgattaagaagcgaaaataaggatattgaaaatctgagaagagaacgagaacatttggaaatggaactagaaaaggcagagatggaacgatctacctatgttacagaagtcagagagctgaaagatctgttgactgaattgcagaaaaaacttgatgattcatattctgaagcagtaagacagaatgaagagctaaatttgttgaaggcacagttaaatgaaacactcacaaaacttagaactgaacaaaatgaaagacagaaggtagctggtgatttgcataaggctcacagtcactggagctatccgtcaaaatgttaagtgtgggacctctgtttggaatgggggtccccaaa

SEQ ID NO: 442231 - DNA, 3569 bp, Homo sapiens
cgccccgaagccgcccgtttcctgccgagcggcgcgacggcacctgagcgactgcggcggcggcggcggcggcggcggcgcctcggagcgggcggcccgggctgtagtgccggcgccgccgcgtcttcccggtctcctttcccggccgcacagggttttataggatcacattgacaaaagtaccatggagttttatgagtcagcatattttattgttcttattccttcaatagttattacagtaattttcctcttcttctggcttttcatgaaagaaacattatatgatgaagttcttgcaaaacagaaaagagaacaaaagcttattcctaccaaaacagataaaaagaaagcagaaaagaaaaagaataaaaagaaagaaatccagaatggaaacctccatgaatccgactctgagagtgtacctcgagactttaaattatcagatgctttggcagtagaagatgatcaagttgcacctgttccattgaatgtcgttgaaacttcaagtagtgttagggaaagaaaaaagaaggaaaagaaacaaaagcctgtgcttgaagagcaggtcatcaaagaaagtgacgcatcaaagattcctggcaaaaaagtagaacctgtcccagttactaaacagcccacccctccctctgaagcagctgcctcgaagaagaaaccagggcagaagaagtctaaaaatggaagcgatgaccaggataaaaaggtggaaactctcatggtaccatcaaaaaggcaagaagcattgcccctccaccaagagactaaacaagaaagtggatcagggaagaagaaagcttcatcaaagaaacaaaagacagaaaatgtcttcgtagatgaaccccttattcatgcaactacttatattcctttgatggataatgctgactcaagtcctgtggtagataagagagaggttattgatttgcttaaacctgaccaagtagaagggatccagaaatctgggactaaaaaactgaagaccgaaactgacaaagaaaatgctgaagtgaagtttaaagattttcttctgtccttgaagactatgatgttttctgaagatgaggctctttgtgttgtagacttgctaaaggagaagtctggtgtaatacaagatgctttaaagaagtcaagtaagggagaattgactacgcttatacatcagcttcaagaaaaggacaagttactcgctgctgtgaaggaagatgctgctgctacaaaggatcggtgtaagcagttaacccaggaaatgatgacagagaaagaaagaagcaatgtggttataacaaggatgaaagatcgaattggaacattagaaaaggaacataatgtatttcaaaacaaaatacatgtcagttatcaagagactcaacagatgcagatgaagtttcagcaagttcgtgagcagatggaggcagagatagctcacttgaagcaggaaaatggtatactgagagatgcagtcagcaacactacaaatcaactggaaagcaagcagtctgcagaactaaataaactacgccaggattatgctaggttggtgaatgagctgactgagaaaacaggaaagctacagcaagaggaagtccaaaagaagaatgctgagcaagcagctactcagttgaaggttcaactacaagaagctgagagaaggtgggaagaagttcagagctacatcaggaagagaacagcggaacatgaggcagcacagcaagatttacagagtaaatttgtggccaaagaaaatgaagtacagagtctgcatagtaagcttacagataccttggtatcaaaacaacagttggagcaaagactaatgcagttaatggaatcagagcagaaaagggtgaacaaagaagagtctctacaaatgcaggttcaggatattttggagcagaatgaggctttgaaagctcaaattcagcagttccattcccagatagcagcccagacctccgcttcagttctagcagaagaattacataaagtgattgcagaaaaggataagcagataaaacagactgaagattctttagcaagtgaacgtgatcgtttaacaagtaaagaagaggaacttaaggatatacagaatatgaatttcttattaaaagctgaagtgcagaaattacaggccctggcaaatgagcaggctgctgctgcacatgaattggagaagatgcaacaaagtgtttatgttaaagatgataaaataagattgctggaagagcaactacaacatgaaatttcaaacaaaatggaagaatttaagattctaaatgaccaaaacaaagcattaaaatcagaagttcagaagctacagactcttgtttctgaacagcctaataaggatgttgtggaacaaatggaaaaatgcattcaagaaaaagatgagaagttaaagactgtggaagaattacttgaaactggacttattcaggtggcaactaaagaagaggagctgaatgcaataagaacagaaaattcatctctgacaaaagaagttcaagacttaaaagctaagcaaaatgatcaggtttcttttgcctctctagttgaagaacttaagaaagtgatccatgagaaagatggaaagatcaagtctgtagaagagcttctggaggcagaacttctcaaagttgctaacaaggagaaaactgttcaggatttgaaacaggaaataaaggctctaaaagaagaaataggaaatgtccagcttgaaaaggctcaacagttatctatcacttccaaagttcaggagcttcagaacttattaaaaggaaaagaggaacagatgaataccatgaaggctgttttggaagagaaagagaaagacctagccaatacagggaagtggttacaggatcttcaagaagaaaatgaatctttaaaagcacatgttcaggaagtagcacaacataacttgaaagaggcctcttctgcatcacagtttgaagaacttgagattgtgttgaaagaaaaggaaaatgaattgaagaggttagaagccatgctaaaagagagggagagtgatctttctagcaaaacacagctgttacaggatgtacaagatgaaaacaaattgtttaagtcccaaattgagcagcttaaacaacaaaactaccaacaggcatcttcttttccccctcatgaagaattattaaaagtaatttcagaaagagagaaagaaataagtggtctctggaatgagttagattctttgaaggatgcagttgaacaccagaggaagaaaaacaatgagggcatggtaatgcagcagcagcagcagcgctggagacattgaacccgtgtgaaaagagccaggacactggaggccagcagatagcagtgtcagtctttccttctagttttgccacttcgttttctgtgtatacttggctcagtttcctaacttacttgagctgtggtttccctatctatagaatgggaataaatacctcatggggttgttgtaacggtgagaatttgtgaactgccaagtacagtggttggcatatattaagtaataaatggtgattattggctttttaaat

SEQ ID NO: 442232 - DNA, 2768 bp, Homo sapiens
cgccccgaagccgcccgtttcctgccgagcggcgcgacggcacctgagcgactgcggcggcggcggcggcggcggcggcgcctcggagcgggcggcccgggctgtagtgccggcgccgccgcgtcttcccggtctcctttcccggccgcacagggttttataggatcacattgacaaaagtaccatggagttttatgagtcagcatattttattgttcttattccttcaatagttattacagtaattttcctcttcttctggcttttcatgaaagaaacattatatgatgaagttcttgcaaaacagaaaagagaacaaaagcttattcctaccaaaacagataaaaagaaagcagaaaagaaaaagaataaaaagaaagaaatccagaatggaaacctccatgaatccgactctgagagtgtacctcgagactttaaattatcagatgctttggcagtagaagatgatcaagttgcacctgttccattgaatgtcgttgaaacttcaagtagtgttagggaaagaaaaaagaaggaaaagaaacaaaagcctgtgcttgaagagcaggtcatcaaagaaagtgacgcatcaaagattcctggcaaaaaagtagaacctgtcccagttactaaacagcccacccctccctctgaagcagctgcctcgaagaagaaaccagggcagaagaagtctaaaaatggaagcgatgaccaggataaaaaggtggaaactctcatggtaccatcaaaaaggcaagaagcattgcccctccaccaagagactaaacaagaaagtggatcagggaagaagaaagcttcatcaaagaaacaaaagacagaaaatgtcttcgtagatgaaccccttattcatgcaactacttatattcctttgatggataatgctgactcaagtcctgtggtagataagagagaggttattgatttgcttaaacctgaccaagtagaagggatccagaaatctgggactaaaaaactgaagaccgaaactgacaaagaaaatgctgaagtgaagtttaaagattttcttctgtccttgaagactatgatgttttctgaagatgaggctctttgtgttgtagacttgctaaaggagaagtctggtgtaatacaagatgctttaaagaagtcaagtaagggagaattgactacgcttatacatcagcttcaagaaaaggacaagttactcgctgctgtgaaggaagatgctgctgctacaaaggatcggtgtaagcagttaacccaggaaatgatgacagagaaagaaagaagcaatgtggttataacaaggatgaaagatcgaattggaacattagaaaaggaacataatgtatttcaaaacaaaatacatgtcagttatcaagagactcaacagatgcagatgaagtttcagcaagttcgtgagcagatggaggcagagatagctcacttgaagcaggaaaatggtatactgagagatgcagtcagcaacactacaaatcaactggaaagcaagcagtctgcagaactaaataaactacgccaggattatgctaggttggtgaatgagctgactgagaaaacaggaaagctacagcaagaggaagtccaaaagaagaatgctgagcaagcagctactcagttgaaggttcaactacaagaagctgagagaaggtgggaagaagttcagagctacatcaggaagagaacagcggaacatgaggcagcacagcaagatttacagagtaaatttgtggccaaagaaaatgaagtacagagtctgcatagtaagcttacagataccttggtatcaaaacaacagttggagcaaagactaatgcagttaatggaatcagagcagaaaagggtgaacaaagaagagtctctacaaatgcaggttcaggatattttggagcagaatgaggctttgaaagctcaaattcagcagttccattcccagatagcagcccagacctccgcttcagttctagcagaagaattacataaagtgattgcagaaaaggataagcagataaaacagactgaagattctttagcaagtgaacgtgatcgtttaacaagtaaagaagaggaacttaaggatatacagaatatgaatttcttattaaaagctgaagtgcagaaattacaggccctggcaaatgagcaggctgctgctgcacatgaattggagaagatgcaacaaagtgtttatgttaaagatgataaaataagattgctggaagagcaactacaacatgaaatttcaaacaaaatggaagaatttaagattctaaatgaccaaaacaaagcattaaaatcagaagttcagaagctacagactcttgtttctgaacagcctaataaggatgttgtggaacaaatggaaaaatgcattcaagaaaaagatgagaagttaaagactgtggaagaattacttgaaactggacttattcaggtggcaactaaagaagaggagctgaatgcaataagaacagaaaattcatctctgacaaaagaagttcaagacttaaaagctaagcaaaatgatcaggtttcttttgcctctctagttgaagaacttaagaaagtgtaagtgataacattattataaactggtttttcttctttggtccattttttttttgtgtgtgcttagaaatctagttttattgtgcagttgggacagctgatgtatgtttaactttcactctataatttttcttaatggaataagagaacttagctgtgctttcccaaattcagtataa

SEQ ID NO: 442233 - DNA, 2436 bp, Homo sapiens
  misc_feature (2392)..(2392): n is a, c, g, or t
  misc_feature (2394)..(2394): n is a, c, g, or t
  misc_feature (2402)..(2402): n is a, c, g, or t
  misc_feature (2414)..(2414): n is a, c, g, or t
cgccccgaagccgcccgtttcctgccgagcggcgcgacggcacctgagcgactgcggcggcggcggcggcggcggcggcgcctcggagcgggcggcccgggctgtagtgccggcgccgccgcgtcttcccggtctcctttcccggccgcacagggttttataggatcacattgacaaaagtaccatggagttttatgagtcagcatattttattgttcttattccttcaatagttattacagtaattttcctcttcttctggcttttcatgaaagaaacattatatgatgaagttcttgcaaaacagaaaagagaacaaaagcttattcctaccaaaacagataaaaagaaagcagaaaagaaaaagaataaaaagaaagaaatccagaatggaaacctccatgaatccgactctgagagtgtacctcgagactttaaattatcagatgctttggcagtagaagatgatcaagttgcacctgttccattgaatgtcgttgaaacttcaagtagtgttagggaaagaaaaaagaaggaaaagaaacaaaagcctgtgcttgaagagcaggtcatcaaagaaagtgacgcatcaaagattcctggcaaaaaagtagaacctgtcccagttactaaacagcccacccctccctctgaagcagctgcctcgaagaagaaaccagggcagaagaagtctaaaaatggaagcgatgaccaggataaaaaggtggaaactctcatggtaccatcaaaaaggcaagaagcattgcccctccaccaagagactaaacaagaaagtggatcagggaagaagaaagcttcatcaaagaaacaaaagacagaaaatgtcttcgtagatgaaccccttattcatgcaactacttatattcctttgatggataatgctgactcaagtcctgtggtagataagagagaggttattgatttgcttaaacctgaccaagtagaagggatccagaaatctgggactaaaaaactgaagaccgaaactgacaaagaaaatgctgaagtgaagtttaaagattttcttctgtccttgaagactatgatgttttctgaagatgaggctctttgtgttgtagacttgctaaaggagaagtctggtgtaatacaagatgctttaaagaagtcaagtaagggagaattgactacgcttatacatcagcttcaagaaaaggacaagttactcgctgctgtgaaggaagatgctgctgctacaaaggatcggtgtaagcagttaacccaggaaatgatgacagagaaagaaagaagcaatgtggttataacaaggatgaaagatcgaattggaacattagaaaaggaacataatgtatttcaaaacaaaatacatgtcagttatcaagagactcaacagatgcagatgaagtttcagcaagttcgtgagcagatggaggcagagatagctcacttgaagcaggaaaatggtatactgagagatgcagtcagcaacactacaaatcaactggaaagcaagcagtctgcagaactaaataaactacgccaggattatgctaggttggtgaatgagctgactgagaaaacaggaaagctacagcaagaggaagtccaaaagaagaatgctgagcaagcagctactcagttgaaggttcaactacaagaagctgagagaaggtgggaagaagttcagagctacatcaggaagagaacagcggaacatgaggcagcacagcaagatttacagagtaaatttgtggccaaagaaaatgaagtacagagtctgcatagtaagcttacagataccttggtatcaaaacaacagttggagcaaagactaatgcagttaatggaatcagagcagaaaagggtgaacaaagaagagtctctacaaatgcaggttcaggatattttggagcagaatgaggctttgaaagctcaaattcagcagttccattcccagatagcagcccagacctccgcttcagttctagcagaagaattacataaagtgattgcagaaaaggataagcagataaaacagactgaagattctttagcaagtgaacgtgatcgtttaacaagtaaagaagaggaacttaaggatatacagaatatgaatttcttattaaaagctgaagtgcagaaattacaggccctggcaaatgagcaggctgctgctgcacatgaattggagaagatgcaacaaagtgtttatgttaaagatgataaaataagattgctggaagagcaactacaacatgaaatttcaaacaaaatggaagaatttaagattctaaatgaccaaaacaaagcattaaaatcagaagttcagaagctacagactcttgtttctgaacagcctaataaggatgttgtggacaaatggaaaatgcantnaagaaaangatggtctgtantactgcttagggtcctctaggc

SEQ ID NO: 442234 - DNA, 2019 bp, Homo sapiens
cgccccgaagccgcccgtttcctgccgagcggcgcgacggcacctgagcgactgcggcggcggcggcggcggcggcggcgcctcggagcgggcggcccgggctgtagtgccggcgccgccgcgtcttcccggtctcctttcccggccgcacagggttttataggatcacattgacaaaagtaccatggagttttatgagtcagcatattttattgttcttattccttcaatagttattacagtaattttcctcttcttctggcttttcatgaaagaaacattatatgatgaagttcttgcaaaacagaaaagagaacaaaagcttattcctaccaaaacagataaaaagaaagcagaaaagaaaaagaataaaaagaaagaaatccagaatggaaacctccatgaatccgactctgagagtgtacctcgagactttaaattatcagatgctttggcagtagaagatgatcaagttgcacctgttccattgaatgtcgttgaaacttcaagtagtgttagggaaagaaaaaagaaggaaaagaaacaaaagcctgtgcttgaagagcaggtcatcaaagaaagtgacgcatcaaagattcctggcaaaaaagtagaacctgtcccagttactaaacagcccacccctccctctgaagcagctgcctcgaagaagaaaccagggcagaagaagtctaaaaatggaagcgatgaccaggataaaaaggtggaaactctcatggtaccatcaaaaaggcaagaagcattgcccctccaccaagagactaaacaagaaagtggatcagggaagaagaaagcttcatcaaagaaacaaaagacagaaaatgtcttcgtagatgaaccccttattcatgcaactacttatattcctttgatggataatgctgactcaagtcctgtggtagataagagagaggttattgatttgcttaaacctgaccaagtagaagggatccagaaatctgggactaaaaaactgaagaccgaaactgacaaagaaaatgctgaagtgaagtttaaagattttcttctgtccttgaagactatgatgttttctgaagatgaggctctttgtgttgtagacttgctaaaggagaagtctggtgtaatacaagatgctttaaagaagtcaagtaagggagaattgactacgcttatacatcagcttcaagaaaaggacaagttactcgctgctgtgaaggaagatgctgctgctacaaaggatcggtgtaagcagttaacccaggaaatgatgacagagaaagaaagaagcaatgtggttataacaaggatgaaagatcgaattggaacattagaaaaggaacataatgtatttcaaaacaaaatacatgtcagttatcaagagactcaacagatgcagatgaagtttcagcaagttcgtgagcagatggaggcagagatagctcacttgaagcaggaaaatggtatactgagagatgcagtcagcaacactacaaatcaactggaaagcaagcagtctgcagaactaaataaactacgccaggattatgctaggttggtgaatgagctgactgagaaaacaggaaagctacagcaagaggaagtccaaaagaagaatgctgagcaagcagctactcagttgaaggttcaactacaagaagctgagagaaggtgggaagaagttcagagctacatcaggaagagaacagcggaacatgaggcagcacagcaagatttacagagtaaatttgtggccaaagaaaatgaagtacagagtctgcatagtaagcttacagataccttggtatcaaaacaacagttggagcaaagactaatgcagttaatggaatcagagcagaaaagggtgaacaaagaagagtctctacaaatgcaggttcaggatattttggagcagaatgagggaaggctggagaggatttgaaaagggcaataaagagagacacatgggcagaccaagagaccgcctgactcctgaagctctcccttcacctatcttga

SEQ ID NO: 442235 - DNA, 1548 bp, Homo sapiens
cgccccgaagccgcccgtttcctgccgagcggcgcgacggcacctgagcgactgcggcggcggcggcggcggcggcggcgcctcggagcgggcggcccgggctgtagtgccggcgccgccgcgtcttcccggtctcctttcccggccgcacagggttttataggatcacattgacaaaagtaccatggagttttatgagtcagcatattttattgttcttattccttcaatagttattacagtaattttcctcttcttctggcttttcatgaaagaaacattatatgatgaagttcttgcaaaacagaaaagagaacaaaagcttattcctaccaaaacagataaaaagaaagcagaaaagaaaaagaataaaaagaaagaaatccagaatggaaacctccatgaatccgactctgagagtgtacctcgagactttaaattatcagatgctttggcagtagaagatgatcaagttgcacctgttccattgaatgtcgttgaaacttcaagtagtgttagggaaagaaaaaagaaggaaaagaaacaaaagcctgtgcttgaagagcaggtcatcaaagaaagtgacgcatcaaagattcctggcaaaaaagtagaacctgtcccagttactaaacagcccacccctccctctgaagcagctgcctcgaagaagaaaccagggcagaagaagtctaaaaatggaagcgatgaccaggataaaaaggtggaaactctcatggtaccatcaaaaaggcaagaagcattgcccctccaccaagagactaaacaagaaagtggatcagggaagaagaaagcttcatcaaagaaacaaaagacagaaaatgtcttcgtagatgaaccccttattcatgcaactacttatattcctttgatggataatgctgactcaagtcctgtggtagataagagagaggttattgatttgcttaaacctgaccaagtagaagggatccagaaatctgggactaaaaaactgaagaccgaaactgacaaagaaaatgctgaagtgaagtttaaagattttcttctgtccttgaagactatgatgttttctgaagatgaggctctttgtgttgtagacttgctaaaggagaagtctggtgtaatacaagatgctttaaagaagtcaagtaagggagaattgactacgcttatacatcagcttcaagaaaaggacaagttactcgctgctgtgaaggaagatgctgctgctacaaaggatcggtgtaagcagttaacccaggaaatgatgacagagaaagaaagaagcaatgtggttataacaaggatgaaagatcgaattggaacattagaaaaggaacaaaagcttattcctaccaaaacagataaaaagaaagcagaaaagaaaaagaataaaaagaaagaaatccagaatggaaacctccatgaatccgactctgagagtgtacctcgagactttaaattatcagatgctttggcagtagaagatgatcaagttgcacctgttccattgaatgtcgttgaaacttcaagtagtgttaggga

SEQ ID NO: 442236 - DNA, 1521 bp, Homo sapiens
agcgcgagcgcgcgcccgcgttctcctggcgggcttggtatttggcgcctgcgcgctgagtgcgtgccgctccgccgaccgaagaggctggacatgacaccagtggcatatcacggccatggggtctcagcattccgctgctgctcgcccctcctcctgcaggcgaaagcaagaagatgacagggacggtttgctggctgaacgagagcaggaagaagccattgctcagttcccatatgtggaattcaccgggagagatagcatcacctgtctcacgtgccaggggacaggctacattccaacagagcaagtaaatgagttggtggctttgatcccacacagtgatcagagattgcgccctcagcgaactaagcaatatgtcctcctgtccatcctgctttgtctcctggcatctggtttggtggttttcttcctgtttccgcattcagtccttgtggatgatgacggcatcaaagtggtgaaagtcacatttaataagcaagactcccttgtaattctcaccatcatggccaccctgaaaatcaggaactccaacttctacacggtggcagtgaccagcctgtccagccagattcagtacatgaacacagtggtcagtacatatgtgactactaacgtctcccttattccacctcggagtgagcaactggtgaattttaccgggaaggccgagatgggaggaccgttttcctatgtgtacttcttctgcacggtacctgagatcctggtgcacaacatagtgatcttcatgcgaacttcagtgaagatttcatacattggcctcatgacccagagctccttggagacacatcactatgtggattgtggaggaaattccacagctatttaacaactgctattggttcttccacacagcgcctgtagaagagagcacagcatatgttcccaaggcctgagttctggacctacccccacgtggtgtaagcagaggaggaattggttcacttaactcccagcaaacatcctcctgccacttaggaggaaacacctccctatggtaccatttatgtttctcagaaccagcagaatcagtgcctagcctgtgcccagcaaatagttggcactcaataaagatttgcagaatttaatacagatcttttcagctgttcttagggcattataaatggaaatcataacgtggttctaggttatcaaaccatggagtgatgtggagctaggattgtgagtgacctgcaggccattatcagtgcctcatctgtgcagaagtcgcagcagagagggaccatccaaatacctaagagaaaacagacctagtcaggatatgaatttgtttcagctgttcccaaaggcctgggagctttttgaaaagaaagaaaaaagtgtgttggcttttttttttttttagaaagttagaattgtttttaccaagagtctatgtggggcttgattcacccttcatccattggctggaacatggattggggatttgatagaaaaataaaccctgcttttgattca

SEQ ID NO: 442237 - DNA, 357 bp, Homo sapiens
ctgcacagatgaggcactgataatggcctgcaggtcactcatctgcacagatgaggcactgataatgacctgcaggccattatcagtgcctcatctgtgcagaagtcgcagcagagagggaccatccaaatacctaagagaaaacagacctagtcaggatatgaatttgtttcagctgttcccaaaggcctgggagctttttgaaaagaaagaaaaaagtgtgttggcttttttttttttttagaaagttagaattgtttttaccaagagtctatgtggggcttgattcacccttcatccattggctggaacatggattggggatttgatagaaaaataaaccctgcttttgattca

SEQ ID NO: 442238 - DNA, 1570 bp, Homo sapiens
agcgcgagcgcgcgcccgcgttctcctggcgggcttggtatttggcgcctgcgcgctgagtgcgtgccgctccgccgaccgaagaggctggacatgacaccagtggcatatcacggccatggggtctcagcattccgctgctgctcgcccctcctcctgcaggcgaaagcaagaagatgacagggacggtttgctggctgaacgagagcaggaagaagccattgctcagttcccatatgtggaattcaccgggagagatagcatcacctgtctcacgtgccaggggacaggctacattccaacagagcaagtaaatgagttggtggctttgatcccacacagtgatcagagattgcgccctcagcgaactaagcaatatgtcctcctgtccatcctgctttgtctcctggcatctggtttggtggttttcttcctgtttccgcattcagtccttgtggatgatgacggcatcaaagtggtgaaagtcacatttaataagcaagactcccttgtaattctcaccatcatggccaccctgaaaatcaggaactccaacttctacacggtggcagtgaccagcctgtccagccagattcagtacatgaacacagtggtcagtacatatgtgactactaacgtctcccttattccacctcggagtgagcaactggtgaattttaccgggaaggccgagatgggaggaccgttttcctatgtgtacttcttctgcacggtacctgagatcctggtgcacaacatagtgatcttcatgcgaacttcagtgaagatttcatacattggcctcatgacccagagctccttggagacacatcactatgtggattgtggaggaaattccacagctatttaacaactgctattggttcttccacacagcgcctgtagaagagagcacagcatatgttcccaaggcctgagttctggacctacccccacgtggtgtaagcagaggaggaattggttcacttaactcccagcaaacatcctcctgccacttaggaggaaacacctccctatggtaccatttatgtttctcagaaccagcagaatcagtgcctagcctgtgcccagcaaatagttggcactcaataaagatttgcagaatttaatacagatcttttcagctgttcttagggcattataaatggaaatcataacgtggttctaggttatcaaaccatggagtgatgtggagctaggattgtgagtgacctgcaggccattatcagtgcctcatctgtgcagaagtcgcagcagagagggaccatccaaatacctaagagaaaacagacctagtcaggatatgaatttgtttcagctgttcccaaaggcctgggagctttttgaaaagaaagaaaaaagtgtgttggcttttttttttttttagaaagttagaattgtttttaccaagagtctatgtggggcttgattcacccttcatccattggctggaacatggattggggatttgatagaaaaataaaccctgcttttgattcaaaaaaaaaaaatataaaataatataataccgaaggcggccgcaagctta

SEQ ID NO: 442239 - DNA, 1592 bp, Homo sapiens
agcgcgagcgcgcgcccgcgttctcctggcgggcttggtatttggcgcctgcgcgctgagtgcgtgccgctccgccgaccgaagaggctggtaagtcctcaagctggcaggtggtcgggggagcggccggagaggagctgccgggagttcgtgccctgcaggacatgacaccagtggcatatcacggccatggggtctcagcattccgctgctgctcgcccctcctcctgcaggcgaaagcaagaagatgacagggacggtttgctggctgaacgagagcaggaagaagccattgctcagttcccatatgtggaattcaccgggagagatagcatcacctgtctcacgtgccaggggacaggctacattccaacagagcaagtaaatgagttggtggctttgatcccacacagtgatcagagattgcgccctcagcgaactaagcaatatgtcctcctgtccatcctgctttgtctcctggcatctggtttggtggttttcttcctgtttccgcattcagtccttgtggatgatgacggcatcaaagtggtgaaagtcacatttaataagcaagactcccttgtaattctcaccatcatggccaccctgaaaatcaggaactccaacttctacacggtggcagtgaccagcctgtccagccagattcagtacatgaacacagtggtcagtacatatgtgactactaacgtctcccttattccacctcggagtgagcaactggtgaattttaccgggaaggccgagatgggaggaccgttttcctatgtgtacttcttctgcacggtacctgagatcctggtgcacaacatagtgatcttcatgcgaacttcagtgaagatttcatacattggcctcatgacccagagctccttggagacacatcactatgtggattgtggaggaaattccacagctatttaacaactgctattggttcttccacacagcgcctgtagaagagagcacagcatatgttcccaaggcctgagttctggacctacccccacgtggtgtaagcagaggaggaattggttcacttaactcccagcaaacatcctcctgccacttaggaggaaacacctccctatggtaccatttatgtttctcagaaccagcagaatcagtgcctagcctgtgcccagcaaatagttggcactcaataaagatttgcagaatttaatacagatcttttcagctgttcttagggcattataaatggaaatcataacgtggttctaggttatcaaaccatggagtgatgtggagctaggattgtgagtgacctgcaggccattatcagtgcctcatctgtgcagaagtcgcagcagagagggaccatccaaatacctaagagaaaacagacctagtcaggatatgaatttgtttcagctgttcccaaaggcctgggagctttttgaaaagaaagaaaaaagtgtgttggcttttttttttttttagaaagttagaattgtttttaccaagagtctatgtggggcttgattcacccttcatccattggctggaacatggattggggatttgatagaaaaataaaccctgcttttgattca

SEQ ID NO: 442240 - DNA, 1477 bp, Homo sapiens
agcgcgagcgcgcgcccgcgttctcctggcgggcttggtatttggcgcctgcgcgctgagtgcgtgccgctccgccgaccgaagaggctggacatgacaccagtggcatatcacggccatggggtctcagcattccgctgctgctcgcccctcctcctgcaggcgaaagcaagaagatgacagggacggtttgctggctgaacgagagcaggaagaagccattgctcagttcccatatgtggaattcaccgggagagatagcatcacctgtctcacgtgccaggggacaggctacattccaacagagcaagtaaatgagttggtggctttgatcccacacagtgatcagagattgcgccctcagcgaactaagcaatatgtcctcctgtccatcctgctttgtctcctggcatctggtttggtggttttcttcctgtttccgcattcagtccttgtggatgatgacggcatcaaagtggtgaaagtcacatttaataagcaagactcccttgtaattctcaccatcatggccaccctgaaaatcaggaactccaacttctacacggtggcagtgaccagcctgtccagccagattcagtacatgaacacagtggtcagtacatatgtgactactaacgtctcccttattccacctcggagtgagcaactggtgaattttaccgggaaggccgagatgggaggaccgttttcctatgtgtacttcttctgcacggtacctgagatcctggtgcacaacatagtgatcttcatgcgaacttcagtgaagatttcatacattggcctcatgacccagagctccttggagacacatcactatgtggattgtggaggaaattccacagctatttaacaactgctattggttcttccacacagcgcctgtagaagagagcacagcatatgttcccaaggcctgagttctggacctacccccacgtggtgtaagcagaggaggaattggttcacttaactcccagcaaacatcctcctgccacttaggaggaaacacctccctatggtaccatttatgtttctcagaaccagcagaatcagtgcctagcctgtgcccagcaaatagttggcactcaataaagatttgcagaatttaatacagatcttttcagctgttcttagggcattataaatggaaatcataacgtggttctaggttatcaaaccatggagtgatgtggagctaggattgtgagtgacctgcaggccattatcagtgcctcatctgtgcagaagtcgcagcagagagggaccatccaaatacctaagagaaaacagacctagtcaggatatgaatttgtttcagctgttcccaaaggcctgggagctttttgaaaagaaagaaaaaagtgtgttggcttttttttttttttagaaagttagaattgtttttaccaagagtctatgtgggctagtactgggatcctctagaccaccgccagca

SEQ ID NO: 442241 - DNA, 1377 bp, Homo sapiens
  misc_feature (1377)..(1377): n is a, c, g, or t
agcgcgagcgcgcgcccgcgttctcctggcgggcttggtatttggcgcctgcgcgctgagtgcgtgccgctccgccgaccgaagaggctggacatgacaccagtggcatatcacggccatggggtctcagcattccgctgctgctcgcccctcctcctgcaggcgaaagcaagaagatgacagggacggtttgctggctgaacgagagcaggaagaagccattgctcagttcccatatgtggaattcaccgggagagatagcatcacctgtctcacgtgccaggggacaggctacattccaacagagcaagtaaatgagttggtggctttgatcccacacagtgatcagagattgcgccctcagcgaactaagcaatatgtcctcctgtccatcctgctttgtctcctggcatctggtttggtggttttcttcctgtttccgcattcagtccttgtggatgatgacggcatcaaagtggtgaaagtcacatttaataagcaagactcccttgtaattctcaccatcatggccaccctgaaaatcaggaactccaacttctacacggtggcagtgaccagcctgtccagccagattcagtacatgaacacagtggtcagtacatatgtgactactaacgtctcccttattccacctcggagtgagcaactggtgaattttaccgggaaggccgagatgggaggaccgttttcctatgtgtacttcttctgcacggtacctgagatcctggtgcacaacatagtgatcttcatgcgaacttcagtgaagatttcatacattggcctcatgacccagagctccttggagacacatcactatgtggattgtggaggaaattccacagctatttaacaactgctattggttcttccacacagcgcctgtagaagagagcacagcatatgttcccaaggcctgagttctggacctacccccacgtggtgtaagcagaggaggaattggttcacttaactcccagcaaacatcctcctgccacttaggaggaaacacctccctatggtaccatttatgtttctcagaaccagcagaatcagtgcctagcctgtgcccagcaaatagttggcactcaataaagatttgcagaatttaatacagatcttttcagctgttcttagggcattataaatggaaatcataacgtggttctaggttatcaaaccatggagtgatgtggagctaggattgtgagtgacctgcaggccattatcagtgcctcatctgtgcagaagtcgcagcagagagggaccatccaaatacctcacaattcaccagagctatattcaagacatgaatttgtttacacgcagttctcatcccttgggacgaggggatcactn

SEQ ID NO: 442242 - DNA, 1166 bp, Homo sapiens
atggtggaggtggaggatatgatggttaccaatgaaggaggaaatttggcggtggtaactatggtggtggttttcttcctgtttccgcattcagtccttgtggatgatgacggcatcaaagtggtgaaagtcacatttaataagcaagactcccttgtaattctcaccatcatggccaccctgaaaatcaggaactccaacttctacacggtggcagtgaccagcctgtccagccagattcagtacatgaacacagtggtcagtacatatgtgactactaacgtctcccttattccacctcggagtgagcaactggtgaattttaccgggaaggccgagatgggaggaccgttttcctatgtgtacttcttctgcacggtacctgagatcctggtgcacaacatagtgatcttcatgcgaacttcagtgaagatttcatacattggcctcatgacccagagctccttggagacacatcactatgtggattgtggaggaaattccacagctatttaacaactgctattggttcttccacacagcgcctgtagaagagagcacagcatatgttcccaaggcctgagttctggacctacccccacgtggtgtaagcagaggaggaattggttcacttaactcccagcaaacatcctcctgccacttaggaggaaacacctccctatggtaccatttatgtttctcagaaccagcagaatcagtgcctagcctgtgcccagcaaatagttggcactcaataaagatttgcagaatttaatacagatcttttcagctgttcttagggcattataaatggaaatcataacgtggttctaggttatcaaaccatggagtgatgtggagctaggattgtgagtgacctgcaggccattatcagtgcctcatctgtgcagaagtcgcagcagagagggaccatccaaatacctaagagaaaacagacctagtcaggatatgaatttgtttcagctgttcccaaaggcctgggagctttttgaaaagaaagaaaaaagtgtgttggcttttttttttttttagaaagttagaattgtttttaccaagagtctatgtggggcttgattcacccttcatccattggctggaacatggattggggatttgatagaaaaataaaccctgcttttgattca

SEQ ID NO: 442243 - DNA, 1974 bp, Homo sapiens
agcgcgagcgcgcgcccgcgttctcctggcgggcttggtatttggcgcctgcgcgctgagtgcgtgccgctccgccgaccgaagaggctggacatgacaccagtggcatatcacggccatggggtctcagcattccgctgctgctcgcccctcctcctgcaggcgaaagcaagaagatgacagggacggtttgctggctgaacgagagcaggaagaagccattgctcagttcccatatgtggaattcaccgggagagatagcatcacctgtctcacgtgccaggggacaggctacattccaacagagcaagtaaatgagttggtggctttgatcccacacagtgatcagagattgcgccctcagcgaactaagcaatatgtcctcctgtccatcctgctttgtctcctggcatctggtttggtggttttcttcctgtttccgcattcagtccttgtggatgatgacggcatcaaagtggtgaaagtcacatttaataagcaagactcccttgtaattctcaccatcatggccaccctgaaaatcaggaactccaacttctacacggtggcagtgaccagcctgtccagccagattcagtacatgaacacagtggtcagtacatatgtgactactaacgtctcccttattccacctcggagtgagcaactggtatgctgttcttttaggaatcttgccccacaggcctaagagaagagtagggggctgtaggaatgccatagctgtgtcactttcctttttgtctcctcatttctacttgtaggaactggtgatgaggaagacctgttgggccctgtaattataaataattgtgagaaaaaacagctatcatttaagcatttggggagcagaataatttgtaagagacaaagatttgctacaaaataagaagcagcagtgttacagcctgaggtccattggcctctcaaaagggaagaggttggcagtatcaattagaggctcatagactatattagggacaatctcagggaagtattttgcatgtgatggaagaatgacccaaggtctttggattgctaataataatactgttctgtgtcaagcctgcttggccacagaccaactctggtatcttattttcaggtgaattttaccgggaaggccgagatgggaggaccgttttcctatgtgtacttcttctgcacggtacctgagatcctggtgcacaacatagtgatcttcatgcgaacttcagtgaagatttcatacattggcctcatgacccagagctccttggagacacatcactatgtggattgtggaggaaattccacagctatttaacaactgctattggttcttccacacagcgcctgtagaagagagcacagcatatgttcccaaggcctgagttctggacctacccccacgtggtgtaagcagaggaggaattggttcacttaactcccagcaaacatcctcctgccacttaggaggaaacacctccctatggtaccatttatgtttctcagaaccagcagaatcagtgcctagcctgtgcccagcaaatagttggcactcaataaagatttgcagaatttaatacagatcttttcagctgttcttagggcattataaatggaaatcataacgtggttctaggttatcaaaccatggagtgatgtggagctaggattgtgagtgacctgcaggccattatcagtgcctcatctgtgcagaagtcgcagcagagagggaccatccaaatacctaagagaaaacagacctagtcaggatatgaatttgtttcagctgttcccaaaggcctgggagctttttgaaaagaaagaaaaaagtgtgttggcttttttttttttttagaaagttagaattgtttttaccaagagtctatgtggggcttgattcacccttcatccattggctggaacatggattggggatttgatagaaaaataaaccctgcttttgattca

SEQ ID NO: 442244 - DNA, 1462 bp, Homo sapiens
agcgcgagcgcgcgcccgcgttctcctggcgggcttggtatttggcgcctgcgcgctgagtgcgtgccgctccgccgaccgaagaggctggacatgacaccagtggcatatcacggccatggggtctcagcattccgctgctgctcgcccctcctcctgcaggcgaaagcaagaagatgacagggacggtttgctggctgaacgagagcaggaagaagccattgctcagttcccatatgtggaattcaccgggagagatagcatcacctgtctcacgtgccaggggacaggctacattccaacagagcaagtaaatgagttggtggctttgatcccacacagtgatcagagattgcgccctcagcgaactaagcaatatgtcctcctgtccatcctgctttgtctcctggcatctggtttggtggttttcttcctgtttccgcattcagtccttgtggatgatgacggcatcaaagtggtgaaagtcacatttaataagcaagactcccttgtaattctcaccatcatgccagattcagtacatgaacacagtggtcagtacatatgtgactactaacgtctcccttattccacctcggagtgagcaactggtgaattttaccgggaaggccgagatgggaggaccgttttcctatgtgtacttcttctgcacggtacctgagatcctggtgcacaacatagtgatcttcatgcgaacttcagtgaagatttcatacattggcctcatgacccagagctccttggagacacatcactatgtggattgtggaggaaattccacagctatttaacaactgctattggttcttccacacagcgcctgtagaagagagcacagcatatgttcccaaggcctgagttctggacctacccccacgtggtgtaagcagaggaggaattggttcacttaactcccagcaaacatcctcctgccacttaggaggaaacacctccctatggtaccatttatgtttctcagaaccagcagaatcagtgcctagcctgtgcccagcaaatagttggcactcaataaagatttgcagaatttaatacagatcttttcagctgttcttagggcattataaatggaaatcataacgtggttctaggttatcaaaccatggagtgatgtggagctaggattgtgagtgacctgcaggccattatcagtgcctcatctgtgcagaagtcgcagcagagagggaccatccaaatacctaagagaaaacagacctagtcaggatatgaatttgtttcagctgttcccaaaggcctgggagctttttgaaaagaaagaaaaaagtgtgttggcttttttttttttttagaaagttagaattgtttttaccaagagtctatgtggggcttgattcacccttcatccattggctggaacatggattggggatttgatagaaaaataaaccctgcttttgattca

SEQ ID NO: 442245 - DNA, 2069 bp, Homo sapiens
agcgcgagcgcgcgcccgcgttctcctggcgggcttggtatttggcgcctgcgcgctgagtgcgtgccgctccgccgaccgaagaggctggtaagtcctcaagctggcaggtggtcgggggagcggccggagaggagctgccgggagttcgtgccctgcaggacatgacaccagtggcatatcacggccatggggtctcagcattccgctgctgctcgcccctcctcctgcaggcgaaagcaagaagatgacagggacggtttgctggctgaacgagagcaggaagaagccattgctcagttcccatatgtggaattcaccgggagagatagcatcacctgtctcacgtgccaggggacaggctacattccaacagagcaagtaaatgagttggtggctttgatcccacacagtgatcagagattgcgccctcagcgaactaagcaatatgtcctcctgtccatcctgctttgtctcctggcatctggtttggtggttttcttcctgtttccgcattcagtccttgtggatgatgacggcatcaaagtggtgaaagtcacatttaataagcaagactcccttgtaattctcaccatcatggccaccctgaaaatcaggaactccaacttctacacggtggcagtgaccagcctgtccagccagattcagtacatgaacacagtggtcagtacatatgtgactactaacgtctcccttattccacctcggagtgagcaactggtgaattttaccgggaaggccgagatgggaggaccgttttcctatgtgtatagtaaggacactgttctctctgtgtgtgctctctactggaggaaagggattcaaagtcatactccattgattggggcctggtcctgccttagatctcagcttttggcttataggttccctggctttggatgtcttgagatttatttgaagaatgtattattattatgtgtgtatttgaagaatgtattatttgatatgtgacagaagtgctggaatttctaaaagagaacattaagccactaaaaacgttaccaagctccagcacttatgtgatgggtttgaaaaaacagaaagtggtatgacgctgtgggaggatgaaaatgacagtggcagggactgagagctgacaagccttggcagcacttaggtcggaagggggaggggggcaccccaaacaggacagtgtaactctgcactcttctactgaggctttaaaaaaaaaaaaactgactatttccatatttgctgtttggtagcttcttctgcacggtacctgagatcctggtgcacaacatagtgatcttcatgcgaacttcagtgaagatttcatacattggcctcatgacccagagctccttggagacacatcactatgtggattgtggaggaaattccacagctatttaacaactgctattggttcttccacacagcgcctgtagaagagagcacagcatatgttcccaaggcctgagttctggacctacccccacgtggtgtaagcagaggaggaattggttcacttaactcccagcaaacatcctcctgccacttaggaggaaacacctccctatggtaccatttatgtttctcagaaccagcagaatcagtgcctagcctgtgcccagcaaatagttggcactcaataaagatttgcagaatttaatacagatcttttcagctgttcttagggcattataaatggaaatcataacgtggttctaggttatcaaaccatggagtgatgtggagctaggattgtgagtgacctgcaggccattatcagtgcctcatctgtgcagaagtcgcagcagagagggaccatccaaatacctaagagaaaacagacctagtcaggatatgaatttgtttcagctgttcccaaaggcctgggagctttttgaaaagaaagaaaaaagtgtgttggcttttttttttttttagaaagttagaattgtttttaccaagagtctatgtggggcttgattcacccttcatccattggctggaacatggattggggatttgatagaaaaataaaccctgcttttgattca

SEQ ID NO: 442246 - DNA, 1245 bp, Homo sapiens
agcgcgagcgcgcgcccgcgttctcctggcgggcttggtatttggcgcctgcgcgctgagtgcgtgccgctccgccgaccgaagaggctggacatgacaccagtggcatatcacggccatggggtctcagcattccgctgctgctcgcccctcctcctgcaggcgaaagcaagaagatgacagggacggtttgctggctgaacgagagcaggaagaagccattgctcagttcccatatgtggaattcaccgggagagatagcatcacctgtctcacgtgccaggggacaggctacattccaacagagcaagtaaatgagttggtggctttgatcccacacagtgatcagagattgcgccctcagcgaactaagcaatatgtcctcctgtccatcctgctttgtctcctggcatctggtttggtggttttcttcctgtttccgcattcagtccttgtggatgatgacggcatcaaagtggtgaaagtcacatttaataagcaagactcccttgtaattctcaccatcatggccaccctgaaaatcaggaactccaacttctacacggtggcagtgaccagcctgtccagccagattcagtacatgaacacagtggtgaattttaccgggaaggccgagatgggaggaccgttttcctatgtgtattctggacctacccccacgtggtgtaagcagaggaggaattggttcacttaactcccagcaaacatcctcctgccacttaggaggaaacacctccctatggtaccatttatgtttctcagaaccagcagaatcagtgcctagcctgtgcccagcaaatagttggcactcaataaagatttgcagaatttaatacagatcttttcagctgttcttagggcattataaatggaaatcataacgtggttctaggttatcaaaccatggagtgatgtggagctaggattgtgagtgacctgcaggccattatcagtgcctcatctgtgcagaagtcgcagcagagagggaccatccaaatacctaagagaaaacagacctagtcaggatatgaatttgtttcagctgttcccaaaggcctgggagctttttgaaaagaaagaaaaaagtgtgttggcttttttttttttttagaaagttagaattgtttttaccaagagtctatgtggggcttgattcacccttcatccattggctggaacatggattggggatttgatagaaaaataaaccctgcttttgattca

SEQ ID NO: 442247 - DNA, 828 bp, Homo sapiens
gcaaaaaatttcctgggacatttttctggcttatttcatcccccaaacataattaattcttcttggttttcttttccctagaacttcagtgaagatttcatacattggcctcatgacccagagctccttggagacacatcactatgtggattgtggaggaaattccacagctatttaacaactgctattggttcttccacacagcgcctgtagaagagagcacagcatatgttcccaaggcctgagttctggacctacccccacgtggtgtaagcagaggaggaattggttcacttaactcccagcaaacatcctcctgccacttaggaggaaacacctccctatggtaccatttatgtttctcagaaccagcagaatcagtgcctagcctgtgcccagcaaatagttggcactcaataaagatttgcagaatttaatacagatcttttcagctgttcttagggcattataaatggaaatcataacgtggttctaggttatcaaaccatggagtgatgtggagctaggattgtgagtgacctgcaggccattatcagtgcctcatctgtgcagaagtcgcagcagagagggaccatccaaatacctaagagaaaacagacctagtcaggatatgaatttgtttcagctgttcccaaaggcctgggagctttttgaaaagaaagaaaaaagtgtgttggcttttttttttttttagaaagttagaattgtttttaccaagagtctatgtggggcttgattcacccttcatccattggctggaacatggattggggatttgatagaaaaataaaccctgcttttgattca

SEQ ID NO: 442248 - DNA, 663 bp, Homo sapiens
  misc_feature (2)..(2): n is a, c, g, or t
  misc_feature (13)..(13): n is a, c, g, or t
gnacgagctcgtngaattcggcagagggaagttccacgtcagtcagtctgacggtcagtggatcggtgggtttatctcaagttctggacctacccccacgtggtgtaagcagaggaggaattggttcacttaactcccagcaaacatcctcctgccacttaggaggaaacacctccctatggtaccatttatgtttctcagaaccagcagaatcagtgcctagcctgtgcccagcaaatagttggcactcaataaagatttgcagaatttaatacagatcttttcagctgttcttagggcattataaatggaaatcataacgtggttctaggttatcaaaccatggagtgatgtggagctaggattgtgagtgacctgcaggccattatcagtgcctcatctgtgcagaagtcgcagcagagagggaccatccaaatacctaagagaaaacagacctagtcaggatatgaatttgtttcagctgttcccaaaggcctgggagctttttgaaaagaaagaaaaaagtgtgttggcttttttttttttttagaaagttagaattgtttttaccaagagtctatgtggggcttgattcacccttcatccattggctggaacatggattggggatttgatagaaaaataaaccctgcttttgattca

SEQ ID NO: 442249 - DNA, 909 bp, Homo sapiens
agcgcgagcgcgcgcccgcgttctcctggcgggcttggtatttggcgcctgcgcgctgagtgcgtgccgctccgccgaccgaagaggctggacatgacaccagtggcatatcacggccatggggtctcagcattccgctgctgctcgcccctcctcctgcaggcgaaagcaagaagatgacagggacggtttgctggctgaacgagagcaggaagaagccattgctcagttcccatatgtggaattcaccgggagagatagcatcacctgtctcacgtgccaggggacaggctacattccaacagagcaagtaaatgagttggtggctttgatcccacacagtgatcagagattgcgccctcagcgaactaagcaatatgtcctcctgtccatcctgctttgtctcctggcatctggtttggtggttttcttcctgtttccgcattcagtccttgtggatgatgacggcatcaaagtggtgaaagtcacatttaataagcaagactcccttgtaattctcaccatcatggccaccctgaaaatcaggaactccaacttctacacggtggcagtgaccagcctgtccagccagattcagtacatgaacacagtggtcagtacatatgtgactactaacgtctcccttattccacctcggagtgagcaactggtgaattttaccgggaaggccgagatgggaggaccgttttcctatgtgtactttcttctcgacgggtaccctgagatcttgggcacaacatagtgatctcatgcgaactgtcgtgaacaattctacctggctcctgacccaaagtcttgggaccatccttgtgttgggggcggaattcccgttttaccaccgcttggttccacaggctgtaaaaaccgttttccagccggttggaccca

SEQ ID NO: 442250 - DNA, 655 bp, Homo sapiens
agcgcgagcgcgcgcccgcgttctcctggcgggcttggtatttggcgcctgcgcgctgagtgcgtgccgctccgccgaccgaagaggctggacatgacaccagtggcatatcacggccatggggtctcagcattccgctgctgctcgcccctcctcctgcaggcgaaagcaagaagatgacagggacggtttgctggctgaacgagagcaggaagaagccattgctcagttcccatatgtggaattcaccgggagagatagcatcacctgtctcacgtgccaggggacaggctacattccaacaggtgatcatggagggatgattccctgatgagaatcccaaggtaccctcggagttctcctgtctgcccagacaacttttcttctaggcagtaataccataatagagacagtgccctggacaggagccagctcaactgacttaatacacttgggcagttctgcaacttctcttcctctccttatttttccaaccctttcttttctttaccgccactcttgttcttttcctgaggtttggaacattcagttcgctctgtgttgtgggatttgttgacaggcacatttctttatcgctgtcacaaggattgggacagctttgcggggagtgagtgcttgaggggaacctcgtaga

SEQ ID NO: 442251 - DNA, 383 bp, Homo sapiens
caagggtcgcggctccccggcgctctctgccgccctctaccggaaccgagggagccagacagctgcgatattgggaaggcctccggagccgcgaagagcgcagcgcgagcgcgcgcccgcgttctcctggcgggcttggtatttggcgcctgcgcgctgagtgcgtgccgctccgccgaccgaagaggctggtaagtcctcaagctggcaggtggtcgggggagcggccggagaggagctgccgggagttcgtgccctgcaggtctgcgacgctggcgttcgctcctgcctgggccactttggtgggctcagagcatcgctttttgccaaggggcgtgacctgagcccgcctcctggggctggggggtggagaggaatgggaa

SEQ ID NO: 442252 - DNA, 1464 bp, Homo sapiens
agcgcgagcgcgcgcccgcgttctcctggcgggcttggtatttggcgcctgcgcgctgagtgcgtgccgctccgccgaccgaagaggctggacatgacaccagtggcatatcacggccatggggtctcagcattccgctgctgctcgcccctcctcctgcaggcgaaagcaagaagatgacagggacggtttgctggctgaacgagagcaggaagaagccattgctcagttcccatatgtggaattcaccgggagagatagcatcacctgtctcacgtgccaggggacaggctacattccaacagagcaagtaaatgagttggtggctttgatcccacacagtgatcagagattgcgccctcagcgaactaagcaatatgtcctcctgtccatcctgctttgtctcctggcatctggtttggtggttttcttcctgtttccgcattcagtccttgtggatgatgacggcatcaaagtggtgaaagtcacatttaataagcaagactcccttgtaattctcaccatcatggccaccctgaaaatcaggaactccaacttctacacggtggcagtgaccagcctgtccagccagattcagtacatgaacacagtggtgaattttaccgggaaggccgagatgggaggaccgttttcctatgtgtacttcttctgcacggtacctgagatcctggtgcacaacatagtgatcttcatgcgaacttcagtgaagatttcatacattggcctcatgacccagagctccttggagacacatcactatgtggattgtggaggaaattccacagctatttaacaactgctattggttcttccacacagcgcctgtagaagagagcacagcatatgttcccaaggcctgagttctggacctacccccacgtggtgtaagcagaggaggaattggttcacttaactcccagcaaacatcctcctgccacttaggaggaaacacctccctatggtaccatttatgtttctcagaaccagcagaatcagtgcctagcctgtgcccagcaaatagttggcactcaataaagatttgcagaatttaatacagatcttttcagctgttcttagggcattataaatggaaatcataacgtggttctaggttatcaaaccatggagtgatgtggagctaggattgtgagtgacctgcaggccattatcagtgcctcatctgtgcagaagtcgcagcagagagggaccatccaaatacctaagagaaaacagacctagtcaggatatgaatttgtttcagctgttcccaaaggcctgggagctttttgaaaagaaagaaaaaagtgtgttggcttttttttttttttagaaagttagaattgtttttaccaagagtctatgtggggcttgattcacccttcatccattggctggaacatggattggggatttgatagaaaaataaaccctgcttttgattca

SEQ ID NO: 442253 - DNA, 1535 bp, Homo sapiens
agcgcgagcgcgcgcccgcgttctcctggcgggcttggtatttggcgcctgcgcgctgagtgcgtgccgctccgccgaccgaagaggctggtaagtcctcaagctggcaggtggtcgggggagcggccggagaggagctgccgggagttcgtgccctgcaggacatgacaccagtggcatatcacggccatggggtctcagcattccgctgctgctcgcccctcctcctgcaggcgaaagcaagaagatgacagggacggtttgctggctgaacgagagcaggaagaagccattgctcagttcccatatgtggaattcaccgggagagatagcatcacctgtctcacgtgccaggggacaggctacattccaacagagcaagtaaatgagttggtggctttgatcccacacagtgatcagagattgcgccctcagcgaactaagcaatatgtcctcctgtccatcctgctttgtctcctggcatctggtttggtggttttcttcctgtttccgcattcagtccttgtggatgatgacggcatcaaagtggtgaaagtcacatttaataagcaagactcccttgtaattctcaccatcatggccaccctgaaaatcaggaactccaacttctacacggtggcagtgaccagcctgtccagccagattcagtacatgaacacagtggtgaattttaccgggaaggccgagatgggaggaccgttttcctatgtgtacttcttctgcacggtacctgagatcctggtgcacaacatagtgatcttcatgcgaacttcagtgaagatttcatacattggcctcatgacccagagctccttggagacacatcactatgtggattgtggaggaaattccacagctatttaacaactgctattggttcttccacacagcgcctgtagaagagagcacagcatatgttcccaaggcctgagttctggacctacccccacgtggtgtaagcagaggaggaattggttcacttaactcccagcaaacatcctcctgccacttaggaggaaacacctccctatggtaccatttatgtttctcagaaccagcagaatcagtgcctagcctgtgcccagcaaatagttggcactcaataaagatttgcagaatttaatacagatcttttcagctgttcttagggcattataaatggaaatcataacgtggttctaggttatcaaaccatggagtgatgtggagctaggattgtgagtgacctgcaggccattatcagtgcctcatctgtgcagaagtcgcagcagagagggaccatccaaatacctaagagaaaacagacctagtcaggatatgaatttgtttcagctgttcccaaaggcctgggagctttttgaaaagaaagaaaaaagtgtgttggcttttttttttttttagaaagttagaattgtttttaccaagagtctatgtggggcttgattcacccttcatccattggctggaacatggattggggatttgatagaaaaataaaccctgcttttgattca

SEQ ID NO: 442254 - DNA, 2014 bp, Homo sapiens
agcgcgagcgcgcgcccgcgttctcctggcgggcttggtatttggcgcctgcgcgctgagtgcgtgccgctccgccgaccgaagaggctggacatgacaccagtggcatatcacggccatggggtctcagcattccgctgctgctcgcccctcctcctgcaggcgaaagcaagaagatgacagggacggtttgctggctgaacgagagcaggaagaagccattgctcagttcccatatgtggaattcaccgggagagatagcatcacctgtctcacgtgccaggggacaggctacattccaacagagcaagtaaatgagttggtggctttgatcccacacagtgatcagagattgcgccctcagcgaacgtgagttacctgcttctcacctgttaatacctacttctgtccctaatctctttctgtatgtatgaatgccagttaattctttgaaaactacacatgttcttataagttccccattttccttataactgtttgcccaagcaagatatctctgcccccatcacaatctggggaaagaaacttgaagctggaaatgctttgaaggtcaaggaatggaatcagaagaaactgggaaagtggagtgttctgggaggtgtgggactgtctctgtccacatagctcctttcttcagcttttcttcccagagtgcaaacagtgtttaaaggagttttaaaaggtttctcctgcttcactgcttcttaactggtttatggttcctggctcttggaacttccctttcagctcccttctctttcctggttttgtgtttaatcttgacacattgaaccttgatatctgactgcctggggtcggtcatgtgctgtgtcatttgcagtaagcaatatgtcctcctgtccatcctgctttgtctcctggcatctggtttggtggttttcttcctgtttccgcattcagtccttgtggatgatgacggcatcaaagtggtgaaagtcacatttaataagcaagactcccttgtaattctcaccatcatggccaccctgaaaatcaggaactccaacttctacacggtggcagtgaccagcctgtccagccagattcagtacatgaacacagtggtcagtacatatgtgactactaacgtctcccttattccacctcggagtgagcaactggtgaattttaccgggaaggccgagatgggaggaccgttttcctatgtgtacttcttctgcacggtacctgagatcctggtgcacaacatagtgatcttcatgcgaacttcagtgaagatttcatacattggcctcatgacccagagctccttggagacacatcactatgtggattgtggaggaaattccacagctatttaacaactgctattggttcttccacacagcgcctgtagaagagagcacagcatatgttcccaaggcctgagttctggacctacccccacgtggtgtaagcagaggaggaattggttcacttaactcccagcaaacatcctcctgccacttaggaggaaacacctccctatggtaccatttatgtttctcagaaccagcagaatcagtgcctagcctgtgcccagcaaatagttggcactcaataaagatttgcagaatttaatacagatcttttcagctgttcttagggcattataaatggaaatcataacgtggttctaggttatcaaaccatggagtgatgtggagctaggattgtgagtgacctgcaggccattatcagtgcctcatctgtgcagaagtcgcagcagagagggaccatccaaatacctaagagaaaacagacctagtcaggatatgaatttgtttcagctgttcccaaaggcctgggagctttttgaaaagaaagaaaaaagtgtgttggcttttttttttttttagaaagttagaattgtttttaccaagagtctatgtggggcttgattcacccttcatccattggctggaacatggattggggatttgatagaaaaataaaccctgcttttgattca

SEQ ID NO: 442255 - DNA, 2451 bp, Homo sapiens
agcgcgagcgcgcgcccgcgttctcctggcgggcttggtatttggcgcctgcgcgctgagtgcgtgccgctccgccgaccgaagaggctggacatgacaccagtggcatatcacggccatggggtctcagcattccgctgctgctcgcccctcctcctgcaggcgaaagcaagaagatgacagggacggtttgctggctgaacgagagcaggaagaagccattgctcagttcccatatgtggaattcaccgggagagatagcatcacctgtctcacgtgccaggggacaggctacattccaacagagcaagtaaatgagttggtggctttgatcccacacagtgatcagagattgcgccctcagcgaactaagcaatatgtcctcctgtccatcctgctttgtctcctggcatctggtttggtggttttcttcctgtttccgcattcagtccttgtggatgatgacggcatcaaagtggtgaaagtcacatttaataagcaagactcccttgtaattctcaccatcatggccaccctgaaaatcaggaactccaacttctacacggtggcagtgaccagcctgtccagccagattcagtacatgaacacagtggtcagtacatatgtgactactaacgtctcccttattccacctcggagtgagcaactggtatgctgttcttttaggaatcttgccccacaggcctaagagaagagtagggggctgtaggaatgccatagctgtgtcactttcctttttgtctcctcatttctacttgtaggaactggtgatgaggaagacctgttgggccctgtaattataaataattgtgagaaaaaacagctatcatttaagcatttggggagcagaataatttgtaagagacaaagatttgctacaaaataagaagcagcagtgttacagcctgaggtccattggcctctcaaaagggaagaggttggcagtatcaattagaggctcatagactatattagggacaatctcagggaagtattttgcatgtgatggaagaatgacccaaggtctttggattgctaataataatactgttctgtgtcaagcctgcttggccacagaccaactctggtatcttattttcaggtgaattttaccgggaaggccgagatgggaggaccgttttcctatgtgtatagtaaggacactgttctctctgtgtgtgctctctactggaggaaagggattcaaagtcatactccattgattggggcctggtcctgccttagatctcagcttttggcttataggttccctggctttggatgtcttgagatttatttgaagaatgtattattattatgtgtgtatttgaagaatgtattatttgatatgtgacagaagtgctggaatttctaaaagagaacattaagccactaaaaacgttaccaagctccagcacttatgtgatgggtttgaaaaaacagaaagtggtatgacgctgtgggaggatgaaaatgacagtggcagggactgagagctgacaagccttggcagcacttaggtcggaagggggaggggggcaccccaaacaggacagtgtaactctgcactcttctactgaggctttaaaaaaaaaaaaactgactatttccatatttgctgtttggtagcttcttctgcacggtacctgagatcctggtgcacaacatagtgatcttcatgcgaacttcagtgaagatttcatacattggcctcatgacccagagctccttggagacacatcactatgtggattgtggaggaaattccacagctatttaacaactgctattggttcttccacacagcgcctgtagaagagagcacagcatatgttcccaaggcctgagttctggacctacccccacgtggtgtaagcagaggaggaattggttcacttaactcccagcaaacatcctcctgccacttaggaggaaacacctccctatggtaccatttatgtttctcagaaccagcagaatcagtgcctagcctgtgcccagcaaatagttggcactcaataaagatttgcagaatttaatacagatcttttcagctgttcttagggcattataaatggaaatcataacgtggttctaggttatcaaaccatggagtgatgtggagctaggattgtgagtgacctgcaggccattatcagtgcctcatctgtgcagaagtcgcagcagagagggaccatccaaatacctaagagaaaacagacctagtcaggatatgaatttgtttcagctgttcccaaaggcctgggagctttttgaaaagaaagaaaaaagtgtgttggcttttttttttttttagaaagttagaattgtttttaccaagagtctatgtggggcttgattcacccttcatccattggctggaacatggattggggatttgatagaaaaataaaccctgcttttgattca

SEQ ID NO: 442256 - DNA, 1533 bp, Homo sapiens
agcgcgagcgcgcgcccgcgttctcctggcgggcttggtatttggcgcctgcgcgctgagtgcgtgccgctccgccgaccgaagaggctggtaagtcctcaagctggcaggtggtcgggggagcggccggagaggagctgccgggagttcgtgccctgcaggacatgacaccagtggcatatcacggccatggggtctcagcattccgctgctgctcgcccctcctcctgcaggcgaaagcaagaagatgacagggacggtttgctggctgaacgagagcaggaagaagccattgctcagttcccatatgtggaattcaccgggagagatagcatcacctgtctcacgtgccaggggacaggctacattccaacagagcaagtaaatgagttggtggctttgatcccacacagtgatcagagattgcgccctcagcgaactaagcaatatgtcctcctgtccatcctgctttgtctcctggcatctggtttggtggttttcttcctgtttccgcattcagtccttgtggatgatgacggcatcaaagtggtgaaagtcacatttaataagcaagactcccttgtaattctcaccatcatgccagattcagtacatgaacacagtggtcagtacatatgtgactactaacgtctcccttattccacctcggagtgagcaactggtgaattttaccgggaaggccgagatgggaggaccgttttcctatgtgtacttcttctgcacggtacctgagatcctggtgcacaacatagtgatcttcatgcgaacttcagtgaagatttcatacattggcctcatgacccagagctccttggagacacatcactatgtggattgtggaggaaattccacagctatttaacaactgctattggttcttccacacagcgcctgtagaagagagcacagcatatgttcccaaggcctgagttctggacctacccccacgtggtgtaagcagaggaggaattggttcacttaactcccagcaaacatcctcctgccacttaggaggaaacacctccctatggtaccatttatgtttctcagaaccagcagaatcagtgcctagcctgtgcccagcaaatagttggcactcaataaagatttgcagaatttaatacagatcttttcagctgttcttagggcattataaatggaaatcataacgtggttctaggttatcaaaccatggagtgatgtggagctaggattgtgagtgacctgcaggccattatcagtgcctcatctgtgcagaagtcgcagcagagagggaccatccaaatacctaagagaaaacagacctagtcaggatatgaatttgtttcagctgttcccaaaggcctgggagctttttgaaaagaaagaaaaaagtgtgttggcttttttttttttttagaaagttagaattgtttttaccaagagtctatgtggggcttgattcacccttcatccattggctggaacatggattggggatttgatagaaaaataaaccctgcttttgattca

SEQ ID NO: 442257 - DNA, 1341 bp, Homo sapiens
agcgcgagcgcgcgcccgcgttctcctggcgggcttggtatttggcgcctgcgcgctgagtgcgtgccgctccgccgaccgaagaggctggacatgacaccagtggcatatcacggccatggggtctcagcattccgctgctgctcgcccctcctcctgcaggcgaaagcaagaagatgacagggacggtttgctggctgaacgagagcaggaagaagccattgctcagttcccatatgtggaattcaccgggagagatagcatcacctgtctcacgtgccaggggacaggctacattccaacagagcaagtaaatgagttggtggctttgatcccacacagtgatcagagattgcgccctcagcgaactaagcaatatgtcctcctgtccatcctgctttgtctcctggcatctggtttggtggttttcttcctgtttccgcattcagtccttgtggatgatgacggcatcaaagtggtgaaagtcacatttaataagcaagactcccttgtaattctcaccatcatggccaccctgaaaatcaggaactccaacttctacacggtggcagtgaccagcctgtccagccagattcagtacatgaacacagtggtgaattttaccgggaaggccgagatgggaggaccgttttcctatgtgtacttcttctgcacggtacctgagatcctggtgcacaacatagtgatcttcatgcgcgcctgtagaagagagcacagcatatgttcccaaggcctgagttctggacctacccccacgtggtgtaagcagaggaggaattggttcacttaactcccagcaaacatcctcctgccacttaggaggaaacacctccctatggtaccatttatgtttctcagaaccagcagaatcagtgcctagcctgtgcccagcaaatagttggcactcaataaagatttgcagaatttaatacagatcttttcagctgttcttagggcattataaatggaaatcataacgtggttctaggttatcaaaccatggagtgatgtggagctaggattgtgagtgacctgcaggccattatcagtgcctcatctgtgcagaagtcgcagcagagagggaccatccaaatacctaagagaaaacagacctagtcaggatatgaatttgtttcagctgttcccaaaggcctgggagctttttgaaaagaaagaaaaaagtgtgttggcttttttttttttttagaaagttagaattgtttttaccaagagtctatgtggggcttgattcacccttcatccattggctggaacatggattggggatttgatagaaaaataaaccctgcttttgattca

SEQ ID NO: 442258 - DNA, 1655 bp, Homo sapiens
agcgcgagcgcgcgcccgcgttctcctggcgggcttggtatttggcgcctgcgcgctgagtgcgtgccgctccgccgaccgaagaggctggacatgacaccagtggcatatcacggccatggggtctcagcattccgctgctgctcgcccctcctcctgcaggcgaaagcaagaagatgacagggacggtttgctggctgaacgagagcaggaagaagccattgctcagttcccatatgtggaattcaccgggagagatagcatcacctgtctcacgtgccaggggacaggctacattccaacagagcaagtaaatgagttggtggctttgatcccacacagtgatcagagattgcgccctcagcgaactaagcaatatgtcctcctgtccatcctgctttgtctcctggcatctggtttggtggttttcttcctgtttccgcattcagtccttgtggatgatgacggcatcaaagtggtgaaagtcacatttaataagcaagactcccttgtaattctcaccatcatggccaccctgaaaatcaggaactccaacttctacacggtggcagtgaccagcctgtccagccagattcagtacatgaacacagtggtcagtacatatgtgactactaacgtctcccttattccacctcggagtgagcaactggtgaattttaccgggaaggccgagatgggaggaccgttttcctatgtgtatagtaaggacactgttctctctgtgtgtgctctctactggaggaaagggattcaaagtcatactccattgattggggcctggtcctgccttagatctcagcttttggcttataggttccctggctttggatgtcttgagatttatttgaagaatgtattattattatgtgtgtatttgaagaatgtattatttgatatgtgacagaagtgctggaatttctaaaagagaacattaagccactaaaaacgttaccaagctccagcacttatgtgatgggtttgaaaaaacagaaagtggtatgacgctgtgggaggatgaaaatgacagtggcagggactgagagctgacaagccttggcagcacttaggtcggaagggggaggggggcaccccaaacaggacagtgtaactctgcactcttctactgaggctttaaaaaaaaaaaaactgactatttccatatttgctgtttggtagcttcttctgcacggtacctgagatcctggtgcacaacatagtgatcttcatgcggtgcgtctctcttccctatcccgatggcctgtccggccatgtgagcctaccacctttgctcaggaggcccctgtgtgaccacagggcagaggcacctagcccgaggggacaccctgtgcctcacaggcacagatacagtagacccttggtgttctctaaacacagtgtccacatgcccttcacaaatcaccagtcaccctgagcagtcaaacattttctccataaaatgggtctagtttaactaaacacttgatcccctcagaatcctaatgagacagtcatgaacagaaaagctttctcaagatgttaagtactgggcatttgaccagacttcctctctagccacacaaattaccacatgtcatggacctttagggttgttttctggaagcatggctgttaaa

SEQ ID NO: 442259 - DNA, 954 bp, Homo sapiens
agcgcgagcgcgcgcccgcgttctcctggcgggcttggtatttggcgcctgcgcgctgagtgcgtgccgctccgccgaccgaagaggctggacatgacaccagtggcatatcacggccatggggtctcagcattccgctgctgctcgcccctcctcctgcaggcgaaagcaagaagatgacagggacggtttgctggctgaacgagagcaggaagaagccattgctcagttcccatatgtggaattcaccgggagagatagcatcacctgtctcacgtgccaggggacaggctacattccaacaggtgaattttaccgggaaggccgagatgggaggaccgttttcctatgtgtacttcttctgcacggtacctgagatcctggtgcacaacatagtgatcttcatgcgaacttcagtgaagatttcatacattggcctcatgacccagagctccttggagacacatcactatgtggattgtggaggaaattccacagctatttaacaactgctattggttcttccacacagcgcctgtagaagagagcacagcatatgttcccaaggcctgagttctggacctacccccacgtggtgtaagcagaggaggaattggttcacttaactcccagcaaacatcctcctgccacttaggaggaaacacctccctatggtaccatttatgtttctcagaaccagcagaatcagtgcctagcctgtgcccagcaaatagttggcactcaataaagatttgcagaattatacgaacacaaaaaaaaaggggcgtccaaatatcccgaggccagtttagcttaccgttctggaaagggcctaaggggccgtaaagcaggcggcgcgtaaagtcgctggaactgcctggctggaggcccttcggggccactggcccccggtacgtcgataatagtggtcaccttcgtgatgtgtataaacct

SEQ ID NO: 442260 - DNA, 497 bp, Homo sapiens
caaacagtgtttaaaggagttttaaaaggtttctcctgcttcactgcttcttaactggtttatggttcctggctcttggaacttccctttcagctcccttctctttcctggttttgtgtttaatcttgacacattgaaccttgatatctgactgcctggggtcggtcatgtgctgtgtcatttgcagtaagcaatatgtcctcctgtccatcctgctttgtctcctggcatctggtttggtggttttcttcctgtttccgcattcagtccttgtggatgatgacggcatcaaagtggtgaaagtcacatttaataagcaagactcccttgtaattctcaccatcatggtaagccttagggtttcattccctgggttgtgcacctgccaggctgggacccaggacacttacacttgtttcctgacttgccctgatgtaggccaccctgaaaatcaggaactccaacttctacacggtggcagtgaccagcctgtccag

SEQ ID NO: 442261 - DNA, 3173 bp, Homo sapiens
tgatgtgatatggctgcaagtgcctttgacccttttgtctcccttccataaactgaaatacctaagctgctccaacctcctttttgtcttttgtttcataaatcctttcccattgcacatcaactcctgtctctctttgtactgtcactctcatctgttgctttccattcacactgcctttagccactcatcattttgtgcctacaccacagaaacctctgaatgtaatggatgttcctaccagaggacaagtcgtacaatggtggaggaataggttcttcaaataggatcatggacttcttggaggagccaatccctggtgtagggacctatgatgatttcaatacaattgattgggtgagagagaagtctcgagaccgggataggcaccgagagattaccaataaaagcaaagagtcaacatgggccttaattcacagtgtgagtgatgctttttccggctggttgttgatgctccttattgggcttttatcaggttcgttagctggtttgatagacatctctgctcattggatgacagacttaaaagaaggtatatgcacagggggattctggtttaaccatgaacattgttgctggaactctgagcatgtcacctttgaagagagagacaaatgtccagagtggaatagttggtcccagcttatcatcagcacagatgagggagcctttgcctacatagtcaattatttcatgtacgtcctctgggctctcctatttgccttccttgccgtatctcttgtcaaggtgtttgcgccttatgcctgtggctctggaatccctgagataaaaactatcttgagtggtttcattattaggggctatttgggtaagtggactctggttatcaaaaccatcaccttggtgctggcagtgtcgtctggcttgagcctgggcaaagagggccctctagtgcacgtggcttgctgctgtgggaacatcctgtgccactgcttcaacaaatacaggaagaatgaagccaagcgcagagaggtcttgtcggctgcagcagcagctggtgtatctgtagcctttggagcacctataggtggagtattattcagccttgaagaggtcagctactattttcccctcaaaacattgtggcgttcattctttgctgccttggtggcagcattcactctacgctccatcaatccatttgggaacagccgcctggtactattttatgtggagtttcacaccccatggcatctctttgagctcgtgccattcattctgctgggcatatttggtggtctgtggggagcactgtttatccgcacaaacattgcctggtgtcggaagcgaaagaccacccagttgggcaagtatcctgttatagaggtactcgtcgtgacagccatcactgccatcctggctttccccaatgaatacactcggatgagcacaagtgagctcatttctgagctgtttaatgactgtggccttctggactcctccaagctctgtgattatgagaaccgtttcaacacaagcaaagggggtgaactgcctgacagaccggctggcgtgggagtctacagtgcaatgtggcagctggctttaacactcatactgaaaattgtcattactatattcacctttggcatgaagatcccttctggcctctttatccctagcatggctgttggtgctatagcaggtcgacttctaggagtaggaatggaacagctggcttattaccaccaggaatggaccgtcttcaatagctggtgtagtcagggagctgattgcatcacccccggcctttatgcaatggttggggctgcagcctgcttaggtggggtgactcggatgactgtttctcttgttgtcataatgtttgaactgactggtggcttagaatacatcgtgcctctgatggctgcagccatgacaagcaagtgggtggcagatgctcttgggcgggagggcatctatgatgcccacatccgtctcaatggatacccctttcttgaagccaaagaagagtttgctcataagaccctggcaatggatgtgatgaaaccccggagaaatgatcctttgttgactgtccttactcaggacagtatgactgtggaagatgtagagaccataatcagtgaaaccacttacagtggcttcccagtggtggtatcccgggagtcccaaagacttgtgggctttgtcctccgaagagatctcattatttcaattgaaaatgctcgaaagaaacaggatggggttgttagcacttccatcatttatttcacggagcattctcctccattgccaccatacactccacccactctaaagcttcggaacatcctcgatctcagccccttcactgtgactgaccttacacccatggagatcgtagtggatattttccgaaagctgggactgcggcagtgcctggttacacacaacgggcgattgcttggaatcattaccaaaaaggatgtgttaaagcatatagcacagatggcgaaccaagatcctgattccattctcttcaactagaatcatagagttctggatgtaaagcgggaaggacattacagaccatggatatgttgtttaacggtacccaaaacacattttccatatttggatggtgaagtcacattagtgtgttgtctctttcctacaagttaaccagttgcactacataatctctggaaattaattttctctttaggagaaattatagttaggcttccatgatgttacattaggaagatatcatgaaagaataaataagattgctatggtttaattatatttgctttttaaaagatttttttaacttaaaaagtagttagccaatatgcaatcactgaaaactatgcaagagaaattccaaccgtcctgacctataacctgtaggaaaccgacgaaaaagtcactcttttgggatctaactgttgttactggaagacgaaggtaaactaaggggctttgcttttcaaaccagagaaaggaaagccagaaggaaaagagtaatggtattttctagactgtgaagattcagttcaaatgttatccttgttcctgttacaatatttagcattattagtttgttatgtgtgtatgtttatgttaattttaatttctgattataagacaatgctgctttggttaatctcttctaaaggaattta

SEQ ID NO: 442262 - DNA, 3926 bp, Homo sapiens
gtggggtggggtggggctgggggcttgtcgccctttcaggctccaccctttgcggagattataaatagtcatgatcccagcgagacccagagatgctgtaatggtgagactttggatccttcctgaggacgtggagaaaacttgctgctgagaaggacattttgaaggttttgttggctgaaaaagctgtttctggaatcacccctagatctttcttgaagacttgaattagattacagcgatggggacacagaaggtcaccccagctctgatatttgccatcacagttgctacaatcggctctttccaatttggctacaacactggggtcatcaatgctcctgagaagatcataaaggaatttatcaataaaactttgacggacaagggaaatgccccaccctctgaggtgctgctcacgtctctctggtccttgtctgtggccatattttccgtcgggggtatgatcggctccttttccgtcggactcttcgtcaaccgctttggcaggcgcaattcaatgctgattgtcaacctgttggctgtcactggtggctgctttatgggactgtgtaaagtagctaagtcggttgaaatgctgatcctgggtcgcttggttattggcctcttctgcggactctgcacaggttttgtgcccatgtacattggagagatctcgcctactgccctgcggggtgcctttggcactctcaaccagctgggcatcgttgttggaattctggtggcccagatctttggtctggaattcatccttgggtctgaagagctatggccgctgctactgggttttaccatccttcctgctatcctacaaagtgcagcccttccattttgccctgaaagtcccagatttttgctcattaacagaaaagaagaggagaatgctaagcagatcctccagcggttgtggggcacccaggatgtatcccaagacatccaggagatgaaagatgagagtgcaaggatgtcacaagaaaagcaagtcaccgtgctagagctctttagagtgtccagctaccgacagcccatcatcatttccattgtgctccagctctctcagcagctctctgggatcaatgctgtgttctattactcaacaggaatcttcaaggatgcaggtgttcaagagcccatctatgccaccatcggcgcgggtgtggttaatactatcttcactgtagtttctctatttctggtggaaagggcaggaagaaggactctgcatatgataggccttggagggatggctttttgttccacgctcatgactgtttctttgttattaaaggataactataatgggatgagctttgtctgtattggggctatcttggtctttgtagccttctttgaaattggaccaggccccattccctggtttattgtggccgaactcttcagccagggcccccgcccagctgcgatggcagtggccggctgctccaactggacctccaacttcctagtcggattgctcttcccctccgctgctcactatttaggagcctacgtttttattatcttcaccggcttcctcattaccttcttggcttttaccttcttcaaagtccctgagacccgtggcaggacttttgaggatatcacacgggcctttgaagggcaggcacacggtgcagatagatctggaaaggacggcgtcatggagatgaacagcatcgagcctgctaaggagaccaccaccaatgtctaagtcgtgcctccttccacctccctcccggcatgggaaagccacctctccctcaacaagggagagacctcatcaggatgaacccaggacgcttctgaatgctgctacttaattcctttctcatcccacgcactccatgagcaccccaaggctgcggtttgttggatcttcaatggctttttaaattttatttcctggacatcctcttctgcttaggagagaccgagtgaacctaccttcatttcaggagggattggccgcttggcacatgacaactttgccagcttttcctcccttgggttctgatattgccgcactaggggatataggagaggaaaagtaaggtgcagttcccccaacctcagacttaccaggaagcagatacatatgagtgtggaagccggagggtgtttatgtaagagcaccttcctcacttccatacagctctacgtggcaaattaacttgagttttatttattttatcctctggtttaattacataattttttttttttactttaagtttcaggatacatgtgccgaatgtgcaggtttgttacataggtatatatatgccatgatggaaatatttatttttttaagcgtaattttgccaaataataaaaacagaaggaaattgagattagagggaggtgtttaaagagaggttatagagtagaagatttgatgctggagaggttaaggtgcaataagaatttagggagaaatgttgttcattattggagggtaaatgatgtggtgcctgaggtctgtacgttacctcttaacaatttctgtccttcagatggaaactctttaacttctcgtaaaagtcatatacctatataataaagctactgatttcctttggagcttttttctttaagataatagtttacatgtagtagtacttgaaatctaggattattaactaatatgggcattgtagttaatgatggttgatgggttctaattttggatggagtccagggaagagaaagtgatttctagaaagcctgttcccctcactggatgaaataactccttcttgtagtagtctcattacttttgaagtaatcccgccacctatctcgtgggagagccatccaaataagaaacctaaaataattggttcttggtagagattcattatttttccactttgttctttaggagattttaggtgttgattttctgttgtattttaactcatacctttaaaggaattccccaaagaatgtttatagcaaacttggaatttgtaacctcagctctgggagaggatttttttctgagcgattattatctaaagtgtgttgttgctttaggctcacggcacgcttgcgtatgtctgttaccatgtcactgtggtcctatgccgaatgccctcaggggacttgaatctttccaataaaccaggtttagacagtatgagtcaatgtgcagtgtagcccacacttgagaggatgaatgtatgtgcactgtcactttgctctgggtggaagtacgttattgttgacttattttctctgtgtttgttcctacagcccctttttcatatgttgctcagtctccctttcccttcttggtgcttacacatctcagaccctttagccaaacccttgtcagtgacagtattttggttcttagttctcactgttccctctgctcctggagcctttgaataaaaatgcacgtagctgaggccggatgcggtggctcacgcctgtaatcccagcactttgggaggcctaggcgggcggtcaggggttcgagaccagtctggccaacatcgtgaaaccctgtctctactaaaaatgcaaaaattagccgggcgtggtggcgggcgcctgtaatcccagctacttgggaagctgaggcgggagaatcatgtgaacccgggacgcaggggttgcagtgagcggagatcgcatcattgcactctagcctgggccacagggcgagactccgtctcaaaaaaaaaaaaaatgcacatagctatcgagtgtgctttagcttgaaaaggtgaccttgcaacttcatgtcaacttctggctcctcaaacagtaggttggcagtaaggcagggtcccatttctcactgagaagattgtgaatatttccatatggattttctattgttactctggttctttgttttaaaataaaaattctgaatgtacacgaaaaaaaaaaat

SEQ ID NO: 442263 - DNA, 468 bp, Homo sapiens
  misc_feature (41)..(41): n is a, c, g, or t
  misc_feature (45)..(45): n is a, c, g, or t
cccaaaacattataactttttctttttttgttgagacggancacntctttgtcactcaggctggagtgcggtggcacaatcttggctcactgcaacctctacctcccaggttcaagcaattttcccacctcagctacttgggaagctgaggcgggagaatcatgtgaacccgggacgcaggggttgcagtgagcggagatcgcatcattgcactctagcctgggccacagggcgagactccgtctcaaaaaaaaaaaaaatgcacatagctatcgagtgtgctttagcttgaaaaggtgaccttgcaacttcatgtcaacttctggctcctcaaacagtaggttggcagtaaggcagggtcccatttctcactgagaagattgtgaatatttccatatggattttctattgttactctggttctttgttttaaaataaaaattctgaatgtacacgaaaaaaaaaaat

SEQ ID NO: 442264 - DNA, 312 bp, Homo sapiens
  misc_feature (52)..(52): n is a, c, g, or t
gcgtagaatcgagccggtaccttttctcccctcaaaattaccaaaccatccnaacttcagatgttcaaagatggattgcatgaccctaccatcatttagttacctttttgttgcttaattttcctttgggaaaaagagataaatttaatgttggatgtagtcttcactcttcaagcaaatatgggatggatgggaaaggagggagtatagaagggactatatagtatgctttgaacttggaattggaggaaaggtgcttggaaaaactctcaagctctgttactccactgtttttacactaaaacaacaata

SEQ ID NO: 442265 - DNA, 3789 bp, Homo sapiens
gtggggtggggtggggctgggggcttgtcgccctttcaggctccaccctttgcggagattataaatagtcatgatcccagcgagacccagagatgctgtaatggtgagactttggatccttcctgaggacgtggagaaaacttgctgctgagaaggacattttgaaggttttgttggctgaaaaagctgtttctggaatcacccctagatctttcttgaagacttgaattagattacagcgatggggacacagaaggtcaccccagctctgatatttgccatcacagttgctacaatcggctctttccaatttggctacaacactggggtcatcaatgctcctgagaagatcataaaggaatttatcaataaaactttgacggacaagggaaatgccccaccctctgaggtgctgctcacgtctctctggtccttgtctgtggccatattttccgtcgggggtatgatcggctccttttccgtcggactcttcgtcaaccgctttggcaggcgcaattcaatgctgattgtcaacctgttggctgtcactggtggctgctttatgggactgtgtaaagtagctaagtcggttgaaatgctgatcctgggtcgcttggttattggcctcttctgcggactctgcacaggttttgtgcccatgtacattggagagatctcgcctactgccctgcggggtgcctttggcactctcaaccagctgggcatcgttgttggaattctggtggcccagatctttggtctggaattcatccttgggtctgaagagctatggccgctgctactgggttttaccatccttcctgctatcctacaaagtgcagcccttccattttgccctgaaagtcccagatttttgctcattaacagaaaagaagaggagaatgctaagcagatcctccagcggttgtggggcacccaggatgtatcccaagacatccaggagatgaaagatgagagtgcaaggatgtcacaagaaaagcaagtcaccgtgctagagctctttagagtgtccagctaccgacagcccatcatcatttccattgtgctccagctctctcagcagctctctgggatcaatgctgtgttctattactcaacaggaatcttcaaggatgcaggtgttcaagagcccatctatgccaccatcggcgcgggtgtggttaatactatcttcactgtagtttctctatttctggtggaaagggcaggaagaaggactctgcatatgataggccttggagggatggctttttgttccacgctcatgactgtttctttgttattaaaggataactataatgggatgagctttgtctgtattggggctatcttggtctttgtagccttctttgaaattggaccaggccccattccctggtttattgtggccgaactcttcagccagggcccccgcccagctgcgatggcagtggccggctgctccaactggacctccaacttcctagtcggattgctcttcccctccgctgctcactatttaggagcctacgtttttattatcttcaccggcttcctcattaccttcttggcttttaccttcttcaaagtccctgagacccgtggcaggacttttgaggatatcacacgggcctttgaagggcaggcacacggtgcagatagatctggaaaggacggcgtcatggagatgaacagcatcgagcctgctaaggagaccaccaccaatgtctaagtcgtgcctccttccacctccctcccggcatgggaaagccacctctccctcaacaagggagagacctcatcaggatgaacccaggacgcttctgaatgctgctacttaattcctttctcatcccacgcactccatgagcaccccaaggctgcggtttgttggatcttcaatggctttttaaattttatttcctggacatcctcttctgcttaggagagaccgagtgaacctaccttcatttcaggagggattggccgcttggcacatgacaactttgccagcttttcctcccttgggttctgatattgccgcactaggggatataggagaggaaaagtaaggtgcagttcccccaacctcagacttaccaggaagcagatacatatgagtgtggaagccggagggtgtttatgtaagagcaccttcctcacttccatacagctctacgtggcaaattaacttgagttttatttattttatcctctggtttaattacataattttttttttttactttaagtttcaggatacatgtgccgaatgtgcaggtttgttacataggtatatatatgccatgatggaaatatttatttttttaagcgtaattttgccaaataataaaaacagaaggaaattgagattagagggaggtgtttaaagagaggttatagagtagaagatttgatgctggagaggttaaggtgcaataagaatttagggagaaatgttgttcattattggagggtaaatgatgtggtgcctgaggtctgtacgttacctcttaacaatttctgtccttcagatggaaactctttaacttctcgtaaaagtcatatacctatataataaagctactgatttcctttggagcttttttctttaagataatagtttacatgtagtagtacttgaaatctaggattattaactaatatgggcattgtagttaatgatggttgatgggttctaattttggatggagtccagggaagagaaagtgatttctagaaagcctgttcccctcactggatgaaataactccttcttgtagtagtctcattacttttgaagtaatcccgccacctatctcgtgggagagccatccaaataagaaacctaaaataattggttcttggtagagattcattatttttccactttgttctttaggagattttaggtgttgattttctgttgtattttaactcatacctttaaaggaattccccaaagaatgtttatagcaaacttggaatttgtaacctcagctctgggagaggatttttttctgagcgattattatctaaagtgtgttgttgctttaggctcacggcacgcttgcgtatgtctgttaccatgtcactgtggtcctatgccgaatgccctcaggggacttgaatctttccaataaaccaggtttagacagtatgagtcaatgtgcagtgtagcccacacttgagaggatgaatgtatgtgcactgtcactttgctctgggtggaagtacgttattgttgacttattttctctgtgtttgttcctacagcccctttttcatatgttgctcagtctccctttcccttcttggtgcttacacatctcagaccctttagccaaacccttgtcagtgacagtattttggttcttagttctcactgttccctctgctcctggagcctttgaataaaaatgcacgtagctgaggccggatgcggtggctcacgcctgtaatcccagcactttgggagaatcatgtgaacccgggacgcaggggttgcagtgagcggagatcgcatcattgcactctagcctgggccacagggcgagactccgtctcaaaaaaaaaaaaaatgcacatagctatcgagtgtgctttagcttgaaaaggtgaccttgcaacttcatgtcaacttctggctcctcaaacagtaggttggcagtaaggcagggtcccatttctcactgagaagattgtgaatatttccatatggattttctattgttactctggttctttgttttaaaataaaaattctgaatgtacacgaaaaaaaaaaat

SEQ ID NO: 442266 - DNA, 4323 bp, Homo sapiens
gtggggtggggtggggctgggggcttgtcgccctttcaggctccaccctttgcggagattataaatagtcatgatcccagcgagacccagagatgctgtaatggtgagactttggatccttcctgaggacgtggagaaaacttgctgctgagaaggacattttgaaggttttgttggctgaaaaagctgtttctggaatcacccctagatctttcttgaagacttgaattagattacagcgatggggacacagaaggtcaccccagctctgatatttgccatcacagttgctacaatcggctctttccaatttggctacaacactggggtcatcaatgctcctgagaagatcataaaggaatttatcaataaaactttgacggacaagggaaatgccccaccctctgaggtgctgctcacgtctctctggtccttgtctgtggccatattttccgtcgggggtatgatcggctccttttccgtcggactcttcgtcaaccgctttggcaggcgcaattcaatgctgattgtcaacctgttggctgtcactggtggctgctttatgggactgtgtaaagtagctaagtcggttgaaatgctgatcctgggtcgcttggttattggcctcttctgcggactctgcacaggttttgtgcccatgtacattggagagatctcgcctactgccctgcggggtgcctttggcactctcaaccagctgggcatcgttgttggaattctggtggcccaggtactctagaacttctcatacttaatgagtgttagtttcatgggtcattaaaaaagttaacataggtaaagcactgaagaatatctggcacatgttcaattacatatggaagttttagataatagatagtagctgaagaagcaggctgaggccgggcgctgtggctcacgcctgtaatcccagcactttgggaggccgaggtgggcagatcacgaggtcagcagatgaagaccagcctggctaacatggtgaaaccccatctctactaaaaacacaaaaaattggtcgggcgtggtagcgggcacctgtaatcccagctacttgggaggctgaggcaggagaatcgtgtgaacccgggaagtggaggttgcagggagctgagatcatgccattgcactccagcctgggcaacaaaagtgaaactctgtctcaaaaaaaaaaaggaatggatgctacccatcacctcacctcgtgcggccctttcctggctgccttacaggaagaatgaatttggggcagcacattctcttttatcctttcctctttcttcttttcaccagtcctccagcggttgtggggcacccaggatgtatcccaagacatccaggagatgaaagatgagagtgcaaggatgtcacaagaaaagcaagtcaccgtgctagagctctttagagtgtccagctaccgacagcccatcatcatttccattgtgctccagctctctcagcagctctctgggatcaatgctgtgttctattactcaacaggaatcttcaaggatgcaggtgttcaagagcccatctatgccaccatcggcgcgggtgtggttaatactatcttcactgtagtttctctatttctggtggaaagggcaggaagaaggactctgcatatgataggccttggagggatggctttttgttccacgctcatgactgtttctttgttattaaaggataactataatgggatgagctttgtctgtattggggctatcttggtctttgtagccttctttgaaattggaccaggccccattccctggtttattgtggccgaactcttcagccagggcccccgcccagctgcgatggcagtggccggctgctccaactggacctccaacttcctagtcggattgctcttcccctccgctgctcactatttaggagcctacgtttttattatcttcaccggcttcctcattaccttcttggcttttaccttcttcaaagtccctgagacccgtggcaggacttttgaggatatcacacgggcctttgaagggcaggcacacggtgcagatagatctggaaaggacggcgtcatggagatgaacagcatcgagcctgctaaggagaccaccaccaatgtctaagtcgtgcctccttccacctccctcccggcatgggaaagccacctctccctcaacaagggagagacctcatcaggatgaacccaggacgcttctgaatgctgctacttaattcctttctcatcccacgcactccatgagcaccccaaggctgcggtttgttggatcttcaatggctttttaaattttatttcctggacatcctcttctgcttaggagagaccgagtgaacctaccttcatttcaggagggattggccgcttggcacatgacaactttgccagcttttcctcccttgggttctgatattgccgcactaggggatataggagaggaaaagtaaggtgcagttcccccaacctcagacttaccaggaagcagatacatatgagtgtggaagccggagggtgtttatgtaagagcaccttcctcacttccatacagctctacgtggcaaattaacttgagttttatttattttatcctctggtttaattacataattttttttttttactttaagtttcaggatacatgtgccgaatgtgcaggtttgttacataggtatatatatgccatgatggaaatatttatttttttaagcgtaattttgccaaataataaaaacagaaggaaattgagattagagggaggtgtttaaagagaggttatagagtagaagatttgatgctggagaggttaaggtgcaataagaatttagggagaaatgttgttcattattggagggtaaatgatgtggtgcctgaggtctgtacgttacctcttaacaatttctgtccttcagatggaaactctttaacttctcgtaaaagtcatatacctatataataaagctactgatttcctttggagcttttttctttaagataatagtttacatgtagtagtacttgaaatctaggattattaactaatatgggcattgtagttaatgatggttgatgggttctaattttggatggagtccagggaagagaaagtgatttctagaaagcctgttcccctcactggatgaaataactccttcttgtagtagtctcattacttttgaagtaatcccgccacctatctcgtgggagagccatccaaataagaaacctaaaataattggttcttggtagagattcattatttttccactttgttctttaggagattttaggtgttgattttctgttgtattttaactcatacctttaaaggaattccccaaagaatgtttatagcaaacttggaatttgtaacctcagctctgggagaggatttttttctgagcgattattatctaaagtgtgttgttgctttaggctcacggcacgcttgcgtatgtctgttaccatgtcactgtggtcctatgccgaatgccctcaggggacttgaatctttccaataaaccaggtttagacagtatgagtcaatgtgcagtgtagcccacacttgagaggatgaatgtatgtgcactgtcactttgctctgggtggaagtacgttattgttgacttattttctctgtgtttgttcctacagcccctttttcatatgttgctcagtctccctttcccttcttggtgcttacacatctcagaccctttagccaaacccttgtcagtgacagtattttggttcttagttctcactgttccctctgctcctggagcctttgaataaaaatgcacgtagctgaggccggatgcggtggctcacgcctgtaatcccagcactttgggaggcctaggcgggcggtcaggggttcgagaccagtctggccaacatcgtgaaaccctgtctctactaaaaatgcaaaaattagccgggcgtggtggcgggcgcctgtaatcccagctacttgggaagctgaggcgggagaatcatgtgaacccgggacgcaggggttgcagtgagcggagatcgcatcattgcactctagcctgggccacagggcgagactccgtctcaaaaaaaaaaaaaatgcacatagctatcgagtgtgctttagcttgaaaaggtgaccttgcaacttcatgtcaacttctggctcctcaaacagtaggttggcagtaaggcagggtcccatttctcactgagaagattgtgaatatttccatatggattttctattgttactctggttctttgttttaaaataaaaattctgaatgtacacgaaaaaaaaaaat

SEQ ID NO: 442267 - DNA, 3848 bp, Homo sapiens
agaccaagactccgtctccaaaaaaaaaaaaaaaaaatgccaattagatattctagaaatgcaattggaattcacatttaaaaatcggtaaagcaacctgttttacttgattatgttgttcttttgtttttttaccccccaagaaagagggtcttgctctgtcacccgggctggagtgtaatggcccaatcatagctcactacagcttcgacctccgacctcagctccctgagtgcctgggactacaggcgggcaccatcacacctggttcccaactagaaatgttctgataatagaaagtgaaaaacaaaagttagattaaaaaaaaaagggatgatatgagcctggagaagaacagaataatgaggacagaggagaagttaggagcctctcactttgctaattctactttgtctttgattaaccttacaggcgcaattcaatgctgattgtcaacctgttggctgtcactggtggctgctttatgggactgtgtaaagtagctaagtcggttgaaatgctgatcctgggtcgcttggttattggcctcttctgcggactctgcacaggttttgtgcccatgtacattggagagatctcgcctactgccctgcggggtgcctttggcactctcaaccagctgggcatcgttgttggaattctggtggcccagatctttggtctggaattcatccttgggtctgaagagctatggccgctgctactgggttttaccatccttcctgctatcctacaaagtgcagcccttccattttgccctgaaagtcccagatttttgctcattaacagaaaagaagaggagaatgctaagcagatcctccagcggttgtggggcacccaggatgtatcccaagacatccaggagatgaaagatgagagtgcaaggatgtcacaagaaaagcaagtcaccgtgctagagctctttagagtgtccagctaccgacagcccatcatcatttccattgtgctccagctctctcagcagctctctgggatcaatgctgtgttctattactcaacaggaatcttcaaggatgcaggtgttcaagagcccatctatgccaccatcggcgcgggtgtggttaatactatcttcactgtagtttctctatttctggtggaaagggcaggaagaaggactctgcatatgataggccttggagggatggctttttgttccacgctcatgactgtttctttgttattaaaggataactataatgggatgagctttgtctgtattggggctatcttggtctttgtagccttctttgaaattggaccaggccccattccctggtttattgtggccgaactcttcagccagggcccccgcccagctgcgatggcagtggccggctgctccaactggacctccaacttcctagtcggattgctcttcccctccgctgctcactatttaggagcctacgtttttattatcttcaccggcttcctcattaccttcttggcttttaccttcttcaaagtccctgagacccgtggcaggacttttgaggatatcacacgggcctttgaagggcaggcacacggtgcagatagatctggaaaggacggcgtcatggagatgaacagcatcgagcctgctaaggagaccaccaccaatgtctaagtcgtgcctccttccacctccctcccggcatgggaaagccacctctccctcaacaagggagagacctcatcaggatgaacccaggacgcttctgaatgctgctacttaattcctttctcatcccacgcactccatgagcaccccaaggctgcggtttgttggatcttcaatggctttttaaattttatttcctggacatcctcttctgcttaggagagaccgagtgaacctaccttcatttcaggagggattggccgcttggcacatgacaactttgccagcttttcctcccttgggttctgatattgccgcactaggggatataggagaggaaaagtaaggtgcagttcccccaacctcagacttaccaggaagcagatacatatgagtgtggaagccggagggtgtttatgtaagagcaccttcctcacttccatacagctctacgtggcaaattaacttgagttttatttattttatcctctggtttaattacataattttttttttttactttaagtttcaggatacatgtgccgaatgtgcaggtttgttacataggtatatatatgccatgatggaaatatttatttttttaagcgtaattttgccaaataataaaaacagaaggaaattgagattagagggaggtgtttaaagagaggttatagagtagaagatttgatgctggagaggttaaggtgcaataagaatttagggagaaatgttgttcattattggagggtaaatgatgtggtgcctgaggtctgtacgttacctcttaacaatttctgtccttcagatggaaactctttaacttctcgtaaaagtcatatacctatataataaagctactgatttcctttggagcttttttctttaagataatagtttacatgtagtagtacttgaaatctaggattattaactaatatgggcattgtagttaatgatggttgatgggttctaattttggatggagtccagggaagagaaagtgatttctagaaagcctgttcccctcactggatgaaataactccttcttgtagtagtctcattacttttgaagtaatcccgccacctatctcgtgggagagccatccaaataagaaacctaaaataattggttcttggtagagattcattatttttccactttgttctttaggagattttaggtgttgattttctgttgtattttaactcatacctttaaaggaattccccaaagaatgtttatagcaaacttggaatttgtaacctcagctctgggagaggatttttttctgagcgattattatctaaagtgtgttgttgctttaggctcacggcacgcttgcgtatgtctgttaccatgtcactgtggtcctatgccgaatgccctcaggggacttgaatctttccaataaaccaggtttagacagtatgagtcaatgtgcagtgtagcccacacttgagaggatgaatgtatgtgcactgtcactttgctctgggtggaagtacgttattgttgacttattttctctgtgtttgttcctacagcccctttttcatatgttgctcagtctccctttcccttcttggtgcttacacatctcagaccctttagccaaacccttgtcagtgacagtattttggttcttagttctcactgttccctctgctcctggagcctttgaataaaaatgcacgtagctgaggccggatgcggtggctcacgcctgtaatcccagcactttgggaggcctaggcgggcggtcaggggttcgagaccagtctggccaacatcgtgaaaccctgtctctactaaaaatgcaaaaattagccgggcgtggtggcgggcgcctgtaatcccagctacttgggaagctgaggcgggagaatcatgtgaacccgggacgcaggggttgcagtgagcggagatcgcatcattgcactctagcctgggccacagggcgagactccgtctcaaaaaaaaaaaaaatgcacatagctatcgagtgtgctttagcttgaaaaggtgaccttgcaacttcatgtcaacttctggctcctcaaacagtaggttggcagtaaggcagggtcccatttctcactgagaagattgtgaatatttccatatggattttctattgttactctggttctttgttttaaaataaaaattctgaatgtacacgaaaaaaaaaaat

SEQ ID NO: 442268 - DNA, 3468 bp, Homo sapiens
aggactcagtctgggtgagagaacaagattcacctcaaaaaaaggatgggccaggcgcagtggctcatgcctgtaatccagcattataagaggccgaggcgggtcacctgaggtcaggagttcaagacctgcctgaaacaacatggagaaaccctgtctctactaaaaatacaaaaattagccgggcatgggggcgcatgcctgtaatcccagctacttgggaggctgaggcaggagaatcgtgtgaacccgggaagtggaggttgcagggagctgagatcatgccattgcactccagcctgggcaacaaaagtgaaactctgtctcaaaaaaaaaaaggaatggatgctacccatcacctcacctcgtgcggccctttcctggctgccttacaggaagaatgaatttggggcagcacattctcttttatcctttcctctttcttcttttcaccagtcctccagcggttgtggggcacccaggatgtatcccaagacatccaggagatgaaagatgagagtgcaaggatgtcacaagaaaagcaagtcaccgtgctagagctctttagagtgtccagctaccgacagcccatcatcatttccattgtgctccagctctctcagcagctctctgggatcaatgctgtgttctattactcaacaggaatcttcaaggatgcaggtgttcaagagcccatctatgccaccatcggcgcgggtgtggttaatactatcttcactgtagtttctctatttctggtggaaagggcaggaagaaggactctgcatatgataggccttggagggatggctttttgttccacgctcatgactgtttctttgttattaaaggataactataatgggatgagctttgtctgtattggggctatcttggtctttgtagccttctttgaaattggaccaggccccattccctggtttattgtggccgaactcttcagccagggcccccgcccagctgcgatggcagtggccggctgctccaactggacctccaacttcctagtcggattgctcttcccctccgctgctcactatttaggagcctacgtttttattatcttcaccggcttcctcattaccttcttggcttttaccttcttcaaagtccctgagacccgtggcaggacttttgaggatatcacacgggcctttgaagggcaggcacacggtgcagatagatctggaaaggacggcgtcatggagatgaacagcatcgagcctgctaaggagaccaccaccaatgtctaagtcgtgcctccttccacctccctcccggcatgggaaagccacctctccctcaacaagggagagacctcatcaggatgaacccaggacgcttctgaatgctgctacttaattcctttctcatcccacgcactccatgagcaccccaaggctgcggtttgttggatcttcaatggctttttaaattttatttcctggacatcctcttctgcttaggagagaccgagtgaacctaccttcatttcaggagggattggccgcttggcacatgacaactttgccagcttttcctcccttgggttctgatattgccgcactaggggatataggagaggaaaagtaaggtgcagttcccccaacctcagacttaccaggaagcagatacatatgagtgtggaagccggagggtgtttatgtaagagcaccttcctcacttccatacagctctacgtggcaaattaacttgagttttatttattttatcctctggtttaattacataattttttttttttactttaagtttcaggatacatgtgccgaatgtgcaggtttgttacataggtatatatatgccatgatggaaatatttatttttttaagcgtaattttgccaaataataaaaacagaaggaaattgagattagagggaggtgtttaaagagaggttatagagtagaagatttgatgctggagaggttaaggtgcaataagaatttagggagaaatgttgttcattattggagggtaaatgatgtggtgcctgaggtctgtacgttacctcttaacaatttctgtccttcagatggaaactctttaacttctcgtaaaagtcatatacctatataataaagctactgatttcctttggagcttttttctttaagataatagtttacatgtagtagtacttgaaatctaggattattaactaatatgggcattgtagttaatgatggttgatgggttctaattttggatggagtccagggaagagaaagtgatttctagaaagcctgttcccctcactggatgaaataactccttcttgtagtagtctcattacttttgaagtaatcccgccacctatctcgtgggagagccatccaaataagaaacctaaaataattggttcttggtagagattcattatttttccactttgttctttaggagattttaggtgttgattttctgttgtattttaactcatacctttaaaggaattccccaaagaatgtttatagcaaacttggaatttgtaacctcagctctgggagaggatttttttctgagcgattattatctaaagtgtgttgttgctttaggctcacggcacgcttgcgtatgtctgttaccatgtcactgtggtcctatgccgaatgccctcaggggacttgaatctttccaataaaccaggtttagacagtatgagtcaatgtgcagtgtagcccacacttgagaggatgaatgtatgtgcactgtcactttgctctgggtggaagtacgttattgttgacttattttctctgtgtttgttcctacagcccctttttcatatgttgctcagtctccctttcccttcttggtgcttacacatctcagaccctttagccaaacccttgtcagtgacagtattttggttcttagttctcactgttccctctgctcctggagcctttgaataaaaatgcacgtagctgaggccggatgcggtggctcacgcctgtaatcccagcactttgggaggcctaggcgggcggtcaggggttcgagaccagtctggccaacatcgtgaaaccctgtctctactaaaaatgcaaaaattagccgggcgtggtggcgggcgcctgtaatcccagctacttgggaagctgaggcgggagaatcatgtgaacccgggacgcaggggttgcagtgagcggagatcgcatcattgcactctagcctgggccacagggcgagactccgtctcaaaaaaaaaaaaaatgcacatagctatcgagtgtgctttagcttgaaaaggtgaccttgcaacttcatgtcaacttctggctcctcaaacagtaggttggcagtaaggcagggtcccatttctcactgagaagattgtgaatatttccatatggattttctattgttactctggttctttgttttaaaataaaaattctgaatgtacacgaaaaaaaaaaat

SEQ ID NO: 442269 - DNA, 3340 bp, Homo sapiens
ttctgattactcctgagtaaaattttcagcccctaaagaatgaggtgaaaaggcgggtttaggaatggatgctatcaggcagggtgtgatggctcatgcctgtaatccagcattataagaggccgaggcgggtcacctgaggtcaggagttcaagacctgcctgaaacaacatggagaaaccctgtctctactaaaaatacaaaaattagccgggcatgggggcgcatgcctgtaatcccagctacttgggaggctgaggcaggagaatcgtgtgaacccgggaagtggaggttgcagggagctgagattgtgccactgcactcctgcctgggtgacagatccagactaggagataagatacagaagataattcatttgcagaagggatattagtattgaacgaaaacctagaaaaaggacttcttacccactgggacttttaagtttatttttgagggttctgtgtaactggtgtgcagaattgcatcaaagctgcatgttttcttttctcctaggtgttctattactcaacaggaatcttcaaggatgcaggtgttcaagagcccatctatgccaccatcggcgcgggtgtggttaatactatcttcactgtagtttctctatttctggtggaaagggcaggaagaaggactctgcatatgataggccttggagggatggctttttgttccacgctcatgactgtttctttgttattaaaggataactataatgggatgagctttgtctgtattggggctatcttggtctttgtagccttctttgaaattggaccaggccccattccctggtttattgtggccgaactcttcagccagggcccccgcccagctgcgatggcagtggccggctgctccaactggacctccaacttcctagtcggattgctcttcccctccgctgctcactatttaggagcctacgtttttattatcttcaccggcttcctcattaccttcttggcttttaccttcttcaaagtccctgagacccgtggcaggacttttgaggatatcacacgggcctttgaagggcaggcacacggtgcagatagatctggaaaggacggcgtcatggagatgaacagcatcgagcctgctaaggagaccaccaccaatgtctaagtcgtgcctccttccacctccctcccggcatgggaaagccacctctccctcaacaagggagagacctcatcaggatgaacccaggacgcttctgaatgctgctacttaattcctttctcatcccacgcactccatgagcaccccaaggctgcggtttgttggatcttcaatggctttttaaattttatttcctggacatcctcttctgcttaggagagaccgagtgaacctaccttcatttcaggagggattggccgcttggcacatgacaactttgccagcttttcctcccttgggttctgatattgccgcactaggggatataggagaggaaaagtaaggtgcagttcccccaacctcagacttaccaggaagcagatacatatgagtgtggaagccggagggtgtttatgtaagagcaccttcctcacttccatacagctctacgtggcaaattaacttgagttttatttattttatcctctggtttaattacataattttttttttttactttaagtttcaggatacatgtgccgaatgtgcaggtttgttacataggtatatatatgccatgatggaaatatttatttttttaagcgtaattttgccaaataataaaaacagaaggaaattgagattagagggaggtgtttaaagagaggttatagagtagaagatttgatgctggagaggttaaggtgcaataagaatttagggagaaatgttgttcattattggagggtaaatgatgtggtgcctgaggtctgtacgttacctcttaacaatttctgtccttcagatggaaactctttaacttctcgtaaaagtcatatacctatataataaagctactgatttcctttggagcttttttctttaagataatagtttacatgtagtagtacttgaaatctaggattattaactaatatgggcattgtagttaatgatggttgatgggttctaattttggatggagtccagggaagagaaagtgatttctagaaagcctgttcccctcactggatgaaataactccttcttgtagtagtctcattacttttgaagtaatcccgccacctatctcgtgggagagccatccaaataagaaacctaaaataattggttcttggtagagattcattatttttccactttgttctttaggagattttaggtgttgattttctgttgtattttaactcatacctttaaaggaattccccaaagaatgtttatagcaaacttggaatttgtaacctcagctctgggagaggatttttttctgagcgattattatctaaagtgtgttgttgctttaggctcacggcacgcttgcgtatgtctgttaccatgtcactgtggtcctatgccgaatgccctcaggggacttgaatctttccaataaaccaggtttagacagtatgagtcaatgtgcagtgtagcccacacttgagaggatgaatgtatgtgcactgtcactttgctctgggtggaagtacgttattgttgacttattttctctgtgtttgttcctacagcccctttttcatatgttgctcagtctccctttcccttcttggtgcttacacatctcagaccctttagccaaacccttgtcagtgacagtattttggttcttagttctcactgttccctctgctcctggagcctttgaataaaaatgcacgtagctgaggccggatgcggtggctcacgcctgtaatcccagcactttgggaggcctaggcgggcggtcaggggttcgagaccagtctggccaacatcgtgaaaccctgtctctactaaaaatgcaaaaattagccgggcgtggtggcgggcgcctgtaatcccagctacttgggaagctgaggcgggagaatcatgtgaacccgggacgcaggggttgcagtgagcggagatcgcatcattgcactctagcctgggccacagggcgagactccgtctcaaaaaaaaaaaaaatgcacatagctatcgagtgtgctttagcttgaaaaggtgaccttgcaacttcatgtcaacttctggctcctcaaacagtaggttggcagtaaggcagggtcccatttctcactgagaagattgtgaatatttccatatggattttctattgttactctggttctttgttttaaaataaaaattctgaatgtacacgaaaaaaaaaaat

SEQ ID NO: 442270 - DNA, 3044 bp, Homo sapiens
gtggggtggggtggggctgggggcttgtcgccctttcaggctccaccctttgcggagattataaatagtcatgatcccagcgagacccagagatgctgtaatggtgagactttggatccttcctgaggacgtggagaaaacttgctgctgagaaggacattttgaaggttttgttggctgaaaaagctgtttctggaatcacccctagatctttcttgaagacttgaattagattacagcgatggggacacagaaggtcaccccagctctgatatttgccatcacagttgctacaatcggctctttccaatttggctacaacactggggtcatcaatgctcctgagaagatcataaaggaatttatcaataaaactttgacggacaagggaaatgccccaccctctgaggtgctgctcacgtctctctggtccttgtctgtggccatattttccgtcgggggtatgatcggctccttttccgtcggactcttcgtcaaccgctttggcaggcgcaattcaatgctgattgtcaacctgttggctgtcactggtggctgctttatgggactgtgtaaagtagctaagtcggttgaaatgctgatcctgggtcgcttggttattggcctcttctgcggactctgcacaggttttgtgcccatgtacattggagagatctcgcctactgccctgcggggtgcctttggcactctcaaccagctgggcatcgttgttggaattctggtggcccagatctttggtctggaattcatccttgggtctgaagagctatggccgctgctactgggttttaccatccttcctgctatcctacaaagtgcagcccttccattttgccctgaaagtcccagatttttgctcattaacagaaaagaagaggagaatgctaagcagatcctccagcggttgtggggcacccaggatgtatcccaagacatccaggagatgaaagatgagagtgcaaggatgtcacaagaaaagcaagtcaccgtgctagagctctttagagtgtccagctaccgacagcccatcatcatttccattgtgctccagctctctcagcagctctctgggatcaatgctgtgttctattactcaacaggaatcttcaaggatgcaggtgttcaagagcccatctatgccaccatcggcgcgggtgtggttaatactatcttcactgtagtttctctatttctggtggaaagggcaggaagaaggactctgcatatgataggccttggagggatggctttttgttccacgctcatgactgtttctttgttattaaaggataactataatgggatgagctttgtctgtattggggctatcttggtctttgtagccttctttgaaattggaccaggccccattccctggtttattgtggccgaactcttcagccagggcccccgcccagctgcgatggcagtggccggctgctccaactggacctccaacttcctagtcggattgctcttcccctccgctgctcactatttaggagcctacgtttttattatcttcaccggcttcctcattaccttcttggcttttaccttcttcaaagtccctgagacccgtggcaggacttttgaggatatcacacgggcctttgaagggcaggcacacggtgcagatagatctggaaaggacggcgtcatggagatgaacagcatcgagcctgctaaggagaccaccaccaatgtctaagtcgtgcctccttccacctccctcccggcatgggaaagccacctctccctcaacaagggagagacctcatcaggatgaacccaggacgcttctgaatgctgctacttaattcctttctcatcccacgcactccatgagcaccccaaggctgcggtttgttggatcttcaatggctttttaaattttatttcctggacatcctcttctgcttaggagagaccgagtgaacctaccttcatttcaggagggattggccgcttggcacatgacaactttgccagcttttcctcccttgggttctgatattgccgcactaggggatataggagaggaaaagtaaggtgcagttcccccaacctcagacttaccaggaagcagatacatatgagtgtggaagccggagggtgtttatgtaagagcaccttcctcacttccatacagctctacgtggcaaattaacttgagttttatttattttatcctctggtttaattacataattttttttttttactttaagtttcaggatacatgtgccgaatgtgcaggtttgttacataggtatatatatgccatgatggaaatatttatttttttaagcgtaattttgccaaataataaaaacagaaggaaattgagattagagggaggtgtttaaagagaggttatagagtagaagatttgatgctggagaggttaaggtgcaataagaatttagggagaaatgttgttcattattggagggtaaatgatgtggtgcctgaggtctgtacgttacctcttaacaatttctgtccttcagatggaaactctttaacttctcgtaaaagtcatatacctatataataaagctactgatttcctttggagcttttttctttaagataatagtttacatgtagtagtacttgaaatctaggattattaactaatatgggcattgtagttaatgatggttgatgggttctaattttggatggagtccagggaagagaaagtgatttctagaaagcctgttcccctcactggatgaaataactccttcttgtagtagtctcattacttttgaagtaatcccgccacctatctcgtgggagagccatccaaataagaaacctaaaataattggttcttggtagagattcattatttttccactttgttctttaggagattttaggtgttgattttctgttgtattttaactcatacctttaaaggaattccccaaagaatgtttatagcaaacttggaatttgtaacctcatcctggcctgagatcgtcctggcctgagatgggatccgtctagag

SEQ ID NO: 442271 - DNA, 2510 bp, Homo sapiens
  misc_feature (24)..(24): n is a, c, g, or t
acccacgcgtccggacccacgcgntcgcccacgcgtccgacccacgcgtccgcggacgcgtgggtcgcccacgcgtccgctcttcccctccgctgctcactatttaggagcctacgtttttattatcttcaccggcttcctcattaccttcttggcttttaccttcttcaaagtccctgagacccgtggcaggacttttgaggatatcacacgggcctttgaagggcaggcacacggtgcagatagatctggaaaggacggcgtcatggagatgaacagcatcgagcctgctaaggagaccaccaccaatgtctaagtcgtgcctccttccacctccctcccggcatgggaaagccacctctccctcaacaagggagagacctcatcaggatgaacccaggacgcttctgaatgctgctacttaattcctttctcatcccacgcactccatgagcaccccaaggctgcggtttgttggatcttcaatggctttttaaattttatttcctggacatcctcttctgcttaggagagaccgagtgaacctaccttcatttcaggagggattggccgcttggcacatgacaactttgccagcttttcctcccttgggttctgatattgccgcactaggggatataggagaggaaaagtaaggtgcagttcccccaacctcagacttaccaggaagcagatacatatgagtgtggaagccggagggtgtttatgtaagagcaccttcctcacttccatacagctctacgtggcaaattaacttgagttttatttattttatcctctggtttaattacataattttttttttttactttaagtttcaggatacatgtgccgaatgtgcaggtttgttacataggtatatatatgccatgatggaaatatttatttttttaagcgtaattttgccaaataataaaaacagaaggaaattgagattagagggaggtgtttaaagagaggttatagagtagaagatttgatgctggagaggttaaggtgcaataagaatttagggagaaatgttgttcattattggagggtaaatgatgtggtgcctgaggtctgtacgttacctcttaacaatttctgtccttcagatggaaactctttaacttctcgtaaaagtcatatacctatataataaagctactgatttcctttggagcttttttctttaagataatagtttacatgtagtagtacttgaaatctaggattattaactaatatgggcattgtagttaatgatggttgatgggttctaattttggatggagtccagggaagagaaagtgatttctagaaagcctgttcccctcactggatgaaataactccttcttgtagtagtctcattacttttgaagtaatcccgccacctatctcgtgggagagccatccaaataagaaacctaaaataattggttcttggtagagattcattatttttccactttgttctttaggagattttaggtgttgattttctgttgtattttaactcatacctttaaaggaattccccaaagaatgtttatagcaaacttggaatttgtaacctcagctctgggagaggatttttttctgagcgattattatctaaagtgtgttgttgctttaggctcacggcacgcttgcgtatgtctgttaccatgtcactgtggtcctatgccgaatgccctcaggggacttgaatctttccaataaaccaggtttagacagtatgagtcaatgtgcagtgtagcccacacttgagaggatgaatgtatgtgcactgtcactttgctctgggtggaagtacgttattgttgacttattttctctgtgtttgttcctacagcccctttttcatatgttgctcagtctccctttcccttcttggtgcttacacatctcagaccctttagccaaacccttgtcagtgacagtattttggttcttagttctcactgttccctctgctcctggagcctttgaataaaaatgcacgtagctgaggccggatgcggtggctcacgcctgtaatcccagcactttgggaggcctaggcgggcggtcaggggttcgagaccagtctggccaacatcgtgaaaccctgtctctactaaaaatgcaaaaattagccgggcgtggtggcgggcgcctgtaatcccagctacttgggaagctgaggcgggagaatcatgtgaacccgggacgcaggggttgcagtgagcggagatcgcatcattgcactctagcctgggccacagggcgagactccgtctcaaaaaaaaaaaaaatgcacatagctatcgagtgtgctttagcttgaaaaggtgaccttgcaacttcatgtcaacttctggctcctcaaacagtaggttggcagtaaggcagggtcccatttctcactgagaagattgtgaatatttccatatggattttctattgttactctggttctttgttttaaaataaaaattctgaatgtacacgaaaaaaaaaaat

SEQ ID NO: 442272 - DNA, 2239 bp, Homo sapiens
ggccaaggtgcctggagctgcatgaggaggtgggatatggtgccatgcgtggattgccagctggcaatccacgcatgggaaagccacctctccctcaacaagggagagacctcatcaggatgaacccaggacgcttctgaatgctgctacttaattcctttctcatcccacgcactccatgagcaccccaaggctgcggtttgttggatcttcaatggctttttaaattttatttcctggacatcctcttctgcttaggagagaccgagtgaacctaccttcatttcaggagggattggccgcttggcacatgacaactttgccagcttttcctcccttgggttctgatattgccgcactaggggatataggagaggaaaagtaaggtgcagttcccccaacctcagacttaccaggaagcagatacatatgagtgtggaagccggagggtgtttatgtaagagcaccttcctcacttccatacagctctacgtggcaaattaacttgagttttatttattttatcctctggtttaattacataattttttttttttactttaagtttcaggatacatgtgccgaatgtgcaggtttgttacataggtatatatatgccatgatggaaatatttatttttttaagcgtaattttgccaaataataaaaacagaaggaaattgagattagagggaggtgtttaaagagaggttatagagtagaagatttgatgctggagaggttaaggtgcaataagaatttagggagaaatgttgttcattattggagggtaaatgatgtggtgcctgaggtctgtacgttacctcttaacaatttctgtccttcagatggaaactctttaacttctcgtaaaagtcatatacctatataataaagctactgatttcctttggagcttttttctttaagataatagtttacatgtagtagtacttgaaatctaggattattaactaatatgggcattgtagttaatgatggttgatgggttctaattttggatggagtccagggaagagaaagtgatttctagaaagcctgttcccctcactggatgaaataactccttcttgtagtagtctcattacttttgaagtaatcccgccacctatctcgtgggagagccatccaaataagaaacctaaaataattggttcttggtagagattcattatttttccactttgttctttaggagattttaggtgttgattttctgttgtattttaactcatacctttaaaggaattccccaaagaatgtttatagcaaacttggaatttgtaacctcagctctgggagaggatttttttctgagcgattattatctaaagtgtgttgttgctttaggctcacggcacgcttgcgtatgtctgttaccatgtcactgtggtcctatgccgaatgccctcaggggacttgaatctttccaataaaccaggtttagacagtatgagtcaatgtgcagtgtagcccacacttgagaggatgaatgtatgtgcactgtcactttgctctgggtggaagtacgttattgttgacttattttctctgtgtttgttcctacagcccctttttcatatgttgctcagtctccctttcccttcttggtgcttacacatctcagaccctttagccaaacccttgtcagtgacagtattttggttcttagttctcactgttccctctgctcctggagcctttgaataaaaatgcacgtagctgaggccggatgcggtggctcacgcctgtaatcccagcactttgggaggcctaggcgggcggtcaggggttcgagaccagtctggccaacatcgtgaaaccctgtctctactaaaaatgcaaaaattagccgggcgtggtggcgggcgcctgtaatcccagctacttgggaagctgaggcgggagaatcatgtgaacccgggacgcaggggttgcagtgagcggagatcgcatcattgcactctagcctgggccacagggcgagactccgtctcaaaaaaaaaaaaaatgcacatagctatcgagtgtgctttagcttgaaaaggtgaccttgcaacttcatgtcaacttctggctcctcaaacagtaggttggcagtaaggcagggtcccatttctcactgagaagattgtgaatatttccatatggattttctattgttactctggttctttgttttaaaataaaaattctgaatgtacacgaaaaaaaaaaat

SEQ ID NO: 442273 - DNA, 1602 bp, Homo sapiens
gtggggtggggtggggctgggggcttgtcgccctttcaggctccaccctttgcggagattataaatagtcatgatcccagcgagacccagagatgctgtaatggtgagactttggatccttcctgaggacgtggagaaaacttgctgctgagaaggacattttgaaggttttgttggctgaaaaagctgtttctggaatcacccctagatctttcttgaagacttgaattagattacagcgatggggacacagaaggtcaccccagctctgatatttgccatcacagttgctacaatcggctctttccaatttggctacaacactggggtcatcaatgctcctgagaagatcataaaggaatttatcaataaaactttgacggacaagggaaatgccccaccctctgaggtgctgctcacgtctctctggtccttgtctgtggccatattttccgtcgggggtatgatcggctccttttccgtcggactcttcgtcaaccgctttggcaggcgcaattcaatgctgattgtcaacctgttggctgtcactggtggctgctttatgggactgtgtaaagtagctaagtcggttgaaatgctgatcctgggtcgcttggttattggcctcttctgcggactctgcacaggttttgtgcccatgtacattggagagatctcgcctactgccctgcggggtgcctttggcactctcaaccagctgggcatcgttgttggaattctggtggcccagatctttggtctggaattcatccttgggtctgaagagctatggccgctgctactgggttttaccatccttcctgctatcctacaaagtgcagcccttccattttgccctgaaagtcccagatttttgctcattaacagaaaagaagaggagaatgctaagcagatcctccagcggttgtggggcacccaggatgtatcccaagacatccaggagatgaaagatgagagtgcaaggatgtcacaagaaaagcaagtcaccgtgctagagctctttagagtgtccagctaccgacagcccatcatcatttccattgtgctccagctctctcagcagctctctgggatcaatgctgtgttctattactcaacaggaatcttcaaggatgcaggtgttcaagagcccatctatgccaccatcggcgcgggtgtggttaatactatcttcactgtagtttctctatttctggtggaaagggcaggaagaaggactctgcatatgataggccttggagggatggctttttgttccacgctcatgactgtttctttgttattaaaggataactataatgggatgagctttgtctgtattggggctatcttggtctttgtagccttctttgaaattggaccaggccccattccctggtttattgtggcctggtccaatttcaaagaaggtagcacagacccaatgccgggaagcgccccacagccagcgtatgcgtgcagcggccttgagggaagctctccctcaggacatcactggttgagggctcatctaagtagcagccccagagcagagactcaagggcagtgggtcgtggagtggggccttaggcgtggaggaac

SEQ ID NO: 442274 - DNA, 918 bp, Homo sapiens
gtggggtggggtggggctgggggcttgtcgccctttcaggctccaccctttgcggagattataaatagtcatgatcccagcgagacccagagatgctgtaatggtgagactttggatccttcctgaggacgtggagaaaacttgctgctgagaaggacattttgaaggttttgttggctgaaaaagctgtttctggaatcacccctagatctttcttgaagacttgaattagattacagcgatggggacacagaaggtcaccccagctctgatatttgccatcacagttgctacaatcggctctttccaatttggctacaacactggggtcatcaatgctcctgagaagatcataaaggaatttatcaataaaactttgacggacaagggaaatgccccaccctctgaggtgctgctcacgtctctctggtccttgtctgtggccatattttccgtcgggggtatgatcggctccttttccgtcggactcttcgtcaaccgctttggcaggtattgactagaaactgggcaaggaagtgggctctaccagccacattgaggacaagtgtggagagttagggcagggaggtgatgatgcctttgaataagaacaccttgaattctaatcaagggaaacctagtccaactggccccgaatatgactgcccttgcttggagctctactaccctggagagctcccacccagctgtgcaagagatgaactgtgagtgattggcctttgcagtccagctagggatagttcagaattattccctagtaaactcaactatggggtttctagaaacatacttaatttacaaggtccgaagttgtttacttgtattataaatgtttttattattttacccaggattggtaggaattatttttgtctatggcaaatgtggataatgaca

SEQ ID NO: 442275 - DNA, 401 bp, Homo sapiens
ggttctgtgtaactggtgtgcagaattgcatcaaagctgcatgttttcttttctcctaggtgttctattactcaacaggaatcttcaaggatgcaggtgttcaagagcccatctatgccaccatcggcgcgggtgtggttaatactatcttcactgtagtttctgtaagttggatggtttggtaattttgaggggagaaaagaatccttgctacagatgttcaaagatggattgcatgaccctaccatcatttagttacctttttgttgcttaattttcctttgggaaaaagagataaatttaatgttggatgtagtcttcactcttcaagcaaatatgggatggatgggaaaggagggagtatagaagggactatatagtatgctttgaacttggaattg

SEQ ID NO: 442276 - DNA, 3748 bp, Homo sapiens
gtggggtggggtggggctgggggcttgtcgccctttcaggctccaccctttgcggagattataaatagtcatgatcccagcgagacccagagatgctgtaatggtgagactttggatccttcctgaggacgtggagaaaacttgctgctgagaaggacattttgaaggttttgttggctgaaaaagctgtttctggaatcacccctagatctttcttgaagacttgaattagattacagcgatggggacacagaaggtcaccccagctctgatatttgccatcacagttgctacaatcggctctttccaatttggctacaacactggggtcatcaatgctcctgagaagatcataaaggaatttatcaataaaactttgacggacaagggaaatgccccaccctctgaggtgctgctcacgtctctctggtccttgtctgtggccatattttccgtcgggggtatgatcggctccttttccgtcggactcttcgtcaaccgctttggcaggcgcaattcaatgctgattgtcaacctgttggctgtcactggtggctgctttatgggactgtgtaaagtagctaagtcggttgaaatgctgatcctgggtcgcttggttattggcctcttctgcggactctgcacaggttttgtgcccatgtacattggagagatctcgcctactgccctgcggggtgcctttggcactctcaaccagctgggcatcgttgttggaattctggtggcccagatctttggtctggaattcatccttgggtctgaagagctatggccgctgctactgggttttaccatccttcctgctatcctacaaagtgcagcccttccattttgccctgaaagtcccagatttttgctcattaacagaaaagaagaggagaatgctaagcagatcctccagcggttgtggggcacccaggatgtatcccaagacatccaggagatgaaagatgagagtgcaaggatgtcacaagaaaagcaagtcaccgtgctagagctctttagagtgtccagctaccgacagcccatcatcatttccattgtgctccagctctctcagcagctctctgggatcaatgctgtgttctattactcaacaggaatcttcaaggatgcaggtgttcaagagcccatctatgccaccatcggcgcgggtgtggttaatactatcttcactgtagtttctctatttctggtggaaagggcaggaagaaggactctgcatatgataggccttggagggatggctttttgttccacgctcatgactgtttctttgttattaaaggataactataatgggatgagctttgtctgtattggggctatcttggtctttgtagccttctttgaaattggaccaggccccattccctggtttattgtggccgaactcttcagccagggcccccgcccagctgcgatggcagtggccggctgctccaactggacctccaacttcctagtcggattgctcttcccctccgctgctcactatttaggagcctacgtttttattatcttcaccggcttcctcattaccttcttggcttttaccttcttcaaagtccctgagacccgtggcaggacttttgaggatatcacacgggcctttgaagggcaggcacacggtgcagatagatctggaaaggacggcgtcatggagatgaacagcatcgagcctgctaaggagaccaccaccaatgtctaagtcgtgcctccttccacctccctcccggcatgggaaagccacctctccctcaacaagggagagacctcatcaggatgaacccaggacgcttctgaatgctgctacttaattcctttctcatcccacgcactccatgagcaccccaaggctgcggtttgttggatcttcaatggctttttaaattttatttcctggacatcctcttctgcttaggagagaccgagtgaacctaccttcatttcaggagggattggccgcttggcacatgacaactttgccagcttttcctcccttgggttctgatattgccgcactaggggatataggagaggaaaagtaaggtgcagttcccccaacctcagacttaccaggaagcagatacatatgagtgtggaagccggagggtgtttatgtaagagcaccttcctcacttccatacagctctacgtggcaaattaacttgagttttatttattttatcctctggtttaattacataattttttttttttactttaagtttcaggatacatgtgccgaatgtgcaggtttgttacataggtatatatatgccatgatggaaatatttatttttttaagcgtaattttgccaaataataaaaacagaaggaaattgagattagagggaggtgtttaaagagaggttatagagtagaagatttgatgctggagaggttaaggtgcaataagaatttagggagaaatgttgttcattattggagggtaaatgatgtggtgcctgaggtctgtacgttacctcttaacaatttctgtccttcagatggaaactctttaacttctcgtaaaagtcatatacctatataataaagctactgatttcctttggagcttttttctttaagataatagtttacatgtagtagtacttgaaatctaggattattaactaatatgggcattgtagttaatgatggttgatgggttctaattttggatggagtccagggaagagaaagtgatttctagaaagcctgttcccctcactggatgaaataactccttcttgtagtagtctcattacttttgaagtaatcccgccacctatctcgtgggagagccatccaaataagaaacctaaaataattggttcttggtagagattcattatttttccactttgttctttaggagattttaggtgttgattttctgttgtattttaactcatacctttaaaggaattccccaaagaatgtttatagcaaacttggaatttgtaacctcagctctgggagaggatttttttctgagcgattattatctaaagtgtgttgttgctttaggctcacggcacgcttgcgtatgtctgttaccatgtcactgtggtcctatgccgaatgccctcaggggacttgaatctttccaataaaccaggtttagacagtatgagtcaatgtgcagtgtagcccacacttgagaggatgaatgtatgtgcactgtcactttgctctgggtggaagtacgttattgttgacttattttctctgtgtttgttcctacagcccctttttcatatgttgctcagtctccctttcccttcttggtgcttacacatctcagaccctttagccaaacccttgtcagtgacagtattttggttcttagttctcactgttccctctgctcctggagcctttgaataaaaatgcacgtagctgaggccggatgcggtggctcacgcctgtaatcccagcactttgggaggcctaggcgggcggtcaggggttcgagaccagtctggccaacatcgtgaaaccctgtctctactaaaaatgcaaaaattagccgggcgtggggggccgtatccagtattggagcgaggggagataggtaccggacggtgatgaggaaacactgcctgctggcagggaccgttaaaaaagtcttccgtgtaggaggacggctgatgccaagggggggggatcaaaggtcacatggggtgaatgaaaggctcgctcttttctatttcgatag

SEQ ID NO: 442277 - DNA, 3612 bp, Homo sapiens
gtggggtggggtggggctgggggcttgtcgccctttcaggctccaccctttgcggagattataaatagtcatgatcccagcgagacccagagatgctgtaatggtgagactttggatccttcctgaggacgtggagaaaacttgctgctgagaaggacattttgaaggttttgttggctgaaaaagctgtttctggaatcacccctagatctttcttgaagacttgaattagattacagcgatggggacacagaaggtcaccccagctctgatatttgccatcacagttgctacaatcggctctttccaatttggctacaacactggggtcatcaatgctcctgagaagatcataaaggaatttatcaataaaactttgacggacaagggaaatgccccaccctctgaggtgctgctcacgtctctctggtccttgtctgtggccatattttccgtcgggggtatgatcggctccttttccgtcggactcttcgtcaaccgctttggcaggcgcaattcaatgctgattgtcaacctgttggctgtcactggtggctgctttatgggactgtgtaaagtagctaagtcggttgaaatgctgatcctgggtcgcttggttattggcctcttctgcggactctgcacaggttttgtgcccatgtacattggagagatctcgcctactgccctgcggggtgcctttggcactctcaaccagctgggcatcgttgttggaattctggtggcccagatctttggtctggaattcatccttgggtctgaagagctatggccgctgctactgggttttaccatccttcctgctatcctacaaagtgcagcccttccattttgccctgaaagtcccagatttttgctcattaacagaaaagaagaggagaatgctaagcagatcctccagcggttgtggggcacccaggatgtatcccaagacatccaggagatgaaagatgagagtgcaaggatgtcacaagaaaagcaagtcaccgtgctagagctctttagagtgtccagctaccgacagcccatcatcatttccattgtgctccagctctctcagcagctctctgggatcaatgctgtgttctattactcaacaggaatcttcaaggatgcaggtgttcaagagcccatctatgccaccatcggcgcgggtgtggttaatactatcttcactgtagtttctctatttctggtggaaagggcaggaagaaggactctgcatatgataggccttggagggatggctttttgttccacgctcatgactgtttctttgttattaaaggataactataatgggatgagctttgtctgtattggggctatcttggtctttgtagccttctttgaaattggaccaggccccattccctggtttattgtggccgaactcttcagccagggcccccgcccagctgcgatggcagtggccggctgctccaactggacctccaacttcctagtcggattgctcttcccctccgctgctcactatttaggagcctacgtttttattatcttcaccggcttcctcattaccttcttggcttttaccttcttcaaagtccctgagacccgtggcaggacttttgaggatatcacacgggcctttgaagggcaggcacacggtgcagatagatctggaaaggacggcgtcatggagatgaacagcatcgagcctgctaaggagaccaccaccaatgtctaagtcgtgcctccttccacctccctcccggcatgggaaagccacctctccctcaacaagggagagacctcatcaggatgaacccaggacgcttctgaatgctgctacttaattcctttctcatcccacgcactccatgagcaccccaaggctgcggtttgttggatcttcaatggctttttaaattttatttcctggacatcctcttctgcttaggagagaccgagtgaacctaccttcatttcaggagggattggccgcttggcacatgacaactttgccagcttttcctcccttgggttctgatattgccgcactaggggatataggagaggaaaagtaaggtgcagttcccccaacctcagacttaccaggaagcagatacatatgagtgtggaagccggagggtgtttatgtaagagcaccttcctcacttccatacagctctacgtggcaaattaacttgagttttatttattttatcctctggtttaattacataattttttttttttactttaagtttcaggatacatgtgccgaatgtgcaggtttgttacataggtatatatatgccatgatggaaatatttatttttttaagcgtaattttgccaaataataaaaacagaaggaaattgagattagagggaggtgtttaaagagaggttatagagtagaagatttgatgctggagaggttaaggtgcaataagaatttagggagaaatgttgttcattattggagggtaaatgatgtggtgcctgaggtctgtacgttacctcttaacaatttctgtccttcagatggaaactctttaacttctcgtaaaagtcatatacctatataataaagctactgatttcctttggagcttttttctttaagataatagtttacatgtagtagtacttgaaatctaggattattaactaatatgggcattgtagttaatgatggttgatgggttctaattttggatggagtccagggaagagaaagtgatttctagaaagcctgttcccctcactggatgaaataactccttcttgtagtagtctcattacttttgaagtaatcccgccacctatctcgtgggagagccatccaaataagaaacctaaaataattggttcttggtagagattcattatttttccactttgttctttaggagattttaggtgttgattttctgttgtattttaactcatacctttaaaggaattccccaaagaatgtttatagcaaacttggaatttgtaacctcagctctgggagaggatttttttctgagcgattattatctaaagtgtgttgttgctttaggctcacggcacgcttgcgtatgtctgttaccatgtcactgtggtcctatgccgaatgccctcaggggacttgaatctttccaataaaccaggtttagacagtatgagtcaatgtgcagtgtagcccacacttgagaggatgaatgtatgtgcactgtcactttgctctgggtggaagtacgttattgttgacttattttctctgtgtttgttcctacagcccctttttcatatgttgctcagtctccctttcccttcttggtgcttacacatctcagaccctttagccaaacccttgtcagtgacagtattttggttcttagttctcactctcaaaaaaaaaaaaaatgcacatagctatcgagtgtgctttagcttgaaaaggtgaccttgcaacttcatgtcaacttctggctcctcaaacagtaggttggcagtaaggcagggtcccatttctcactgagaagattgtgaatatttccatatggattttctattgttactctggttctttgttttaaaataaaaattctgaatgtacacgaaaaaaaaaaat

SEQ ID NO: 442278 - DNA, 4245 bp, Homo sapiens
agaccaagactccgtctccaaaaaaaaaaaaaaaaaatgccaattagatattctagaaatgcaattggaattcacatttaaaaatcggtaaagcaacctgttttacttgattatgttgttcttttgtttttttaccccccaagaaagagggtcttgctctgtcacccgggctggagtgtaatggcccaatcatagctcactacagcttcgacctccgacctcagctccctgagtgcctgggactacaggcgggcaccatcacacctggttcccaactagaaatgttctgataatagaaagtgaaaaacaaaagttagattaaaaaaaaaagggatgatatgagcctggagaagaacagaataatgaggacagaggagaagttaggagcctctcactttgctaattctactttgtctttgattaaccttacaggcgcaattcaatgctgattgtcaacctgttggctgtcactggtggctgctttatgggactgtgtaaagtagctaagtcggttgaaatgctgatcctgggtcgcttggttattggcctcttctgcggactctgcacaggttttgtgcccatgtacattggagagatctcgcctactgccctgcggggtgcctttggcactctcaaccagctgggcatcgttgttggaattctggtggcccaggtactctagaacttctcatacttaatgagtgttagtttcatgggtcattaaaaaagttaacataggtaaagcactgaagaatatctggcacatgttcaattacatatggaagttttagataatagatagtagctgaagaagcaggctgaggccgggcgctgtggctcacgcctgtaatcccagcactttgggaggccgaggtgggcagatcacgaggtcagcagatgaagaccagcctggctaacatggtgaaaccccatctctactaaaaacacaaaaaattggtcgggcgtggtagcgggcacctgtaatcccagctacttgggaggctgaggcaggagaatcgtgtgaacccgggaagtggaggttgcagggagctgagatcatgccattgcactccagcctgggcaacaaaagtgaaactctgtctcaaaaaaaaaaaggaatggatgctacccatcacctcacctcgtgcggccctttcctggctgccttacaggaagaatgaatttggggcagcacattctcttttatcctttcctctttcttcttttcaccagtcctccagcggttgtggggcacccaggatgtatcccaagacatccaggagatgaaagatgagagtgcaaggatgtcacaagaaaagcaagtcaccgtgctagagctctttagagtgtccagctaccgacagcccatcatcatttccattgtgctccagctctctcagcagctctctgggatcaatgctgtgttctattactcaacaggaatcttcaaggatgcaggtgttcaagagcccatctatgccaccatcggcgcgggtgtggttaatactatcttcactgtagtttctctatttctggtggaaagggcaggaagaaggactctgcatatgataggccttggagggatggctttttgttccacgctcatgactgtttctttgttattaaaggataactataatgggatgagctttgtctgtattggggctatcttggtctttgtagccttctttgaaattggaccaggccccattccctggtttattgtggccgaactcttcagccagggcccccgcccagctgcgatggcagtggccggctgctccaactggacctccaacttcctagtcggattgctcttcccctccgctgctcactatttaggagcctacgtttttattatcttcaccggcttcctcattaccttcttggcttttaccttcttcaaagtccctgagacccgtggcaggacttttgaggatatcacacgggcctttgaagggcaggcacacggtgcagatagatctggaaaggacggcgtcatggagatgaacagcatcgagcctgctaaggagaccaccaccaatgtctaagtcgtgcctccttccacctccctcccggcatgggaaagccacctctccctcaacaagggagagacctcatcaggatgaacccaggacgcttctgaatgctgctacttaattcctttctcatcccacgcactccatgagcaccccaaggctgcggtttgttggatcttcaatggctttttaaattttatttcctggacatcctcttctgcttaggagagaccgagtgaacctaccttcatttcaggagggattggccgcttggcacatgacaactttgccagcttttcctcccttgggttctgatattgccgcactaggggatataggagaggaaaagtaaggtgcagttcccccaacctcagacttaccaggaagcagatacatatgagtgtggaagccggagggtgtttatgtaagagcaccttcctcacttccatacagctctacgtggcaaattaacttgagttttatttattttatcctctggtttaattacataattttttttttttactttaagtttcaggatacatgtgccgaatgtgcaggtttgttacataggtatatatatgccatgatggaaatatttatttttttaagcgtaattttgccaaataataaaaacagaaggaaattgagattagagggaggtgtttaaagagaggttatagagtagaagatttgatgctggagaggttaaggtgcaataagaatttagggagaaatgttgttcattattggagggtaaatgatgtggtgcctgaggtctgtacgttacctcttaacaatttctgtccttcagatggaaactctttaacttctcgtaaaagtcatatacctatataataaagctactgatttcctttggagcttttttctttaagataatagtttacatgtagtagtacttgaaatctaggattattaactaatatgggcattgtagttaatgatggttgatgggttctaattttggatggagtccagggaagagaaagtgatttctagaaagcctgttcccctcactggatgaaataactccttcttgtagtagtctcattacttttgaagtaatcccgccacctatctcgtgggagagccatccaaataagaaacctaaaataattggttcttggtagagattcattatttttccactttgttctttaggagattttaggtgttgattttctgttgtattttaactcatacctttaaaggaattccccaaagaatgtttatagcaaacttggaatttgtaacctcagctctgggagaggatttttttctgagcgattattatctaaagtgtgttgttgctttaggctcacggcacgcttgcgtatgtctgttaccatgtcactgtggtcctatgccgaatgccctcaggggacttgaatctttccaataaaccaggtttagacagtatgagtcaatgtgcagtgtagcccacacttgagaggatgaatgtatgtgcactgtcactttgctctgggtggaagtacgttattgttgacttattttctctgtgtttgttcctacagcccctttttcatatgttgctcagtctccctttcccttcttggtgcttacacatctcagaccctttagccaaacccttgtcagtgacagtattttggttcttagttctcactgttccctctgctcctggagcctttgaataaaaatgcacgtagctgaggccggatgcggtggctcacgcctgtaatcccagcactttgggaggcctaggcgggcggtcaggggttcgagaccagtctggccaacatcgtgaaaccctgtctctactaaaaatgcaaaaattagccgggcgtggtggcgggcgcctgtaatcccagctacttgggaagctgaggcgggagaatcatgtgaacccgggacgcaggggttgcagtgagcggagatcgcatcattgcactctagcctgggccacagggcgagactccgtctcaaaaaaaaaaaaaatgcacatagctatcgagtgtgctttagcttgaaaaggtgaccttgcaacttcatgtcaacttctggctcctcaaacagtaggttggcagtaaggcagggtcccatttctcactgagaagattgtgaatatttccatatggattttctattgttactctggttctttgttttaaaataaaaattctgaatgtacacgaaaaaaaaaaat

SEQ ID NO: 442279 - DNA, 2598 bp, Homo sapiens
gtggggtggggtggggctgggggcttgtcgccctttcaggctccaccctttgcggagattataaatagtcatgatcccagcgagacccagagatgctgtaatggtgagactttggatccttcctgaggacgtggagaaaacttgctgctgagaaggacattttgaaggttttgttggctgaaaaagctgtttctggaatcacccctagatctttcttgaagacttgaattagattacagcgatggggacacagaaggtcaccccagctctgatatttgccatcacagttgctacaatcggctctttccaatttggctacaacactggggtcatcaatgctcctgagaagatcataaaggaatttatcaataaaactttgacggacaagggaaatgccccaccctctgaggtgctgctcacgtctctctggtccttgtctgtggccatattttccgtcgggggtatgatcggctccttttccgtcggactcttcgtcaaccgctttggcaggcgcaattcaatgctgattgtcaacctgttggctgtcactggtggctgctttatgggactgtgtaaagtagctaagtcggttgaaatgctgatcctgggtcgcttggttattggcctcttctgcggactctgcacaggttttgtgcccatgtacattggagagatctcgcctactgccctgcggggtgcctttggcactctcaaccagctgggcatcgttgttggaattctggtggcccagatctttggtctggaattcatccttgggtctgaagagctatggccgctgctactgggttttaccatccttcctgctatcctacaaagtgcagcccttccattttgccctgaaagtcccagatttttgctcattaacagaaaagaagaggagaatgctaagcagatcctccagcggttgtggggcacccaggatgtatcccaagacatccaggagatgaaagatgagagtgcaaggatgtcacaagaaaagcaagtcaccgtgctagagctctttagagtgtccagctaccgacagcccatcatcatttccattgtgctccagctctctcagcagctctctgggatcaatgctgtgttctattactcaacaggaatcttcaaggatgcaggtgttcaagagcccatctatgccaccatcggcgcgggtgtggttaatactatcttcactgtagtttctctatttctggtggaaagggcaggaagaaggactctgcatatgataggccttggagggatggctttttgttccacgctcatgactgtttctttgttattaaaggataactataatgggatgagctttgtctgtattggggctatcttggtctttgtagccttctttgaaattggaccaggccccattccctggtttattgtggccgaactcttcagccagggcccccgcccagctgcgatggcagtggccggctgctccaactggacctccaacttcctagtcggattgctcttcccctccgctgctcactatttaggagcctacgtttttattatcttcaccggcttcctcattaccttcttggcttttaccttcttcaaagtccctgagacccgtggcaggacttttgaggatatcacacgggcctttgaagggcaggcacacggtgcagatagatctggaaaggacggcgtcatggagatgaacagcatcgagcctgctaaggagaccaccaccaatgtctaagtcgtgcctccttccacctccctcccggcatgggaaagccacctctccctcaacaagggagagacctcatcaggatgaacccaggacgcttctgaatgctgctacttaattcctttctcatcccacgcactccatgagcaccccaaggctgcggtttgttggatcttcaatggctttttaaattttatttcctggacatcctcttctgcttaggagagaccgagtgaacctaccttcatttcaggagggattggccgcttggcacatgacaactttgccagcttttcctcccttgggttctgatattgccgcactaggggatataggagaggaaaagtaaggtgcagttcccccaacctcagacttaccaggaagcagatacatatgagtgtggaagccggagggtgtttatgtaagagcaccttcctcacttccatacagctctacgtggcaaattaacttgagttttatttattttatcctctggtttaattacataattttttttttttactttaagtttcaggatacatgtgccgaatgtgcaggtttgttacataggtatatatatgccatgatggaaatatttatttttttaagcgtaattttgccaaataataaaaacagaaggaaattgagattagagggaggtgtttaaagagaggttatagagtagaagatttgatgctggagaggttaaggtgcaataagaatttagggagaaatgttgttcattattggagggtaaatgatgtggtgcctgaggtctgtacgttacctcttaacaatttctgtccttcagatggaaactctttaacttctcgtaaaagtcatatacctatataataaagctactgatttccttt

SEQ ID NO: 442280 - DNA, 2238 bp, Homo sapiens
gtggggtggggtggggctgggggcttgtcgccctttcaggctccaccctttgcggagattataaatagtcatgatcccagcgagacccagagatgctgtaatggtgagactttggatccttcctgaggacgtggagaaaacttgctgctgagaaggacattttgaaggttttgttggctgaaaaagctgtttctggaatcacccctagatctttcttgaagacttgaattagattacagcgatggggacacagaaggtcaccccagctctgatatttgccatcacagttgctacaatcggctctttccaatttggctacaacactggggtcatcaatgctcctgagaagatcataaaggaatttatcaataaaactttgacggacaagggaaatgccccaccctctgaggtgctgctcacgtctctctggtccttgtctgtggccatattttccgtcgggggtatgatcggctccttttccgtcggactcttcgtcaaccgctttggcaggcgcaattcaatgctgattgtcaacctgttggctgtcactggtggctgctttatgggactgtgtaaagtagctaagtcggttgaaatgctgatcctgggtcgcttggttattggcctcttctgcggactctgcacaggttttgtgcccatgtacattggagagatctcgcctactgccctgcggggtgcctttggcactctcaaccagctgggcatcgttgttggaattctggtggcccagatctttggtctggaattcatccttgggtctgaagagctatggccgctgctactgggttttaccatccttcctgctatcctacaaagtgcagcccttccattttgccctgaaagtcccagatttttgctcattaacagaaaagaagaggagaatgctaagcagatcctccagcggttgtggggcacccaggatgtatcccaagacatccaggagatgaaagatgagagtgcaaggatgtcacaagaaaagcaagtcaccgtgctagagctctttagagtgtccagctaccgacagcccatcatcatttccattgtgctccagctctctcagcagctctctgggatcaatgctgtgttctattactcaacaggaatcttcaaggatgcaggtgttcaagagcccatctatgccaccatcggcgcgggtgtggttaatactatcttcactgtagtttctctatttctggtggaaagggcaggaagaaggactctgcatatgataggccttggagggatggctttttgttccacgctcatgactgtttctttgttattaaaggataactataatgggatgagctttgtctgtattggggctatcttggtctttgtagccttctttgaaattggaccaggccccattccctggtttattgtggccgaactcttcagccagggcccccgcccagctgcgatggcagtggccggctgctccaactggacctccaacttcctagtcggattgctcttcccctccgctgctcactatttaggagcctacgtttttattatcttcaccggcttcctcattaccttcttggcttttaccttcttcaaagtccctgagacccgtggcaggacttttgaggatatcacacgggcctttgaagggcaggcacacggtgcagatagatctggaaaggacggcgtcatggagatgaacagcatcgagcctgctaaggagaccaccaccaatgtctaagtcgtgcctccttccacctccctcccggcatgggaaagccacctctccctcaacaagggagagacctcatcaggatgaacccaggacgcttctgaatgctgctacttaattcctttctcatcccacgcactccatgagcaccccaaggctgcggtttgttggatcttcaatggctttttaaattttatttcctggacatcctcttctgcttaggagagaccgagtgaacctaccttcatttcaggagggattggccgcttggcacatgacaactttgccagcttttcctcccttgggttctgatattgccgcactaggggatataggagaggaaaagtaaggtgcagttcccccaacctcagacttaccaggaagcagatacatatgagtgtggaagccggagggtgtttatgtaagagcaccttcctcacttccataaaactcaagtaattttgccacgtagagctgtatggaagtgaggaaggtgctcttacatacagctctac

SEQ ID NO: 442281 - DNA, 1311 bp, Homo sapiens
gtggggtggggtggggctgggggcttgtcgccctttcaggctccaccctttgcggagattataaatagtcatgatcccagcgagacccagagatgctgtaatggtgagactttggatccttcctgaggacgtggagaaaacttgctgctgagaaggacattttgaaggttttgttggctgaaaaagctgtttctggaatcacccctagatctttcttgaagacttgaattagattacagcgatggggacacagaaggtcaccccagctctgatatttgccatcacagttgctacaatcggctctttccaatttggctacaacactggggtcatcaatgctcctgagaagatcataaaggaatttatcaataaaactttgacggacaagggaaatgccccaccctctgaggtgctgctcacgtctctctggtccttgtctgtggccatattttccgtcgggggtatgatcggctccttttccgtcggactcttcgtcaaccgctttggcaggcgcaattcaatgctgattgtcaacctgttggctgtcactggtggctgctttatgggactgtgtaaagtagctaagtcggttgaaatgctgatcctgggtcgcttggttattggcctcttctgcggactctgcacaggttttgtgcccatgtacattggagagatctcgcctactgccctgcggggtgcctttggcactctcaaccagctgggcatcgttgttggaattctggtggcccagatctttggtctggaattcatccttgggtctgaagagctatggccgctgctactgggttttaccatccttcctgctatcctacaaagtgcagcccttccattttgccctgaaagtcccagatttttgctcattaacagaaaagaagaggagaatgctaagcagatcctccagcggttgtggggcacccaggatgtatcccaagacatccaggagatgaaagatgagagtgcaaggatgtcacaagaaaagcaagtcaccgtgctagagctctttagagtgtccagctaccgacagcccatcatcatttccattgtgctccagctctctcagcagctctctgggatcaatgctgtgagtgtgatactttagggtcaaacgtgtcttaaagtatttcacttaaaatgccgggcatggtggcggtgtgcctctgtagtcccagctactcaggaggctgaggtaagaggatcgcttgagctcaggagtttcaggttgcagtgagctataattatgccactgcattccagcctgggagacagagtgagactgtgtctctgaaattt

SEQ ID NO: 442282 - DNA, 1628 bp, Homo sapiens
  misc_feature (1)..(1): n is a, c, g, or t
  misc_feature (21)..(21): n is a, c, g, or t
ntctgtgggcactctggcaanccgtagcaggaggaacgacaggacccccttgctcatcccttactgcaatgggttatatcaagtaatagatcacatattgtgaaactgccagttaacaggcaattgaagtttatgcatactccacatcagttccttcttctcagcagtccaccagccaaagaatccaattttagagctgctaaaaaactctttggaagcacctttgcatttcatggctcacacattgaaaactggcactccatcctgaggaatggtctggttgttgcttctaatacacgattgcagctccatggtgcaatgtatggaagtggaatctatcttagtccaatgtcaagcatatcatttggttactcagggatgaacaagaaacagaaggtgtcagccaaggacgagccagcttcaagcagtaaaagcagcaatacatcacagtcacagaaaaaaggacagcaatcccaattcctgcaaagccgtaacttaaaatgcatagccttatgtgaagtgatcacctcatctgacctgcacaaacatggagagatatgggttgtccccaatactgaccatgtctgcacacgattctttttcgtctatgaagacggccaagtgggagatgcaaatattaatacacaagaaggaggcattcacaaagagatcctccgagtaattggtaatcaaactgctactggttaaaggaccaccatttaattaacatgattcgaaagccttcctcgggttcaaagctggattttgaactgaagaagattataaaattatttattgttattataaacaaaattaaccctttgaatactgattttttttcttagtatttctaagtatctcattaaatacctaaaatggtataagatttatcaattgtagggttatggaatctagtaataaaatttcaacagcacttaaactgaagtttgggttgctcatacaataaacagattgaaaaaactgttttgtgctgatatttttatactaaactctttaactggatatttggtattatataccgacattttaggttaccaaaatagaattgagaacattttataatggcatctaaatctatcagatactttgcaataagtatactgtttgcacattctgatgtgctatatcattagtagtatgggcattctaatgttttggaaggggtgttccctattctatttttcttcataaaaaaagaagtaggtcttagaagcagtgctttgccaaaaagtatgtaatatacacatctatacattcatgcatcaaaatgtgtggttgtgaatatatttgtgtatattcacacgtatgttttgacaagaaagatggcttagcttcacaattctatcctcgtttaatggaaagaagataatatttagtaagcaataaatttggacataaatcaagatatgagccagatttaccaccattcattcactgaaaatatttgcagacaatttttctgtttgtctgaagaaattcagcccttttaaaatgttatctaaaagtcataatttggggaacatacatggcctggtagaccgaatctatattcaaatgattatgtatttaaaagaaagacctcagaatttaaagaaaccatatatatt

SEQ ID NO: 442283 - DNA, 1088 bp, Homo sapiens
ttcccaaatactacgtaataaacaccattgtctcatgcatctgtatatattaccataccttttctctatgaagacggccaagtgggagatgcaaatattaatacacaagaaggaggcattcacaaagagatcctccgagtaattggtaatcaaactgctactggttaaaggaccaccatttaattaacatgattcgaaagccttcctcgggttcaaagctggattttgaactgaagaagattataaaattatttattgttattataaacaaaattaaccctttgaatactgattttttttcttagtatttctaagtatctcattaaatacctaaaatggtataagatttatcaattgtagggttatggaatctagtaataaaatttcaacagcacttaaactgaagtttgggttgctcatacaataaacagattgaaaaaactgttttgtgctgatatttttatactaaactctttaactggatatttggtattatataccgacattttaggttaccaaaatagaattgagaacattttataatggcatctaaatctatcagatactttgcaataagtatactgtttgcacattctgatgtgctatatcattagtagtatgggcattctaatgttttggaaggggtgttccctattctatttttcttcataaaaaaagaagtaggtcttagaagcagtgctttgccaaaaagtatgtaatatacacatctatacattcatgcatcaaaatgtgtggttgtgaatatatttgtgtatattcacacgtatgttttgacaagaaagatggcttagcttcacaattctatcctcgtttaatggaaagaagataatatttagtaagcaataaatttggacataaatcaagatatgagccagatttaccaccattcattcactgaaaatatttgcagacaatttttctgtttgtctgaagaaattcagcccttttaaaatgttatctaaaagtcataatttggggaacatacatggcctggtagaccgaatctatattcaaatgattatgtatttaaaagaaagacctcagaatttaaagaaaccatatatatt

SEQ ID NO: 442284 - DNA, 853 bp, Homo sapiens
tctctagcctaatgtgatcaaacctttacctagaatggaactttgcatagtaggtcgattgtactttcagctgcatcagacagctttgtccctaaattattattttgccgatgttttcagggatgaacaagaaacagaaggtgtcagccaaggacgagccagcttcaagcagtaaaagcagcaatacatcacaggtgttgtagtgactttagtgactgcttatgattagtgaactgtggcctcatcagccagcagagcatggaaaaataggctttttaagtctgaaaaattatttaatgtggtcattacttataaaggaataaaactcactctgaaatgcagtaactgaattgcctctatacaataattaatcaacagatatttatttatctcccactataataccagagatactcctaggcagtagagtgtagtgatggccaaaagtagacacatattccgtctcttggagcctacatcctactgaggggtataaataaattaaatacatatttagatagatagaatgctagatattatgaagaaaaataaatcagggaaatgagacatttaatgctgtcaggtggaagagggatctgggatgaatgttaaatgggatggtcaggaaaggatactctgagaaggtgacatttgagtcaagacctacagatgatgagtgcgtgagccatgtgactctctaggagaaagaacattctgggcagagagtagaatgaccatcaatcccatgttgtttcagagaaaacaagtatattctgggaaaattaaaaaatcatctgataagtagtgtgactttaaatttaaaaaaagagagtatagctaatctaatatctga

SEQ ID NO: 442285 - DNA, 3602 bp, Homo sapiens
agcccctgcctcggccagaggtttcatttttaactgaatatttacgaaagctggaagcgtgcgaggggggtggggtggggtggaaatagcggctgcttcttttccagcgatttatttaatggggatgtgttcaaggcaagagcgaattcagaaggatatcgacgtcgtgatccagaagtccagagctgagaaggactgcctgttgcagatttcagatactctgactccacctttacttttacctacgttggcggccccagaagtgtatcctactcagtacatgtatctgaagattacccagataatacatatgtgtcaagttcagagaatgatgaagatgtgctagttactacagagccaataccagtaatttttcatagaatagcaacagaattaagaaaaacaaatgacattaactgttgcttatccataaaatccaaattacaaaaggaaaatggggaggaatcaagacagaatagtacagtggaggaagattctgaaggtgacaatgattccgaagaattttattacggaggacaggtgaactatgatggggaactgcacaagcacccacaactggaagctgatttgtcagcagttagagagatatatgggccacatgcagtttctctcagggaatatggagccattgatgatgtagatattgatctgcatatcgatgttagctttcttgatgaggagattgctgtggcttgggaagtaattcgaacagaacctataattgttcgactacactgttcacttacacagtatttaaatggcccagtgcccactgttgatgtctttcagatttccacaaaagagcgatttggattgggacatcagctgaaaaaaatcatgcagacatttgttacacagcagtggaaacagagcaaagaaaaatccaattgcctgcacaataaaaagttgtcagagaagaaagtgaagtctcccctgcatttattttctactttgcgcaggtcgccaagttatcctccccctggttgtggcaaaagcaaatccaaactgaaatctgagcaggacggaatctccaaaacgcataagctgctgcggaggacttgttccagcacagtcaagactgatgatgtgtgtgtcacaaagtcacacaggacctttggccgctccttgtccagcgatcccagggcggagcaggctatgacagcaattaaatcgcacaaacttttgaaccgtccttgccctgcagctgttaagtcagaggaatgcctaactctaaagtcgcatagactattgactcgatcttgttctggagatccacgatgtgagcacaacacaaacttgaagccccataaactgttaagcaggtcttactctagtaatctcagaatggaagaattatatggactgaaaaatcacaaattgctcagcaagtcctactccagtgcccccaagtcatccaaaactgagcttttcaaggaacctaacgcagagggcaggaggctctctcttacctcagggcttattggtatcctaacaccatcttcatcttcatcttctcagcttgctccaaatggtgcaaaatgcattccagtacgagaccgtggcttcctggtgcagacaattgagtttgctgaacagcggatccctgtattaaatgaatattgtgtggtttgtgatgagccacatgtgtttcaaaatggccctatgcttaggcctaccgtatgtgaacgggagctgtgtgtgtttgcttttcaaaccctgggagtaatgaatgaagctgctgatgaaatagcaactggagctcaggtggtagatctactagtatccatgtgtaggtctgcgttggaatctcctagaaaagttgtgattttcgagccatatccttctgtggtagatcctaatgatcctcagatgttggccttcaaccccaggaaaaagaactatgatcgagtaatgaaagcactggatagcataacttctatcagagaaatgacacaagcaccatatctggaaatcaagaagcaaatggataaacaggacccccttgctcatcccttactgcaatgggttatatcaagtaatagatcacatattgtgaaactgccagttaacaggcaattgaagtttatgcatactccacatcagttccttcttctcagcagtccaccagccaaagaatccaattttagagctgctaaaaaactctttggaagcacctttgcatttcatggctcacacattgaaaactggcactccatcctgaggaatggtctggttgttgcttctaatacacgattgcagctccatggtgcaatgtatggaagtggaatctatcttagtccaatgtcaagcatatcatttggttactcagggatgaacaagaaacagaaggtgtcagccaaggacgagccagcttcaagcagtaaaagcagcaatacatcacagtcacagaaaaaaggacagcaatcccaattcctgcaaagccgtaacttaaaatgcatagccttatgtgaagtgatcacctcatctgacctgcacaaacatggagagatatgggttgtccccaatactgaccatgtctgcacacgattctttttcgtctatgaagacggccaagtgggagatgcaaatattaatacacaagaaggaggcattcacaaagagatcctccgagtaattggtaatcaaactgctactggttaaaggaccaccatttaattaacatgattcgaaagccttcctcgggttcaaagctggattttgaactgaagaagattataaaattatttattgttattataaacaaaattaaccctttgaatactgattttttttcttagtatttctaagtatctcattaaatacctaaaatggtataagatttatcaattgtagggttatggaatctagtaataaaatttcaacagcacttaaactgaagtttgggttgctcatacaataaacagattgaaaaaactgttttgtgctgatatttttatactaaactctttaactggatatttggtattatataccgacattttaggttaccaaaatagaattgagaacattttataatggcatctaaatctatcagatactttgcaataagtatactgtttgcacattctgatgtgctatatcattagtagtatgggcattctaatgttttggaaggggtgttccctattctatttttcttcataaaaaaagaagtaggtcttagaagcagtgctttgccaaaaagtatgtaatatacacatctatacattcatgcatcaaaatgtgtggttgtgaatatatttgtgtatattcacacgtatgttttgacaagaaagatggcttagcttcacaattctatcctcgtttaatggaaagaagataatatttagtaagcaataaatttggacataaatcaagatatgagccagatttaccaccattcattcactgaaaatatttgcagacaatttttctgtttgtctgaagaaattcagcccttttaaaatgttatctaaaagtcataatttggggaacatacatggcctggtagaccgaatctatattcaaatgattatgtatttaaaagaaagacctcagaatttaaagaaaccatatatatt

SEQ ID NO: 442286 - DNA, 3503 bp, Homo sapiens
acccagtcgggggccgccgcatcccctcggacgcggcgcagagggacctcgccgccctctagcccttgccttctgcccggccaggcctcccctgacaccaccgaatgtggggctcaagtcctgatcggggttaaaacaaatccactccaggggtagcttctgacgggactttctgtatcagattgcagatactctgactccacctgtacttatacctacgttggcggccccagaaggtatcctactcagtacatgtatctgaagattacccagataatacatatgtgtcaagttcagagaatgatgaagatgtgctagttactacagagccaataccagtaatttttcatagaatagcaacaggaatcaagacagaatagtacagtggaggaagattctgaaggtgacaatgattccgaagaattttattacggaggacaggtgaactatgatggggaactgcacaagcacccacaactggaagctgatttgtcagcagttagagagatatatgggccacatgcagtttctctcagggaatatggagccattgatgatgtagatattgatctgcatatcgatgttagctttcttgatgaggagattgctgtggcttgggaagtaattcgaacagaacctataattgttcgactacactgttcacttacacagtatttaaatggcccagtgcccactgttgatgtctttcagatttccacaaaagagcgatttggattgggacatcagctgaaaaaaatcatgcagacatttgttacacagcagtggaaacagagcaaagaaaaatccaattgcctgcacaataaaaagttgtcagagaagaaagtgaagtctcccctgcatttattttctactttgcgcaggtcgccaagttatcctccccctggttgtggcaaaagcaaatccaaactgaaatctgagcaggacggaatctccaaaacgcataagctgctgcggaggacttgttccagcacagtcaagactgatgatgtgtgtgtcacaaagtcacacaggacctttggccgctccttgtccagcgatcccagggcggagcaggctatgacagcaattaaatcgcacaaacttttgaaccgtccttgccctgcagctgttaagtcagaggaatgcctaactctaaagtcgcatagactattgactcgatcttgttctggagatccacgatgtgagcacaacacaaacttgaagccccataaactgttaagcaggtcttactctagtaatctcagaatggaagaattatatggactgaaaaatcacaaattgctcagcaagtcctactccagtgcccccaagtcatccaaaactgagcttttcaaggaacctaacgcagagggcaggaggctctctcttacctcagggcttattggtatcctaacaccatcttcatcttcatcttctcagcttgctccaaatggtgcaaaatgcattccagtacgagaccgtggcttcctggtgcagacaattgagtttgctgaacagcggatccctgtattaaatgaatattgtgtggtttgtgatgagccacatgtgtttcaaaatggccctatgcttaggcctaccgtatgtgaacgggagctgtgtgtgtttgcttttcaaaccctgggagtaatgaatgaagctgctgatgaaatagcaactggagctcaggtggtagatctactagtatccatgtgtaggtctgcgttggaatctcctagaaaagttgtgattttcgagccatatccttctgtggtagatcctaatgatcctcagatgttggccttcaaccccaggaaaaagaactatgatcgagtaatgaaagcactggatagcataacttctatcagagaaatgacacaagcaccatatctggaaatcaagaagcaaatggataaacaggacccccttgctcatcccttactgcaatgggttatatcaagtaatagatcacatattgtgaaactgccagttaacaggcaattgaagtttatgcatactccacatcagttccttcttctcagcagtccaccagccaaagaatccaattttagagctgctaaaaaactctttggaagcacctttgcatttcatggctcacacattgaaaactggcactccatcctgaggaatggtctggttgttgcttctaatacacgattgcagctccatggtgcaatgtatggaagtggaatctatcttagtccaatgtcaagcatatcatttggttactcagggatgaacaagaaacagaaggtgtcagccaaggacgagccagcttcaagcagtaaaagcagcaatacatcacagtcacagaaaaaaggacagcaatcccaattcctgcaaagccgtaacttaaaatgcatagccttatgtgaagtgatcacctcatctgacctgcacaaacatggagagatatgggttgtccccaatactgaccatgtctgcacacgattctttttcgtctatgaagacggccaagtgggagatgcaaatattaatacacaagaaggaggcattcacaaagagatcctccgagtaattggtaatcaaactgctactggttaaaggaccaccatttaattaacatgattcgaaagccttcctcgggttcaaagctggattttgaactgaagaagattataaaattatttattgttattataaacaaaattaaccctttgaatactgattttttttcttagtatttctaagtatctcattaaatacctaaaatggtataagatttatcaattgtagggttatggaatctagtaataaaatttcaacagcacttaaactgaagtttgggttgctcatacaataaacagattgaaaaaactgttttgtgctgatatttttatactaaactctttaactggatatttggtattatataccgacattttaggttaccaaaatagaattgagaacattttataatggcatctaaatctatcagatactttgcaataagtatactgtttgcacattctgatgtgctatatcattagtagtatgggcattctaatgttttggaaggggtgttccctattctatttttcttcataaaaaaagaagtaggtcttagaagcagtgctttgccaaaaagtatgtaatatacacatctatacattcatgcatcaaaatgtgtggttgtgaatatatttgtgtatattcacacgtatgttttgacaagaaagatggcttagcttcacaattctatcctcgtttaatggaaagaagataatatttagtaagcaataaatttggacataaatcaagatatgagccagatttaccaccattcattcactgaaaatatttgcagacaatttttctgtttgtctgaagaaattcagcccttttaaaatgttatctaaaagtcataatttggggaacatacatggcctggtagaccgaatctatattcaaatgattatgtatttaaaagaaagacctcagaatttaaagaaaccatatatatt

SEQ ID NO: 442287 - DNA, 2043 bp, Homo sapiens
tcctctaccatgaaaggacacagcaagaagatcaatttgtggccttactgtcactctggtctatgaatcagcagatgggccctcatcaggcactgaatctcctgacatctttatcttcccagccttcaaaactcctaccgtatgtgaacgggagctgtgtgtgtttgcttttcaaaccctgggagtaatgaatgaagctgctgatgaaatagcaactggagctcaggtggtagatctactagtatccatgtgtaggtctgcgttggaatctcctagaaaagttgtgattttcgagccatatccttctgtggtagatcctaatgatcctcagatgttggccttcaaccccaggaaaaagaactatgatcgagtaatgaaagcactggatagcataacttctatcagagaaatgacacaagcaccatatctggaaatcaagaagcaaatggataaacaggacccccttgctcatcccttactgcaatgggttatatcaagtaatagatcacatattgtgaaactgccagttaacaggcaattgaagtttatgcatactccacatcagttccttcttctcagcagtccaccagccaaagaatccaattttagagctgctaaaaaactctttggaagcacctttgcatttcatggctcacacattgaaaactggcactccatcctgaggaatggtctggttgttgcttctaatacacgattgcagctccatggtgcaatgtatggaagtggaatctatcttagtccaatgtcaagcatatcatttggttactcagggatgaacaagaaacagaaggtgtcagccaaggacgagccagcttcaagcagtaaaagcagcaatacatcacagtcacagaaaaaaggacagcaatcccaattcctgcaaagccgtaacttaaaatgcatagccttatgtgaagtgatcacctcatctgacctgcacaaacatggagagatatgggttgtccccaatactgaccatgtctgcacacgattctttttcgtctatgaagacggccaagtgggagatgcaaatattaatacacaagaaggaggcattcacaaagagatcctccgagtaattggtaatcaaactgctactggttaaaggaccaccatttaattaacatgattcgaaagccttcctcgggttcaaagctggattttgaactgaagaagattataaaattatttattgttattataaacaaaattaaccctttgaatactgattttttttcttagtatttctaagtatctcattaaatacctaaaatggtataagatttatcaattgtagggttatggaatctagtaataaaatttcaacagcacttaaactgaagtttgggttgctcatacaataaacagattgaaaaaactgttttgtgctgatatttttatactaaactctttaactggatatttggtattatataccgacattttaggttaccaaaatagaattgagaacattttataatggcatctaaatctatcagatactttgcaataagtatactgtttgcacattctgatgtgctatatcattagtagtatgggcattctaatgttttggaaggggtgttccctattctatttttcttcataaaaaaagaagtaggtcttagaagcagtgctttgccaaaaagtatgtaatatacacatctatacattcatgcatcaaaatgtgtggttgtgaatatatttgtgtatattcacacgtatgttttgacaagaaagatggcttagcttcacaattctatcctcgtttaatggaaagaagataatatttagtaagcaataaatttggacataaatcaagatatgagccagatttaccaccattcattcactgaaaatatttgcagacaatttttctgtttgtctgaagaaattcagcccttttaaaatgttatctaaaagtcataatttggggaacatacatggcctggtagaccgaatctatattcaaatgattatgtatttaaaagaaagacctcagaatttaaagaaaccatatatatt

SEQ ID NO: 442288 - DNA, 3083 bp, Homo sapiens
agcccctgcctcggccagaggtttcatttttaactgaatatttacgaaagctggaagcgtgcgaggggggtggggtggggtggaaatagcggctgcttcttttccagcgatttatttaatggggatgtgttcaaggcaagagcgaattcagaaggatatcgacgtcgtgatccagaagtccagagctgagaaggactgcctgttgcagatttcagatactctgactccacctttacttttacctacgttggcggccccagaagtgtatcctactcagtacatgtatctgaagattacccagataatacatatgtgtcaagttcagagaatgatgaagatgtgctagttactacagagccaataccagtaatttttcatagaatagcaacagaattaagaaaaacaaatgacattaactgttgcttatccataaaatccaaattacaaaaggaaaatggggaggaatcaagacagaatagtacagtggaggaagattctgaaggtgacaatgattccgaagaattttattacggaggacaggtgaactatgatggggaactgcacaagcacccacaactggaagctgatttgtcagcagttagagagatatatgggccacatgcagtttctctcagggaatatggagccattgatgatgtagatattgatctgcatatcgatgttagctttcttgatgaggagattgctgtggcttgggaagtaattcgaacagaacctataattgttcgactacactgttcacttacacagtatttaaatggcccagtgcccactgttgatgtctttcagatttccacaaaagagcgatttggattgggacatcagctgaaaaaaatcatgcagacatttgttacacagcagtggaaacagagcaaagaaaaatccaattgcctgcacaataaaaagttgtcagagaagaaagtgaagtctcccctgcatttattttctactttgcgcaggtcgccaagttatcctccccctggttgtggcaaaagcaaatccaaactgaaatctgagcaggacggaatctccaaaacgcataagctgctgcggaggacttgttccagcacagtcaagactgatgatgtgtgtgtcacaaagtcacacaggacctttggccgctccttgtccagcgatcccagggcggagcaggctatgacagcaattaaatcgcacaaacttttgaaccgtccttgccctgcagctgttaagtcagaggaatgcctaactctaaagtcgcatagactattgactcgatcttgttctggagatccacgatgtgagcacaacacaaacttgaagccccataaactgttaagcaggtcttactctagtaatctcagaatggaagaattatatggactgaaaaatcacaaattgctcagcaagtcctactccagtgcccccaagtcatccaaaactgagcttttcaaggaacctaacgcagagggcaggaggctctctcttacctcagggcttattggtatcctaacaccatcttcatcttcatcttctcagcttgctccaaatggtgcaaaatgcattccagtacgagaccgtggcttcctggtgcagacaattgagtttgctgaacagcggatccctgtattaaatgaatattgtgtggtttgtgatgagccacatgtgtttcaaaatggccctatgcttaggcctaccgtatgtgaacgggagctgtgtgtgtttgcttttcaaaccctgggagtaatgaatgaagctgctgatgaaatagcaactggagctcaggtggtagatctactagtatccatgtgtaggtctgcgttggaatctcctagaaaagttgtgattttcgagccatatccttctgtggtagatcctaatgatcctcagatgttggccttcaaccccaggaaaaagaactatgatcgagtaatgaaagcactggatagcataacttctatcagagaaatgacacaagcaccatatctggaaatcaagaagcaaatggataaacaggacccccttgctcatcccttactgcaatgggttatatcaagtaatagatcacatattgtgaaactgccagttaacaggcaattgaagtttatgcatactccacatcagttccttcttctcagcagtccaccagccaaagaatccaattttagagctgctaaaaaactctttggaagcacctttgcatttcatggctcacacattgaaaactggcactccatcctgaggaatggtctggttgttgcttctaatacacgattgcagctccatggtgcaatgtatggaagtggaatctatcttagtccaatgtcaagcatatcatttggttactcagggatgaacaagaaacagaaggtgtcagccaaggacgagccagcttcaagcagtaaaagcagcaatacatcacaggtgttgtagtgactttagtgactgcttatgattagtgaactgtggcctcatcagccagcagagcatggaaaaataggctttttaagtctgaaaaattatttaatgtggtcattacttataaaggaataaaactcactctgaaatgcagtaactgaattgcctctatacaataattaatcaacagatatttatttatctcccactataataccagagatactcctaggcagtagagtgtagtgatggccaaaagtagacacatattccgtctcttggagcctacatcctactgaggggtataaataaattaaatacatatttagatagatagaatgctagatattatgaagaaaaataaatcagggaaatgagacatttaatgctgtcaggtggaagagggatctgggatgaatgttaaatgggatggtcaggaaaggatactctgagaaggtgacatttgagtcaagacctacagatgatgagtgcgtgagccatgtgactctctaggagaaagaacattctgggcagagagtagaatgaccatcaatcccatgttgtttcagagaaaacaagtatattctgggaaaattaaaaaatcatctgataagtagtgtgactttaaatttaaaaaaagagagtatagctaatctaatatctga

SEQ ID NO: 442289 - DNA, 924 bp, Homo sapiens
agcccctgcctcggccagaggtttcatttttaactgaatatttacgaaagctggaagcgtgcgaggggggtggggtggggtggaaatagcggctgcttcttttccagcgatttatttaatggggatgtgttcaaggcaagagcgaattcagaaggatatcgacgtcgtgatccagaagtccagagctgagaaggactgcctgttgcagatttcagatactctgactccacctttacttttacctacgttggcggccccagaagtgtatcctactcagtacatgtatctgaagattacccagataatacatatgtgtcaagttcagagaatgatgaagatgtgctagttactacagagccaataccagtaatttttcatagaatagcaacagaattaagaaaaacaaatgacattaactgttgcttatccataaaatccaaattacaaaaggaaaatggggaggaatcaagacagaatagtacagtggaggaagattctgaaggtgacaatgattccgaagaattttattacggaggacaggtgaactatgatggggaactgcacaagcacccacaactggaagctgatttgtcagcagttagagagatatatgggccacatgcagtttctctcagggaatatggagccattgatgatgtagatattgatctgcatatcgatgttagctttcttgatgaggagattgctgtggcttgggaagtaattcgaacagaacctataattgttcgactacactgttcacttacacagtatttaaatggcccagtgtatcctactcagtacatgtatctgaagattacccagataatacatatgtgtcaagttcagagaatgatgaagatgtgctagttactacagagccaataccagtaatttttcatagaatagcaaagaccccaaaag

SEQ ID NO: 442290 - DNA, 332 bp, Homo sapiens
tgaaatgttgtgaatttaattttgatattgagagttggaaaaaagttttgtgattgattcctttttcttttgtagcctaccgtatgtgaacgggagctgtgtgtgtttgcttttcaaaccctgggagtaatgaatgaagctgctgatgaaatagcaactggagctcaggtagtaacacaggatactaattatttcttattttgctttgaaaaatttgttccagtccactagttatcttcattctgctattctttggggaaaatatttgataacttctagttaagtggcaaattggcatttgattttttttatatgtaaactaaatgtgatct

SEQ ID NO: 442291 - DNA, 319 bp, Homo sapiens
tgaagtttatgcatactccacatcagttccttcttctcagcagtccaccagccaaagaatccaattttagagctgctaaaaaactctttggaagcacctttgcatttcagtgagtaaggcttaatgttaatgggggtgtgctcccattaacattttccagaaatgtatggggaagatatcactgtctttcagtaaatgatcattcagtagatggtcattcaacagatggtcatgtagtcaactacataatacttgatttggcaatccagaaccttcagaaggcaccatgacttattatgttttgaccactttgaagata

SEQ ID NO: 442292 - DNA, 403 bp, Homo sapiens
caacacacggtagttatataggacatgaacttgctgtctacatagttcttaagtcaggacctatctgcttttggtaatacttagatgagtccctttttattgttataccagttgttattcaaattataaagttgttacatggtctttcactgtttttatctatatttcttcatagacaataaggctaaacaatttttatgtgttcattagtgcttgtatttttgctttagatttcaacgagaagagatatattaagtcggaatggactaggattcctttagaataaagtggttctttaattttattttccacttaacagtgatcacctcatctgacctgcacaaacatggagagatatgggttgtccccaatactgaccatgtctgcacacgattctttttcg

SEQ ID NO: 442293 - DNA, 413 bp, Homo sapiens
aaaaaaaaaatggaagaaaggggaaaatttaggcatgacatagaatgggctgttctgtgtttcgcaatgagaacacattgttaaatacacctgaaaaacaaccgtataatttgcttttgattctcttgggctatattttaggtatcaaatagcatttctaagctgttttaaatgctgccatcttttaaaatgtttttatatttttatgttttgtatttcagctatgaagacggccaagtgggagatgcaaatattaatacacaagaaggaggcattcacaaagagatcctccgagtaattggtaatcaaactgctactggttaaaggaccaccatttaattaacatgattcgaaagccttcctcgggttcaaagctggattttgaactgaagaagattataaaattatttatt

SEQ ID NO: 442294 - DNA, 468 bp, Homo sapiens
gcctactactactaaattcgcggccgcgtcgattaactgttgcttatccataaaatccaaattacaaaaggaaaatggggaggaatcaagacagaatagtacagtggaggaagattctgaaggtgacaatgattccgaagaattttattacggaggacaggtgaactatgatggggaactgcacaagcacccacaactggaagctgatttgtcagcagttagagagatatatgggccacatgcagtttctctcaggtaaataagtatcactggtgaataaaattaaagttttatggtaagtcattgaaatttacttttggagtaatttaaaggaaaaatttggggttttaattgtattttaaagtgttttagaaagagtctactgtttatccttacacaaaatgacatatttatggctatttttttgatacatgtggtttaagattacattgattgcattaaaaatta

SEQ ID NO: 442295 - DNA, 3666 bp, Homo sapiens
cagagcagtatctcatttctgaacacctggattgtagctttcccttgactgtcaaaggaggtggttttaaaatcaagccaaacaggtttccatcttttaggaagaccctggaacgtgccagttgattctgaccatttctcatgaacagaaacacctaggaagggagaactgggatttatttaatggggatgtgttcaaggcaagagcgaattcagaaggatatcgacgtcgtgatccagaagtccagagctgagaaggactgcctgttgcagatttcagatactctgactccacctttacttttacctacgttggcggccccagaagtgtatcctactcagtacatgtatctgaagattacccagataatacatatgtgtcaagttcagagaatgatgaagatgtgctagttactacagagccaataccagtaatttttcatagaatagcaacagaattaagaaaaacaaatgacattaactgttgcttatccataaaatccaaattacaaaaggaaaatggggaggaatcaagacagaatagtacagtggaggaagattctgaaggtgacaatgattccgaagaattttattacggaggacaggtgaactatgatggggaactgcacaagcacccacaactggaagctgatttgtcagcagttagagagatatatgggccacatgcagtttctctcagggaatatggagccattgatgatgtagatattgatctgcatatcgatgttagctttcttgatgaggagattgctgtggcttgggaagtaattcgaacagaacctataattgttcgactacactgttcacttacacagtatttaaatggcccagtgcccactgttgatgtctttcagatttccacaaaagagcgatttggattgggacatcagctgaaaaaaatcatgcagacatttgttacacagcagtggaaacagagcaaagaaaaatccaattgcctgcacaataaaaagttgtcagagaagaaagtgaagtctcccctgcatttattttctactttgcgcaggtcgccaagttatcctccccctggttgtggcaaaagcaaatccaaactgaaatctgagcaggacggaatctccaaaacgcataagctgctgcggaggacttgttccagcacagtcaagactgatgatgtgtgtgtcacaaagtcacacaggacctttggccgctccttgtccagcgatcccagggcggagcaggctatgacagcaattaaatcgcacaaacttttgaaccgtccttgccctgcagctgttaagtcagaggaatgcctaactctaaagtcgcatagactattgactcgatcttgttctggagatccacgatgtgagcacaacacaaacttgaagccccataaactgttaagcaggtcttactctagtaatctcagaatggaagaattatatggactgaaaaatcacaaattgctcagcaagtcctactccagtgcccccaagtcatccaaaactgagcttttcaaggaacctaacgcagagggcaggaggctctctcttacctcagggcttattggtatcctaacaccatcttcatcttcatcttctcagcttgctccaaatggtgcaaaatgcattccagtacgagaccgtggcttcctggtgcagacaattgagtttgctgaacagcggatccctgtattaaatgaatattgtgtggtttgtgatgagccacatgtgtttcaaaatggccctatgcttaggcctaccgtatgtgaacgggagctgtgtgtgtttgcttttcaaaccctgggagtaatgaatgaagctgctgatgaaatagcaactggagctcaggtggtagatctactagtatccatgtgtaggtctgcgttggaatctcctagaaaagttgtgattttcgagccatatccttctgtggtagatcctaatgatcctcagatgttggccttcaaccccaggaaaaagaactatgatcgagtaatgaaagcactggatagcataacttctatcagagaaatgacacaagcaccatatctggaaatcaagaagcaaatggataaacaggacccccttgctcatcccttactgcaatgggttatatcaagtaatagatcacatattgtgaaactgccagttaacaggcaattgaagtttatgcatactccacatcagttccttcttctcagcagtccaccagccaaagaatccaattttagagctgctaaaaaactctttggaagcacctttgcatttcatggctcacacattgaaaactggcactccatcctgaggaatggtctggttgttgcttctaatacacgattgcagctccatggtgcaatgtatggaagtggaatctatcttagtccaatgtcaagcatatcatttggttactcagggatgaacaagaaacagaaggtgtcagccaaggacgagccagcttcaagcagtaaaagcagcaatacatcacagtcacagaaaaaaggacagcaatcccaattcctgcaaagccgtaacttaaaatgcatagccttatgtgaagtgatcacctcatctgacctgcacaaacatggagagatatgggttgtccccaatactgaccatgtctgcacacgattctttttcgtctatgaagacggccaagtgggagatgcaaatattaatacacaagaaggaggcattcacaaagagatcctccgagtaattggtaatcaaactgctactggttaaaggaccaccatttaattaacatgattcgaaagccttcctcgggttcaaagctggattttgaactgaagaagattataaaattatttattgttattataaacaaaattaaccctttgaatactgattttttttcttagtatttctaagtatctcattaaatacctaaaatggtataagatttatcaattgtagggttatggaatctagtaataaaatttcaacagcacttaaactgaagtttgggttgctcatacaataaacagattgaaaaaactgttttgtgctgatatttttatactaaactctttaactggatatttggtattatataccgacattttaggttaccaaaatagaattgagaacattttataatggcatctaaatctatcagatactttgcaataagtatactgtttgcacattctgatgtgctatatcattagtagtatgggcattctaatgttttggaaggggtgttccctattctatttttcttcataaaaaaagaagtaggtcttagaagcagtgctttgccaaaaagtatgtaatatacacatctatacattcatgcatcaaaatgtgtggttgtgaatatatttgtgtatattcacacgtatgttttgacaagaaagatggcttagcttcacaattctatcctcgtttaatggaaagaagataatatttagtaagcaataaatttggacataaatcaagatatgagccagatttaccaccattcattcactgaaaatatttgcagacaatttttctgtttgtctgaagaaattcagcccttttaaaatgttatctaaaagtcataatttggggaacatacatggcctggtagaccgaatctatattcaaatgattatgtatttaaaagaaagacctcagaatttaaagaaaccatatatatt

SEQ ID NO: 442296 - DNA, 1883 bp, Homo sapiens
agaaacaatggcaaagcactggataaaacctgaagggtagtaactatcttatgtgtatatttcaaggtggtagatctactagtatccatgtgtaggtctgcgttggaatctcctagaaaagttgtgattttcgagccatatccttctgtggtagatcctaatgatcctcagatgttggccttcaaccccaggaaaaagaactatgatcgagtaatgaaagcactggatagcataacttctatcagagaaatgacacaagcaccatatctggaaatcaagaagcaaatggataaacaggacccccttgctcatcccttactgcaatgggttatatcaagtaatagatcacatattgtgaaactgccagttaacaggcaattgaagtttatgcatactccacatcagttccttcttctcagcagtccaccagccaaagaatccaattttagagctgctaaaaaactctttggaagcacctttgcatttcatggctcacacattgaaaactggcactccatcctgaggaatggtctggttgttgcttctaatacacgattgcagctccatggtgcaatgtatggaagtggaatctatcttagtccaatgtcaagcatatcatttggttactcagggatgaacaagaaacagaaggtgtcagccaaggacgagccagcttcaagcagtaaaagcagcaatacatcacagtcacagaaaaaaggacagcaatcccaattcctgcaaagccgtaacttaaaatgcatagccttatgtgaagtgatcacctcatctgacctgcacaaacatggagagatatgggttgtccccaatactgaccatgtctgcacacgattctttttcgtctatgaagacggccaagtgggagatgcaaatattaatacacaagaaggaggcattcacaaagagatcctccgagtaattggtaatcaaactgctactggttaaaggaccaccatttaattaacatgattcgaaagccttcctcgggttcaaagctggattttgaactgaagaagattataaaattatttattgttattataaacaaaattaaccctttgaatactgattttttttcttagtatttctaagtatctcattaaatacctaaaatggtataagatttatcaattgtagggttatggaatctagtaataaaatttcaacagcacttaaactgaagtttgggttgctcatacaataaacagattgaaaaaactgttttgtgctgatatttttatactaaactctttaactggatatttggtattatataccgacattttaggttaccaaaatagaattgagaacattttataatggcatctaaatctatcagatactttgcaataagtatactgtttgcacattctgatgtgctatatcattagtagtatgggcattctaatgttttggaaggggtgttccctattctatttttcttcataaaaaaagaagtaggtcttagaagcagtgctttgccaaaaagtatgtaatatacacatctatacattcatgcatcaaaatgtgtggttgtgaatatatttgtgtatattcacacgtatgttttgacaagaaagatggcttagcttcacaattctatcctcgtttaatggaaagaagataatatttagtaagcaataaatttggacataaatcaagatatgagccagatttaccaccattcattcactgaaaatatttgcagacaatttttctgtttgtctgaagaaattcagcccttttaaaatgttatctaaaagtcataatttggggaacatacatggcctggtagaccgaatctatattcaaatgattatgtatttaaaagaaagacctcagaatttaaagaaaccatatatatt

SEQ ID NO: 442297 - DNA, 2490 bp, Homo sapiens
agcccctgcctcggccagaggtttcatttttaactgaatatttacgaaagctggaagcgtgcgaggggggtggggtggggtggaaatagcggctgcttcttttccagcgatttatttaatggggatgtgttcaaggcaagagcgaattcagaaggatatcgacgtcgtgatccagaagtccagagctgagaaggactgcctgttgcagatttcagatactctgactccacctttacttttacctacgttggcggccccagaagtgtatcctactcagtacatgtatctgaagattacccagataatacatatgtgtcaagttcagagaatgatgaagatgtgctagttactacagagccaataccagtaatttttcatagaatagcaacagaattaagaaaaacaaatgacattaactgttgcttatccataaaatccaaattacaaaaggaaaatggggaggaatcaagacagaatagtacagtggaggaagattctgaaggtgacaatgattccgaagaattttattacggaggacaggtgaactatgatggggaactgcacaagcacccacaactggaagctgatttgtcagcagttagagagatatatgggccacatgcagtttctctcagggaatatggagccattgatgatgtagatattgatctgcatatcgatgttagctttcttgatgaggagattgctgtggcttgggaagtaattcgaacagaacctataattgttcgactacactgttcacttacacagtatttaaatggcccagtgcccactgttgatgtctttcagatttccacaaaagagcgatttggattgggacatcagctgaaaaaaatcatgcagacatttgttacacagcagtggaaacagagcaaagaaaaatccaattgcctgcacaataaaaagttgtcagagaagaaagtgaagtctcccctgcatttattttctactttgcgcaggtcgccaagttatcctccccctggttgtggcaaaagcaaatccaaactgaaatctgagcaggacggaatctccaaaacgcataagctgctgcggaggacttgttccagcacagtcaagactgatgatgtgtgtgtcacaaagtcacacaggacctttggccgctccttgtccagcgatcccagggcggagcaggctatgacagcaattaaatcgcacaaacttttgaaccgtccttgccctgcagctgttaagtcagaggaatgcctaactctaaagtcgcatagactattgactcgatcttgttctggagatccacgatgtgagcacaacacaaacttgaagccccataaactgttaagcaggtcttactctagtaatctcagaatggaagaattatatggactgaaaaatcacaaattgctcagcaagtcctactccagtgcccccaagtcatccaaaactgagcttttcaaggaacctaacgcagagggcaggaggctctctcttacctcagggcttattggtatcctaacaccatcttcatcttcatcttctcagcttgctccaaatggtgcaaaatgcattccagtacgagaccgtggcttcctggtgcagacaattgagtttgctgaacagcggatccctgtattaaatgaatattgtgtggtttgtgatgagccacatgtgtttcaaaatggccctatgcttaggcctaccgtatgtgaacgggagctgtgtgtgtttgcttttcaaaccctgggagtaatgaatgaagctgctgatgaaatagcaactggagctcaggtggtagatctactagtatccatgtgtaggtctgcgttggaatctcctagaaaagttgtgattttcgagccatatccttctgtggtagatcctaatgatcctcagatgttggccttcaaccccaggaaaaagaactatgatcgagtaatgaaagcactggatagcataacttctatcagagaaatgacacaagcaccatatctggaaatcaagaagcaaatggataaacaggacccccttgctcatcccttactgcaatgggttatatcaagtaatagatcacatattgtgaaactgccagttaacaggcaattgaagtttatgcatactccacatcagttccttcttctcagcagtccaccagccaaagaatccaattttagagctgctaaaaaactctttggaagcacctttgcatttcatggctcacacattgaaaactggcactccatcctgaggaatggtctggttgttgcttctaatacacgattgcagctccatggtgcaatgtatggaagtggaatctatcttagtccaatgtcaagcatatcatttggttactcagggatgacaagaaacagaagtgtcaccaaggacgcacccgcgtcaagcagtaacacacccatacaccacagtcacagcgacaggtccagccaagccgatacgcctacagccgaactaaaagcatccggtaccgagctcgat

SEQ ID NO: 442298 - DNA, 985 bp, Homo sapiens
ggtttcaccatgttggccaggctggtctcaaactcctgacttcaggtgatccgcctgcctcagcctcccaaagttctgggattacagacatgagccaccatgcccagccctggcctctgatttttaagtgagatcattgcattcttttctcatcatcctccccattcccattgctccccgtaagagtgactttgtcttgctctggcttgtggttggataagaaccaaagctcacgaagctgtggggcaccctgtttaccacaggatcggatcgaagagtcagaccaaggcccttatgccatcatcctggctcccacccgtgagttggctcaacagattgaggaagagaccatcaagtttgggaaaccgctaggtatccgcactgtggctgtcattggtggcatctccagagaagaccagggcttcaggctgcgcatgggttgtgaggtttgtttttctatctagcagccagcctgctgtctgggaaggctatcttggggctttgtttctagtttctggaatatatgtgcagtagtatgaagaaaggagctggtttatatatatgtgctatttattgagaacttatgcaccagggtttatatcacaaatagtatatatcatatatattagctcattaattctcacaataatgtatgagagtggtatttccttgttatagatcaagctgaggttcaggttaataactgcctgaagtcacaaacagctggcaatgggcagagctgagactcatatccatagcctgtgcttttagttactctttactctgccagaccaaatctttgactttgtgcattgccttcatctcaggaaagtggaggagagctctttatgagaagtctgctgtagaaatttagtctttttacaattttttaaaaaaatttagtctttatacaacccccttcatagtaccccttagtctctcccatctaagaagttccttcttcaggatctgaaatgatttgcca

SEQ ID NO: 442299 - DNA, 3282 bp, Homo sapiens
cgcggccgggggggtggggggtgttcatctccgcgaccaggaaacgggaaagatggcgacggctccgcgacgttgaggccgcgttgggcggttcagactcagggtgatggcaggagagctggctgacaaaaaggaccgtgatgcatcaccttccaaggaggaaaggaagcgatcacggactcctgacagagagcgggatagagaccgggaccggaagtcttccccatctaaagatagaaagcggcatcgttcaagggatagacgtcgaggaggcagccgttctcgctctcgttcccgttccaaatctgcagaaagagaacgacggcacaaagaacgagaacgagataaggagcgggatcggaataagaaggaccgagatcgagacaaggatgggcacagacgggacaaggaccgtaaacgatccagcttatctcctggtcgaggaaaagactttaaatctcggaaggacagagactctaagaaggatgaagaggatgaacatggtgataagaagcctaaggcccagccattatccctggaggagcttctggccaagaaaaaggctgaggaagaagctgaggctaagcccaagttcctctctaaagcagaacgagaggctgaagctctaaagcgacggcagcaggaggtggaagagcggcagaggatgcttgaagaagagaggaagaaaaggaaacagttccaagacttgggcaggaagatgttggaagatcctcaggaacgggaacgtcgggaacgcagggagaggatggaacgggagaccaatggaaatgaggatgaggaagggcggcagaagatccgggaagagaaggataagagcaaggaactgcatgccattaaggagcgttacctgggtggcatcaaaaagcggcgccgaacgagacatctcaatgaccggaaatttgtttttgagtgggatgcatctgaggacacatccattgactacaaccccctgtacaaagaacggcaccaggtgcagttgttagggcgaggcttcattgcaggcattgacctcaagcagcagaagcgagagcagtcacgtttctatggagacctaatggagaagaggcgaaccctggaagaaaaggagcaggaggaggcaagactccgcaaacttcgtaagaaggaagccaagcagcgctgggatgatcgtcattggtctcagaaaaagttagatgagatgacggacagggactggcggatcttccgtgaggactacagcatcaccaccaaaggtggcaagatccccaatcccatccgatcctggaaagactcttctctgcccccacacatcttggaggtcattgataagtgtggctacaaggaaccaacacctatacagcgtcaggcaattcccattgggctacagaatcgtgacatcattggtgtggctgagactggcagtggcaagacagcagccttcctcatccctctgctggtctggatcaccacacttcccaaaattgacaggatcgaagagtcagaccaaggcccttatgccatcatcctggctcccacccgtgagttggctcaacagattgaggaagagaccatcaagtttgggaaaccgctaggtatccgcactgtggctgtcattggtggcatctccagagaagaccagggcttcaggctgcgcatgggttgtgagattgtgattgctacccctgggcgtttgattgatgtgctggagaaccgctacctggtgctgagccgctgtacctatgtggttctggatgaggcagataggatgattgacatgggctttgagccagatgtccagaagatcctggagcacatgcctgtcagcaaccagaagccagacacggatgaggctgaggaccctgagaagatgctggccaactttgagtcgggaaaacataagtaccgccaaacagtcatgttcacggccaccatgcccccagcggtggagcgtctggccaggagctatcttcggcgacctgctgtggtgtacattggctccgcaggcaagccccatgagcgtgtggaacagaaggtcttcctcatgtcagagtcagaaaagaggaaaaagctgctggcaatcttggagcaaggctttgacccacccatcattatttttgtcaaccagaagaagggctgcgacgtgttggccaaatccctggagaagatggggtacaatgcttgcacactgcacggtggaaaaggccaggagcagcgagagtttgcgttgtccaacctcaaggctggggccaaggatattttggtggctacagatgtggctggtcgtggtattgacatccaagatgtgtctatggttgtcaactatgatatggccaaaaatattgaagattacatccaccgcattggccgcacgggacgagcaggcaagagtggggtggccatcaccttcctcacaaaagaggactctgctgtgttctacgagctgaagcaagctatcctggaaagcccagtgtcttcctgtccccccgaactagccaaccacccagatgcccagcataagccaggcaccatcctcaccaagaagcgccgggaagagaccatctttgcctgacacagcactcttcctgtgggctgagggcatctccaaagctgcctgatgcctgtttttcagaaccctcacatccctctttccaggtcctcactcttgggatatgggggcttaggaaaacaatccaactccctagcccagaccctcaggtcaggaggcctgcgtgtggggctgcaaaaggagaggacgacgctgtcggaggcagggagagcaaattaccacagcttcttggcccagttctgcccttctttgctttgggattgcactgggccatcagctcatgccaggctatgggggcagccagttggcattgctccccagactgaacagaaacctggccgccggatgggacctcctttggcacagacttgactgtgtaactgcataaactgcagtagcatcattgccctagatgccccaggagacctggcaccatgaggattacagacagtggaatcttactgtcatctggacagctgttttcctgtttggatggtaaaggaagttgagagtctttagacctgtgcacagccccgcaccaaggggtgctgtatgctctaggcatcccctcccccaggggattttctaagtagatggggggacacggtgaactggctgtgtccatctttgtcactgagtgaaatctctgttttctattctctgagaagataagtttgtatgttctgagaataaatacatgaatattaagactgtta

SEQ ID NO: 442300 - DNA, 3270 bp, Homo sapiens
cacgcgtcgccacgcgtcgccgcgacaggaaacgggaaagatggcgacggctccgcgacgttgaggccgcgttgggcggttcagactcagggtgatggcaggagagctggctgacaaaaaggaccgtgatgcatcaccttccaaggaggaaaggaagcgatcacggactcctgacagagagcgggatagagaccgggaccggaagtcttccccatctaaagatagaaagcggcatcgttcaagggatagacgtcgaggaggcagccgttctcgctctcgttcccgttccaaatctgcagaaagagaacgacggcacaaagaacgagaacgagataaggagcgggatcggaataagaaggaccgagatcgagacaaggatgggcacagacgggacaaggaccgtaaacgatccagcttatctcctggtcgaggaaaagactttaaatctcggaaggacagagactctaagaaggatgaagaggatgaacatggtgataagaagcctaaggcccagccattatccctggaggagcttctggccaagaaaaaggctgaggaagaagctgaggctaagcccaagttcctctctaaagcagaacgagaggctgaagctctaaagcgacggcagcaggaggtggaagagcggcagaggatgcttgaagaagagaggaagaaaaggaaacagttccaagacttgggcaggaagatgttggaagatcctcaggaacgggaacgtcgggaacgcagggagaggatggaacgggagaccaatggaaatgaggatgaggaagggcggcagaagatccgggaagagaaggataagagcaaggaactgcatgccattaaggagcgttacctgggtggcatcaaaaagcggcgccgaacgagacatctcaatgaccggaaatttgtttttgagtgggatgcatctgaggacacatccattgactacaaccccctgtacaaagaacggcaccaggtgcagttgttagggcgaggcttcattgcaggcattgacctcaagcagcagaagcgagagcagtcacgtttctatggagacctaatggagaagaggcgaaccctggaagaaaaggagcaggaggaggcaagactccgcaaacttcgtaagaaggaagccaagcagcgctgggatgatcgtcattggtctcagaaaaagttagatgagatgacggacagggactggcggatcttccgtgaggactacagcatcaccaccaaaggtggcaagatccccaatcccatccgatcctggaaagactcttctctgcccccacacatcttggaggtcattgataagtgtggctacaaggaaccaacacctatacagcgtcaggcaattcccattgggctacagaatcgtgacatcattggtgtggctgagactggcagtggcaagacagcagccttcctcatccctctgctggtctggatcaccacacttcccaaaattgacaggatcgaagagtcagaccaaggcccttatgccatcatcctggctcccacccgtgagttggctcaacagattgaggaagagaccatcaagtttgggaaaccgctaggtatccgcactgtggctgtcattggtggcatctccagagaagaccagggcttcaggctgcgcatgggttgtgagattgtgattgctacccctgggcgtttgattgatgtgctggagaaccgctacctggtgctgagccgctgtacctatgtggttctggatgaggcagataggatgattgacatgggctttgagccagatgtccagaagatcctggagcacatgcctgtcagcaaccagaagccagacacggatgaggctgaggaccctgagaagatgctggccaactttgagtcgggaaaacataagtaccgccaaacagtcatgttcacggccaccatgcccccagcggtggagcgtctggccaggagctatcttcggcgacctgctgtggtgtacattggctccgcaggcaagccccatgagcgtgtggaacagaaggtcttcctcatgtcagagtcagaaaagaggaaaaagctgctggcaatcttggagcaaggctttgacccacccatcattatttttgtcaaccagaagaagggctgcgacgtgttggccaaatccctggagaagatggggtacaatgcttgcacactgcacggtggaaaaggccaggagcagcgagagtttgcgttgtccaacctcaaggctggggccaaggatattttggtggctacagatgtggctggtcgtggtattgacatccaagatgtgtctatggttgtcaactatgatatggccaaaaatattgaagattacatccaccgcattggccgcacgggacgagcaggcaagagtggggtggccatcaccttcctcacaaaagaggactctgctgtgttctacgagctgaagcaagctatcctggaaagcccagtgtcttcctgtccccccgaactagccaaccacccagatgcccagcataagccaggcaccatcctcaccaagaagcgccgggaagagaccatctttgcctgacacagcactcttcctgtgggctgagggcatctccaaagctgcctgatgcctgtttttcagaaccctcacatccctctttccaggtcctcactcttgggatatgggggcttaggaaaacaatccaactccctagcccagaccctcaggtcaggaggcctgcgtgtggggctgcaaaaggagaggacgacgctgtcggaggcagggagagcaaattaccacagcttcttggcccagttctgcccttctttgctttgggattgcactgggccatcagctcatgccaggctatgggggcagccagttggcattgctccccagactgaacagaaacctggccgccggatgggacctcctttggcacagacttgactgtgtaactgcataaactgcagtagcatcattgccctagatgccccaggagacctggcaccatgaggattacagacagtggaatcttactgtcatctggacagctgttttcctgtttggatggtaaaggaagttgagagtctttagacctgtgcacagccccgcaccaaggggtgctgtatgctctaggcatcccctcccccaggggattttctaagtagatggggggacacggtgaactggctgtgtccatctttgtcactgagtgaaatctctgttttctattctctgagaagataagtttgtatgttctgagaataaatacatgaatattaagactgtta

SEQ ID NO: 442301 - DNA, 3362 bp, Homo sapiens
cacgcgtcgccacgcgtcgccgcgacaggaaacgggaaagatggcgacggctccgcgacgttgaggccgcgttgggcggttcagactcagggtgagatggggtttcaccgtgttggccaggatggtctcaatctcctgacctcatgatctgcccgctttggcctccaaaagtgctaggattacacgatggcaggagagctggctgacaaaaaggaccgtgatgcatcaccttccaaggaggaaaggaagcgatcacggactcctgacagagagcgggatagagaccgggaccggaagtcttccccatctaaagatagaaagcggcatcgttcaagggatagacgtcgaggaggcagccgttctcgctctcgttcccgttccaaatctgcagaaagagaacgacggcacaaagaacgagaacgagataaggagcgggatcggaataagaaggaccgagatcgagacaaggatgggcacagacgggacaaggaccgtaaacgatccagcttatctcctggtcgaggaaaagactttaaatctcggaaggacagagactctaagaaggatgaagaggatgaacatggtgataagaagcctaaggcccagccattatccctggaggagcttctggccaagaaaaaggctgaggaagaagctgaggctaagcccaagttcctctctaaagcagaacgagaggctgaagctctaaagcgacggcagcaggaggtggaagagcggcagaggatgcttgaagaagagaggaagaaaaggaaacagttccaagacttgggcaggaagatgttggaagatcctcaggaacgggaacgtcgggaacgcagggagaggatggaacgggagaccaatggaaatgaggatgaggaagggcggcagaagatccgggaagagaaggataagagcaaggaactgcatgccattaaggagcgttacctgggtggcatcaaaaagcggcgccgaacgagacatctcaatgaccggaaatttgtttttgagtgggatgcatctgaggacacatccattgactacaaccccctgtacaaagaacggcaccaggtgcagttgttagggcgaggcttcattgcaggcattgacctcaagcagcagaagcgagagcagtcacgtttctatggagacctaatggagaagaggcgaaccctggaagaaaaggagcaggaggaggcaagactccgcaaacttcgtaagaaggaagccaagcagcgctgggatgatcgtcattggtctcagaaaaagttagatgagatgacggacagggactggcggatcttccgtgaggactacagcatcaccaccaaaggtggcaagatccccaatcccatccgatcctggaaagactcttctctgcccccacacatcttggaggtcattgataagtgtggctacaaggaaccaacacctatacagcgtcaggcaattcccattgggctacagaatcgtgacatcattggtgtggctgagactggcagtggcaagacagcagccttcctcatccctctgctggtctggatcaccacacttcccaaaattgacaggatcgaagagtcagaccaaggcccttatgccatcatcctggctcccacccgtgagttggctcaacagattgaggaagagaccatcaagtttgggaaaccgctaggtatccgcactgtggctgtcattggtggcatctccagagaagaccagggcttcaggctgcgcatgggttgtgagattgtgattgctacccctgggcgtttgattgatgtgctggagaaccgctacctggtgctgagccgctgtacctatgtggttctggatgaggcagataggatgattgacatgggctttgagccagatgtccagaagatcctggagcacatgcctgtcagcaaccagaagccagacacggatgaggctgaggaccctgagaagatgctggccaactttgagtcgggaaaacataagtaccgccaaacagtcatgttcacggccaccatgcccccagcggtggagcgtctggccaggagctatcttcggcgacctgctgtggtgtacattggctccgcaggcaagccccatgagcgtgtggaacagaaggtcttcctcatgtcagagtcagaaaagaggaaaaagctgctggcaatcttggagcaaggctttgacccacccatcattatttttgtcaaccagaagaagggctgcgacgtgttggccaaatccctggagaagatggggtacaatgcttgcacactgcacggtggaaaaggccaggagcagcgagagtttgcgttgtccaacctcaaggctggggccaaggatattttggtggctacagatgtggctggtcgtggtattgacatccaagatgtgtctatggttgtcaactatgatatggccaaaaatattgaagattacatccaccgcattggccgcacgggacgagcaggcaagagtggggtggccatcaccttcctcacaaaagaggactctgctgtgttctacgagctgaagcaagctatcctggaaagcccagtgtcttcctgtccccccgaactagccaaccacccagatgcccagcataagccaggcaccatcctcaccaagaagcgccgggaagagaccatctttgcctgacacagcactcttcctgtgggctgagggcatctccaaagctgcctgatgcctgtttttcagaaccctcacatccctctttccaggtcctcactcttgggatatgggggcttaggaaaacaatccaactccctagcccagaccctcaggtcaggaggcctgcgtgtggggctgcaaaaggagaggacgacgctgtcggaggcagggagagcaaattaccacagcttcttggcccagttctgcccttctttgctttgggattgcactgggccatcagctcatgccaggctatgggggcagccagttggcattgctccccagactgaacagaaacctggccgccggatgggacctcctttggcacagacttgactgtgtaactgcataaactgcagtagcatcattgccctagatgccccaggagacctggcaccatgaggattacagacagtggaatcttactgtcatctggacagctgttttcctgtttggatggtaaaggaagttgagagtctttagacctgtgcacagccccgcaccaaggggtgctgtatgctctaggcatcccctcccccaggggattttctaagtagatggggggacacggtgaactggctgtgtccatctttgtcactgagtgaaatctctgttttctattctctgagaagataagtttgtatgttctgagaataaatacatgaatattaagactgtta

SEQ ID NO: 442302 - DNA, 3112 bp, Homo sapiens
cgcctgcgtaaacttcggctaggtagcgaaggctggtggttcggaagtcttccccatctaaagatagaaagcggcatcgttcaagggatagacgtcgaggaggcagccgttctcgctctcgttcccgttccaaatctgcagaaagagaacgacggcacaaagaacgagaacgagataaggagcgggatcggaataagaaggaccgagatcgagacaaggatgggcacagacgggacaaggaccgtaaacgatccagcttatctcctggtcgaggaaaagactttaaatctcggaaggacagagactctaagaaggatgaagaggatgaacatggtgataagaagcctaaggcccagccattatccctggaggagcttctggccaagaaaaaggctgaggaagaagctgaggctaagcccaagttcctctctaaagcagaacgagaggctgaagctctaaagcgacggcagcaggaggtggaagagcggcagaggatgcttgaagaagagaggaagaaaaggaaacagttccaagacttgggcaggaagatgttggaagatcctcaggaacgggaacgtcgggaacgcagggagaggatggaacgggagaccaatggaaatgaggatgaggaagggcggcagaagatccgggaagagaaggataagagcaaggaactgcatgccattaaggagcgttacctgggtggcatcaaaaagcggcgccgaacgagacatctcaatgaccggaaatttgtttttgagtgggatgcatctgaggacacatccattgactacaaccccctgtacaaagaacggcaccaggtgcagttgttagggcgaggcttcattgcaggcattgacctcaagcagcagaagcgagagcagtcacgtttctatggagacctaatggagaagaggcgaaccctggaagaaaaggagcaggaggaggcaagactccgcaaacttcgtaagaaggaagccaagcagcgctgggatgatcgtcattggtctcagaaaaagttagatgagatgacggacagggactggcggatcttccgtgaggactacagcatcaccaccaaaggtggcaagatccccaatcccatccgatcctggaaagactcttctctgcccccacacatcttggaggtcattgataagtgtggctacaaggaaccaacacctatacagcgtcaggcaattcccattgggctacagaatcgtgacatcattggtgtggctgagactggcagtggcaagacagcagccttcctcatccctctgctggtctggatcaccacacttcccaaaattgacaggatcgaagagtcagaccaaggcccttatgccatcatcctggctcccacccgtgagttggctcaacagattgaggaagagaccatcaagtttgggaaaccgctaggtatccgcactgtggctgtcattggtggcatctccagagaagaccagggcttcaggctgcgcatgggttgtgagattgtgattgctacccctgggcgtttgattgatgtgctggagaaccgctacctggtgctgagccgctgtacctatgtggttctggatgaggcagataggatgattgacatgggctttgagccagatgtccagaagatcctggagcacatgcctgtcagcaaccagaagccagacacggatgaggctgaggaccctgagaagatgctggccaactttgagtcgggaaaacataagtaccgccaaacagtcatgttcacggccaccatgcccccagcggtggagcgtctggccaggagctatcttcggcgacctgctgtggtgtacattggctccgcaggcaagccccatgagcgtgtggaacagaaggtcttcctcatgtcagagtcagaaaagaggaaaaagctgctggcaatcttggagcaaggctttgacccacccatcattatttttgtcaaccagaagaagggctgcgacgtgttggccaaatccctggagaagatggggtacaatgcttgcacactgcacggtggaaaaggccaggagcagcgagagtttgcgttgtccaacctcaaggctggggccaaggatattttggtggctacagatgtggctggtcgtggtattgacatccaagatgtgtctatggttgtcaactatgatatggccaaaaatattgaagattacatccaccgcattggccgcacgggacgagcaggcaagagtggggtggccatcaccttcctcacaaaagaggactctgctgtgttctacgagctgaagcaagctatcctggaaagcccagtgtcttcctgtccccccgaactagccaaccacccagatgcccagcataagccaggcaccatcctcaccaagaagcgccgggaagagaccatctttgcctgacacagcactcttcctgtgggctgagggcatctccaaagctgcctgatgcctgtttttcagaaccctcacatccctctttccaggtcctcactcttgggatatgggggcttaggaaaacaatccaactccctagcccagaccctcaggtcaggaggcctgcgtgtggggctgcaaaaggagaggacgacgctgtcggaggcagggagagcaaattaccacagcttcttggcccagttctgcccttctttgctttgggattgcactgggccatcagctcatgccaggctatgggggcagccagttggcattgctccccagactgaacagaaacctggccgccggatgggacctcctttggcacagacttgactgtgtaactgcataaactgcagtagcatcattgccctagatgccccaggagacctggcaccatgaggattacagacagtggaatcttactgtcatctggacagctgttttcctgtttggatggtaaaggaagttgagagtctttagacctgtgcacagccccgcaccaaggggtgctgtatgctctaggcatcccctcccccaggggattttctaagtagatggggggacacggtgaactggctgtgtccatctttgtcactgagtgaaatctctgttttctattctctgagaagataagtttgtatgttctgagaataaatacatgaatattaagactgtta

SEQ ID NO: 442303 - DNA, 3333 bp, Homo sapiens
cgcggccgggggggtggggggtgttcatctccgcgaccaggaaacgggaaagatggcgacggctccgcgacgttgaggccgcgttgggcggttcagactcagggtgatggcaggagagctggctgacaaaaaggaccgtgatgcatcaccttccaaggaggaaaggaagcgatcacggactcctgacagagagcgggatagagaccgggaccggaagtcttccccatctaaagatagaaagcggcatcgttcaagggatagacgtcgaggaggcagccgttctcgctctcgttcccgttccaaatctgcagaaagagaacgacggcacaaagaacgagaacgagataaggagcgggatcggaataagaaggaccgagatcgagacaaggatgggcacagacgggacaaggaccgtaaacgatccagcttatctcctggtcgaggaaaagactttaaatctcggaaggacagagactctaagaaggatgaagaggatgaacatggtgataagaagcctaaggcccagccattatccctggaggagcttctggccaagaaaaaggctgaggaagaagctgaggctaagcccaagttcctctctaaagcagaacgagaggctgaagctctaaagcgacggcagcaggaggtggaagagcggcagaggatgcttgaagaagagaggaagaaaaggaaacagttccaagacttgggcaggaagatgttggaagatcctcaggaacgggaacgtcgggaacgcagggagaggatggaacgggagaccaatggaaatgaggatgaggaagggcggcagaagatccgggaagagaaggataagagcaaggaactgcatgccattaaggagcgttacctgggtggcatcaaaaagcggcgccgaacgagacatctcaatgaccggaaatttgtttttgagtgggatgcatctgaggacacatccattgactacaaccccctgtacaaagaacggcaccaggtgcagttgttagggcgaggcttcattgcaggcattgacctcaagcagcagaagcgagagcagtcacgtttctatggagacctaatggagaagaggcgaaccctggaagaaaaggagcaggaggaggcaagactccgcaaacttcgtaagaaggaagccaagcagcgctgggatgatcgtcattggtctcagaaaaagttagatgagatgacggacagggactggcggatcttccgtgaggactacagcatcaccaccaaaggtggcaagatccccaatcccatccgatcctggaaagactcttctctgcccccacacatcttggaggtcattgataagtgtggctacaaggaaccaacacctatacagcgtcaggcaattcccattgggctacagaatcgtgacatcattggtgtggctgagactggcagtggcaagacagcagccttcctcatccctctgctggtctggatcaccacacttcccaaaattgacaggatcgaagagtcagaccaaggcccttatgccatcatcctggctcccacccgtgagttggctcaacagattgaggaagagaccatcaagtttgggaaaccgctaggtatccgcactgtggctgtcattggtggcatctccagagaagaccagggcttcaggctgcgcatgggttgtgagattgtgattgctacccctgggcgtttgattgatgtgctggagaaccgctacctggtgctgagccgctgtacctatgtggttctggatgaggcagataggatgattgacatgggctttgagccagatgtccagaagatcctggagcacatgcctgtcagcaaccagaagccagacacggatgaggctgaggaccctgagaagatgctggccaactttgagtcgggaaaacataagtaccgccaaacagtcatgttcacggccaccatgcccccagcggtggagcgtctggccaggagctatcttcggcgacctgctgtggtgtacattggctccgcaggcaagccccatgagcgtgtggaacagaaggtcttcctcatgtcagagtcagaaaagaggaaaaagctgctggcaatcttggagcaaggctttgacccacccatcattatttttgtcaaccagaagaagggctgcgacgtgttggccaaatccctggagaagatggggtacaatgcttgcacactgcacggtggaaaaggccaggagcagcgagagtttgcgttgtccaacctcaaggctggggccaaggatattttggtggctacagatgtggctggtcgtggtattgacatccaagatgtgtctatggttgtcaactatgatatggccaaaaatattgaagattacatccaccgcattggccgcacgggacgagcaggcaagagtggggtggccatcaccttcctcacaaaagaggactctgctgtgttctacgagctgaagcaagctatcctggaaagcccagtgtcttcctgtccccccgaactagccaaccacccagatgcccagcataagccaggcaccatcctcaccaagaagcgccgggaagagaccatctttgcctgacacagcactcttcctgtgggctgagggcatctccaaagctgcctgatgcctgtttttcagaaccctcacatccctctttccaggtcctcactcttgggatatgggggcttaggaaaacaatccaactccctagcccagaccctcaggtcaggaggcctgcgtgtggggctgcaaaaggagaggacgacgctgtcggaggcagggagagcaaattaccacagcttcttggcccagttctgcccttctttgctttgggattgcactgggccatcagctcatgccaggctatgggggcagccagttggcattgctccccagactgaacagaaacctggccgccggatgggacctcctttggcacagacttgactgtgtaactgcataaactgcagtagcatcattgccctagatgccccaggagacctggcaccatgaggattacagacagtggaatcttactgtcatctggacagctgttttcctgtttggatggtaaaggaagttgagagtctttagacctgtgcacagccccgcaccaaggggtgctgtatgctctaggcatcccctcccccaggggattttctaagtagatggggggacacggtgaactggctgtgtccatctttgtcactgagtgaaatctctgttttctattctctgagaagataagtttgtatgttctgagaataaatacatgaatattaagactgttaaaaaaaaaaaaaacacacaacaaaaacaaaaaaaacacaacaacaaaacaa

SEQ ID NO: 442304 - DNA, 2062 bp, Homo sapiens
ggtttcaccatgttggccaggctggtctcaaactcctgacttcaggtgatccgcctgcctcagcctcccaaagttctgggattacagacatgagccaccatgcccagccctggcctctgatttttaagtgagatcattgcattcttttctcatcatcctccccattcccattgctccccgtaagagtgactttgtcttgctctggcttgtggttggataagaaccaaagctcacgaagctgtggggcaccctgtttaccacaggatcggatcgaagagtcagaccaaggcccttatgccatcatcctggctcccacccgtgagttggctcaacagattgaggaagagaccatcaagtttgggaaaccgctaggtatccgcactgtggctgtcattggtggcatctccagagaagaccagggcttcaggctgcgcatgggttgtgagattgtgattgctacccctgggcgtttgattgatgtgctggagaaccgctacctggtgctgagccgctgtacctatgtggttctggatgaggcagataggatgattgacatgggctttgagccagatgtccagaagatcctggagcacatgcctgtcagcaaccagaagccagacacggatgaggctgaggaccctgagaagatgctggccaactttgagtcgggaaaacataagtaccgccaaacagtcatgttcacggccaccatgcccccagcggtggagcgtctggccaggagctatcttcggcgacctgctgtggtgtacattggctccgcaggcaagccccatgagcgtgtggaacagaaggtcttcctcatgtcagagtcagaaaagaggaaaaagctgctggcaatcttggagcaaggctttgacccacccatcattatttttgtcaaccagaagaagggctgcgacgtgttggccaaatccctggagaagatggggtacaatgcttgcacactgcacggtggaaaaggccaggagcagcgagagtttgcgttgtccaacctcaaggctggggccaaggatattttggtggctacagatgtggctggtcgtggtattgacatccaagatgtgtctatggttgtcaactatgatatggccaaaaatattgaagattacatccaccgcattggccgcacgggacgagcaggcaagagtggggtggccatcaccttcctcacaaaagaggactctgctgtgttctacgagctgaagcaagctatcctggaaagcccagtgtcttcctgtccccccgaactagccaaccacccagatgcccagcataagccaggcaccatcctcaccaagaagcgccgggaagagaccatctttgcctgacacagcactcttcctgtgggctgagggcatctccaaagctgcctgatgcctgtttttcagaaccctcacatccctctttccaggtcctcactcttgggatatgggggcttaggaaaacaatccaactccctagcccagaccctcaggtcaggaggcctgcgtgtggggctgcaaaaggagaggacgacgctgtcggaggcagggagagcaaattaccacagcttcttggcccagttctgcccttctttgctttgggattgcactgggccatcagctcatgccaggctatgggggcagccagttggcattgctccccagactgaacagaaacctggccgccggatgggacctcctttggcacagacttgactgtgtaactgcataaactgcagtagcatcattgccctagatgccccaggagacctggcaccatgaggattacagacagtggaatcttactgtcatctggacagctgttttcctgtttggatggtaaaggaagttgagagtctttagacctgtgcacagccccgcaccaaggggtgctgtatgctctaggcatcccctcccccaggggattttctaagtagatggggggacacggtgaactggctgtgtccatctttgtcactgagtgaaatctctgttttctattctctgagaagataagtttgtatgttctgagaataaatacatgaatattaagactgtta

SEQ ID NO: 442305 - DNA, 2906 bp, Homo sapiens
cgcggccgggggggtggggggtgttcatctccgcgaccaggaaacgggaaagatggcgacggctccgcgacgttgaggccgcgttgggcggttcagactcagggtgatggcaggagagctggctgacaaaaaggaccgtgatgcatcaccttccaaggaggaaaggaagcgatcacggactcctgacagagagcgggatagagaccgggaccggaagtcttccccatctaaagatagaaagcggcatcgttcaagggatagacgtcgaggaggcagccgttctcgctctcgttcccgttccaaatctgcagaaagagaacgacggcacaaagaacgagaacgagataaggagcgggatcggaataagaaggaccgagatcgagacaaggatgggcacagacgggacaaggaccgtaaacgatccagcttatctcctggtcgaggaaaagactttaaatctcggaaggacagagactctaagaaggatgaagaggatgaacatggtgataagaagcctaaggcccagccattatccctggaggagcttctggccaagaaaaaggctgaggaagaagctgaggctaagcccaagttcctctctaaagcagaacgagaggctgaagctctaaagcgacggcagcaggaggtggaagagcggcagaggatgcttgaagaagagaggaagaaaaggaaacagttccaagacttgggcaggaagatgttggaagatcctcaggaacgggaacgtcgggaacgcagggagaggatggaacgggagaccaatggaaatgaggatgaggaagggcggcagaagatccgggaagagaaggataagagcaaggaactgcatgccattaaggagcgttacctgggtggcatcaaaaagcggcgccgaacgagacatctcaatgaccggaaatttgtttttgagtgggatgcatctgaggacacatccattgactacaaccccctgtacaaagaacggcaccaggtgcagttgttagggcgaggcttcattgcaggcattgacctcaagcagcagaagcgagagcagtcacgtttctatggagacctaatggagaagaggcgaaccctggaagaaaaggagcaggaggaggcaagactccgcaaacttcgtaagaaggaagccaagcagcgctgggatgatcgtcattggtctcagaaaaagttagatgagatgacggacagggactggcggatcttccgtgaggactacagcatcaccaccaaaggtggcaagatccccaatcccatccgatcctggaaagactcttctctgcccccacacatcttggaggtcattgataagtgtggctacaaggaaccaacacctatacagcgtcaggcaattcccattgggctacagaatcgtgacatcattggtgtggctgagactggcagtggcaagacagcagccttcctcatccctctgctggtctggatcaccacacttcccaaaattgacaggatcgaagagtcagaccaaggcccttatgccatcatcctggctcccacccgtgagttggctcaacagattgaggaagagaccatcaagtttgggaaaccgctaggtatccgcactgtggctgtcattggtggcatctccagagaagaccagggcttcaggctgcgcatgggttgtgagattgtgattgctacccctgggcgtttgattgatgtgctggagaaccgctacctggtgctgagccgctgtacctatgtggttctggatgaggcagataggatgattgacatgggctttgagccagatgtccagaagatcctggagcacatgcctgtcagcaaccagaagccagacacggatgaggctgaggaccctgagaagatgctggccaactttgagtcgggaaaacataagtaccgccaaacagtcatgttcacggccaccatgcccccagcggtggagcgtctggccaggagctatcttcggcgacctgctgtggtgtacattggctccgcaggcaagccccatgagcgtgtggaacagaaggtcttcctcatgtcagagtcagaaaagaggaaaaagctgctggcaatcttggagcaaggctttgacccacccatcattatttttgtcaaccagaagaagggctgcgacgtgttggccaaatccctggagaagatggggtacaatgcttgcacactgcacggtggaaaaggccaggagcagcgagagtttgcgttgtccaacctcaaggctggggccaaggatattttggtggctacagatgtggctggtcgtggtattgacatccaagatgtgtctatggttgtcaactatgatatggccaaaaatattgaagattacatccaccgcattggccgcacgggacgagcaggcaagagtggggtggccatcaccttcctcacaaaagaggactctgctgtgttctacgagctgaagcaagctatcctggaaagcccagtgtcttcctgtccccccgaactagccaaccacccagatgcccaactgaacagaaacctggccgccggatgggacctcctttggcacagacttgactgtgtaactgcataaactgcagtagcatcattgccctagatgccccaggagacctggcaccatgaggattacagacagtggaatcttactgtcatctggacagctgttttcctgtttggatggtaaaggaagttgagagtctttagacctgtgcacagccccgcaccaaggggtgctgtatgctctaggcatcccctcccccaggggattttctaagtagatggggggacacggtgaactggctgtgtccatctttgtcactgagtgaaatctctgttttctattctctgagaagataagtttgtatgttctgagaataaatacatgaatattaagactgtta

SEQ ID NO: 442306 - DNA, 1507 bp, Homo sapiens
cgcggccgggggggtggggggtgttcatctccgcgaccaggaaacgggaaagatggcgacggctccgcgacgttgaggccgcgttgggcggttcagactcagggtgatggcaggagagctggctgacaaaaaggaccgtgatgcatcaccttccaaggaggaaaggaagcgatcacggactcctgacagagagcgggatagagaccgggaccggaagtcttccccatctaaagatagaaagcggcatcgttcaagggatagacgtcgaggaggcagccgttctcgctctcgttcccgttccaaatctgcagaaagagaacgacggcacaaagaacgagaacgagataaggagcgggatcggaataagaaggaccgagatcgagacaaggatgggcacagacgggacaaggaccgtaaacgatccagcttatctcctggtcgaggaaaagactttaaatctcggaaggacagagactctaagaaggatgaagaggatgaacatggtgataagaagcctaaggcccagccattatccctggaggagcttctggccaagaaaaaggctgaggaagaagctgaggctaagcccaagttcctctctaaagcagaacgagaggctgaagctctaaagcgacggcagcaggaggtggaagagcggcagaggatgcttgaagaagagaggaagaaaaggaaacacttcctgtccccccgaactagccaaccacccagatgcccagcataagccaggcaccatcctcaccaagaagcgccgggaagagaccatctttgcctgacacagcactcttcctgtgggctgagggcatctccaaagctgcctgatgcctgtttttcagaaccctcacatccctctttccaggtcctcactcttgggatatgggggcttaggaaaacaatccaactccctagcccagaccctcaggtcaggaggcctgcgtgtggggctgcaaaaggagaggacgacgctgtcggaggcagggagagcaaattaccacagcttcttggcccagttctgcccttctttgctttgggattgcactgggccatcagctcatgccaggctatgggggcagccagttggcattgctccccagactgaacagaaacctggccgccggatgggacctcctttggcacagacttgactgtgtaactgcataaactgcagtagcatcattgccctagatgccccaggagacctggcaccatgaggattacagacagtggaatcttactgtcatctggacagctgttttcctgtttggatggtaaaggaagttgagagtctttagacctgtgcacagccccgcaccaaggggtgctgtatgctctaggcatcccctcccccaggggattttctaagtagatggggggacacggtgaactggctgtgtccatctttgtcactgagtgaaatctctgttttctattctctgagaagataagtttgtatgttctgagaataaatacatgaatattaagactgtta

SEQ ID NO: 442307 - DNA, 2205 bp, Homo sapiens
cgcggccgggggggtggggggtgttcatctccgcgaccaggaaacgggaaagatggcgacggctccgcgacgttgaggccgcgttgggcggttcagactcagggtgatggcaggagagctggctgacaaaaaggaccgtgatgcatcaccttccaaggaggaaaggaagcgatcacggactcctgacagagagcgggatagagaccgggaccggaagtcttccccatctaaagatagaaagcggcatcgttcaagggatagacgtcgaggaggcagccgttctcgctctcgttcccgttccaaatctgcagaaagagaacgacggcacaaagaacgagaacgagataaggagcgggatcggaataagaaggaccgagatcgagacaaggatgggcacagacgggacaaggaccgtaaacgatccagcttatctcctggtcgaggaaaagactttaaatctcggaaggacagagactctaagaaggatgaagaggatgaacatggtgataagaagcctaaggcccagccattatccctggaggagcttctggccaagaaaaaggctgaggaagaagctgaggctaagcccaagttcctctctaaagcagaacgagaggctgaagctctaaagcgacggcagcaggaggtggaagagcggcagaggatgcttgaagaagagaggaagaaaaggaaacagttccaagacttgggcaggaagatgttggaagatcctcaggaacgggaacgtcgggaacgcagggagaggatggaacgggagaccaatggaaatgaggatgaggaagggcggcagaagatccgggaagagaaggataagagcaaggaactgcatgccattaaggagcgttacctgggtggcatcaaaaagcggcgccgaacgagacatctcaatgaccggaaatttgtttttgagtgggatgcatctgaggacacatccattgactacaaccccctgtacaaagaacggcaccaggtgcagttgttagggcgaggcttcattgcaggcattgacctcaagcagcagaagcgagagcagtcacgtttctatggagacctaatggagaagaggcgaaccctggaagaaaaggagcaggaggaggcaagactccgcaaacttcgtaagaaggaagccaagcagcgctgggatgatcgtcattggtctcagaaaaagttagatgagatgacggacagggactggcggatcttccgtgaggactacagcatcaccaccaaaggtggcaagatccccaatcccatccgatcctggaaagactcttctctgcccccacacatcttggaggtcattgataagtgtggctacaaggaaccaacacctatacagcgtcaggcaattcccattgggctacagaatcgtgacatcattggtgtggctgagactggcagtggcaagacagcagccttcctcatccctctgctggtctggatcaccacacttcccaaaattgacaggatcgaagagtcagaccaaggcccttatgccatcatcctggctcccacccgtgagttggctcaacagattgaggaagagaccatcaagtttgggaaaccgctaggtatccgcactgtggctgtcattggtggcatctccagagaagaccagggcttcaggctgcgcatgggttgtgaggtttgtttttctatctagcagccagcctgctgtctgggaaggctatcttggggctttgtttctagtttctggaatatatgtgcagtagtatgaagaaaggagctggtttatatatatgtgctatttattgagaacttatgcaccagggtttatatcacaaatagtatatatcatatatattagctcattaattctcacaataatgtatgagagtggtatttccttgttatagatcaagctgaggttcaggttaataactgcctgaagtcacaaacagctggcaatgggcagagctgagactcatatccatagcctgtgcttttagttactctttactctgccagaccaaatctttgactttgtgcattgccttcatctcaggaaagtggaggagagctctttatgagaagtctgctgtagaaatttagtctttttacaattttttaaaaaaatttagtctttatacaacccccttcatagtaccccttagtctctcccatctaagaagttccttcttcaggatctgaaatgatttgcca

SEQ ID NO: 442308 - DNA, 1111 bp, Homo sapiens
cgcggccgggggggtggggggtgttcatctccgcgaccaggaaacgggaaagatggcgacggctccgcgacgttgaggccgcgttgggcggttcagactcagggtgatggcaggagagctggctgacaaaaaggaccgtgatgcatcaccttccaaggaggaaaggaagcgatcacggactcctgacagagagcgggatagagaccgggaccggaagtcttccccatctaaagatagaaagcggcatcgttcaagggatagacgtcgaggaggcagccgttctcgctctcgttcccgttccaaatctgcagaaagagaacgacggcacaaagaacgagaacgagataaggagcgggatcggaataagaaggaccgagatcgagacaaggatgggcacagacgggacaaggaccgtaaacgatccagcttatctcctggtcgaggaaaagactttaaatctcggaaggacagagactctaagaaggatgaagaggatgaacatggtgataagaagcctaaggcccagccattatccctggaggagcttctggccaagaaaaaggctgaggaagaagctgaggctaagcccaagttcctctctaaagcagaacgagaggctgaagctctaaagcgacggcagcaggaggtggaagagcggcagaggatgcttgaagaagagaggaagaaaaggaaacagttccaagacttgggcaggaagatgttggaagatcctcaggaacgggaacgtcgggaacgcagggagaggatggaacgggagaccaatggaaatgaggatgaggaagggcggcagaagatccgggaagagaaggataagagcaaggaactgcatgccattaaggagcgttacctgggtggcatcaaaaagcggcgccgaacgagacatctcaatgaccggaaatttgtttttgagtgggatgcatctgaggacacatccattgactacaaccccctgtacaaagaacggcaccaggtgcagttgttagggcgaggcttcattgcaggcattgacctcaagcagcagaagcgagagcagtcacgtttctatggagacctaatggagaaaagagtgcatggcggtaccgagctcatc

SEQ ID NO: 442309 - DNA, 846 bp, Homo sapiens
cgcggccgggggggtggggggtgttcatctccgcgaccaggaaacgggaaagatggcgacggctccgcgacgttgaggccgcgttgggcggttcagactcagggtgatggcaggagagctggctgacaaaaaggaccgtgatgcatcaccttccaaggaggaaaggaagcgatcacggactcctgacagagagcgggatagagaccgggaccggaagtcttccccatctaaagatagaaagcggcatcgttcaagggatagacgtcgaggaggcagccgttctcgctctcgttcccgttccaaatctgcagaaagagaacgacggcacaaagaacgagaacgagataaggagcgggatcggaataagaaggaccgagatcgagacaaggatgggcacagacgggacaaggaccgtaaacgatccagcttatctcctggtcgaggaaaagactttaaatctcggaaggacagagactctaagaaggatgaagaggatgaacatggtgataagaagcctaaggcccagccattatccctggaggagcttctggccaagaaaaaggctgaggaagaagctgaggctaagcccaagttcctctctaaagcagaacgagaggctgaagctctaaagcgacggcagcaggaggtggaagagcggcagaggatgcttgaagaagagaggaagaaaaggaaacagttccaagacttgggcaggaagatgttggtagatcctcaggaacgggcacgtcggggacgcagggagaggatcgacaaccgggataccccagtcaactgacggatgtagaaacggccggccagtagactccggctacaagcatggatagt

SEQ ID NO: 442310 - DNA, 389 bp, Homo sapiens
gggcgaggcttcattgcaggcattgacctcaagcagcagaagcgagagcagtcacgtttctatggagacctaatggagaagaggcgaaccctggaagaaaaggagcaggaggagtgagtgatcaaggctagggtggctggacagagcccagaggctctacagaaaggagttggagggcactgattctacttactcctcacaccctgctccagggcaagactccgcaaacttcgtaagaaggaagccaagcagcgctgggatgatcgtcattggtctcagaaaaagttagatgagatgacggacagggactggcggatcttccgtgaggactacagcatcaccaccaaaggtggcaagatccccaatcccatccgatcctggaaagactc

SEQ ID NO: 442311 - DNA, 3116 bp, Homo sapiens
agctccggcagggaaagctacggctaggtagcgaggccgggtggtcggaagtcttccccatctaaagatagaaagcggcatcgttcaagggatagacgtcgaggaggcagccgttctcgctctcgttcccgttccaaatctgcagaaagagaacgacggcacaaagaacgagaacgagataaggagcgggatcggaataagaaggaccgagatcgagacaaggatgggcacagacgggacaaggaccgtaaacgatccagcttatctcctggtcgaggaaaagactttaaatctcggaaggacagagactctaagaaggatgaagaggatgaacatggtgataagaagcctaaggcccagccattatccctggaggagcttctggccaagaaaaaggctgaggaagaagctgaggctaagcccaagttcctctctaaagcagaacgagaggctgaagctctaaagcgacggcagcaggaggtggaagagcggcagaggatgcttgaagaagagaggaagaaaaggaaacagttccaagacttgggcaggaagatgttggaagatcctcaggaacgggaacgtcgggaacgcagggagaggatggaacgggagaccaatggaaatgaggatgaggaagggcggcagaagatccgggaagagaaggataagagcaaggaactgcatgccattaaggagcgttacctgggtggcatcaaaaagcggcgccgaacgagacatctcaatgaccggaaatttgtttttgagtgggatgcatctgaggacacatccattgactacaaccccctgtacaaagaacggcaccaggtgcagttgttagggcgaggcttcattgcaggcattgacctcaagcagcagaagcgagagcagtcacgtttctatggagacctaatggagaagaggcgaaccctggaagaaaaggagcaggaggaggcaagactccgcaaacttcgtaagaaggaagccaagcagcgctgggatgatcgtcattggtctcagaaaaagttagatgagatgacggacagggactggcggatcttccgtgaggactacagcatcaccaccaaaggtggcaagatccccaatcccatccgatcctggaaagactcttctctgcccccacacatcttggaggtcattgataagtgtggctacaaggaaccaacacctatacagcgtcaggcaattcccattgggctacagaatcgtgacatcattggtgtggctgagactggcagtggcaagacagcagccttcctcatccctctgctggtctggatcaccacacttcccaaaattgacaggatcgaagagtcagaccaaggcccttatgccatcatcctggctcccacccgtgagttggctcaacagattgaggaagagaccatcaagtttgggaaaccgctaggtatccgcactgtggctgtcattggtggcatctccagagaagaccagggcttcaggctgcgcatgggttgtgagattgtgattgctacccctgggcgtttgattgatgtgctggagaaccgctacctggtgctgagccgctgtacctatgtggttctggatgaggcagataggatgattgacatgggctttgagccagatgtccagaagatcctggagcacatgcctgtcagcaaccagaagccagacacggatgaggctgaggaccctgagaagatgctggccaactttgagtcgggaaaacataagtaccgccaaacagtcatgttcacggccaccatgcccccagcggtggagcgtctggccaggagctatcttcggcgacctgctgtggtgtacattggctccgcaggcaagccccatgagcgtgtggaacagaaggtcttcctcatgtcagagtcagaaaagaggaaaaagctgctggcaatcttggagcaaggctttgacccacccatcattatttttgtcaaccagaagaagggctgcgacgtgttggccaaatccctggagaagatggggtacaatgcttgcacactgcacggtggaaaaggccaggagcagcgagagtttgcgttgtccaacctcaaggctggggccaaggatattttggtggctacagatgtggctggtcgtggtattgacatccaagatgtgtctatggttgtcaactatgatatggccaaaaatattgaagattacatccaccgcattggccgcacgggacgagcaggcaagagtggggtggccatcaccttcctcacaaaagaggactctgctgtgttctacgagctgaagcaagctatcctggaaagcccagtgtcttcctgtccccccgaactagccaaccacccagatgcccagcataagccaggcaccatcctcaccaagaagcgccgggaagagaccatctttgcctgacacagcactcttcctgtgggctgagggcatctccaaagctgcctgatgcctgtttttcagaaccctcacatccctctttccaggtcctcactcttgggatatgggggcttaggaaaacaatccaactccctagcccagaccctcaggtcaggaggcctgcgtgtggggctgcaaaaggagaggacgacgctgtcggaggcagggagagcaaattaccacagcttcttggcccagttctgcccttctttgctttgggattgcactgggccatcagctcatgccaggctatgggggcagccagttggcattgctccccagactgaacagaaacctggccgccggatgggacctcctttggcacagacttgactgtgtaactgcataaactgcagtagcatcattgccctagatgccccaggagacctggcaccatgaggattacagacagtggaatcttactgtcatctggacagctgttttcctgtttggatggtaaaggaagttgagagtctttagacctgtgcacagccccgcaccaaggggtgctgtatgctctaggcatcccctcccccaggggattttctaagtagatggggggacacggtgaactggctgtgtccatctttgtcactgagtgaaatctctgttttctattctctgagaagataagtttgtatgttctgagaataaatacatgaatattaagactgtta

SEQ ID NO: 442312 - DNA, 3566 bp, Homo sapiens
cgcggccgggggggtggggggtgttcatctccgcgaccaggaaacgggaaagatggcgacggctccgcgacgttgaggccgcgttgggcggttcagactcagggtgatggcaggagagctggctgacaaaaaggaccgtgatgcatcaccttccaaggaggaaaggaagcgatcacggactcctgacagagagcgggatagagaccgggaccggaagtcttccccatctaaagatagaaagcggcatcgttcaagggatagacgtcgaggaggcagccgttctcgctctcgttcccgttccaaatctgcagaaagagaacgacggcacaaagaacgagaacgagataaggagcgggatcggaataagaaggaccgagatcgagacaaggatgggcacagacgggacaaggaccgtaaacgatccagcttatctcctggtcgaggaaaagactttaaatctcggaaggacagagactctaagaaggatgaagaggatgaacatggtgataagaagcctaaggcccagccattatccctggaggagcttctggccaagaaaaaggctgaggaagaagctgaggctaagcccaagttcctctctaaagcagaacgagaggctgaagctctaaagcgacggcagcaggaggtggaagagcggcagaggatgcttgaagaagagaggaagaaaaggaaacagttccaagacttgggcaggaagatgttgggtttgttattctaccctgtgtagcccctagatggaagaggaaagagtgggatgagatacagtgtctcttaggagagatagaaacctgttcactctggagtttggaaaggggaaggatggtgggagtttatgagaaaacatttttctgttagatctccatttaccccatatcataagtctacccctttttttcttcatttggggttcctcgtctggattccctccattccctctcctcttttcttccatgagctcttctgcagctttgctttctttggtctgcagaagatcctcaggaacgggaacgtcgggaacgcagggagaggatggaacgggagaccaatggaaatgaggatgaggaagggcggcagaagatccgggaagagaaggataagagcaaggaactgcatgccattaaggagcgttacctgggtggcatcaaaaagcggcgccgaacgagacatctcaatgaccggaaatttgtttttgagtgggatgcatctgaggacacatccattgactacaaccccctgtacaaagaacggcaccaggtgcagttgttagggcgaggcttcattgcaggcattgacctcaagcagcagaagcgagagcagtcacgtttctatggagacctaatggagaagaggcgaaccctggaagaaaaggagcaggaggaggcaagactccgcaaacttcgtaagaaggaagccaagcagcgctgggatgatcgtcattggtctcagaaaaagttagatgagatgacggacagggactggcggatcttccgtgaggactacagcatcaccaccaaaggtggcaagatccccaatcccatccgatcctggaaagactcttctctgcccccacacatcttggaggtcattgataagtgtggctacaaggaaccaacacctatacagcgtcaggcaattcccattgggctacagaatcgtgacatcattggtgtggctgagactggcagtggcaagacagcagccttcctcatccctctgctggtctggatcaccacacttcccaaaattgacaggatcgaagagtcagaccaaggcccttatgccatcatcctggctcccacccgtgagttggctcaacagattgaggaagagaccatcaagtttgggaaaccgctaggtatccgcactgtggctgtcattggtggcatctccagagaagaccagggcttcaggctgcgcatgggttgtgagattgtgattgctacccctgggcgtttgattgatgtgctggagaaccgctacctggtgctgagccgctgtacctatgtggttctggatgaggcagataggatgattgacatgggctttgagccagatgtccagaagatcctggagcacatgcctgtcagcaaccagaagccagacacggatgaggctgaggaccctgagaagatgctggccaactttgagtcgggaaaacataagtaccgccaaacagtcatgttcacggccaccatgcccccagcggtggagcgtctggccaggagctatcttcggcgacctgctgtggtgtacattggctccgcaggcaagccccatgagcgtgtggaacagaaggtcttcctcatgtcagagtcagaaaagaggaaaaagctgctggcaatcttggagcaaggctttgacccacccatcattatttttgtcaaccagaagaagggctgcgacgtgttggccaaatccctggagaagatggggtacaatgcttgcacactgcacggtggaaaaggccaggagcagcgagagtttgcgttgtccaacctcaaggctggggccaaggatattttggtggctacagatgtggctggtcgtggtattgacatccaagatgtgtctatggttgtcaactatgatatggccaaaaatattgaagattacatccaccgcattggccgcacgggacgagcaggcaagagtggggtggccatcaccttcctcacaaaagaggactctgctgtgttctacgagctgaagcaagctatcctggaaagcccagtgtcttcctgtccccccgaactagccaaccacccagatgcccagcataagccaggcaccatcctcaccaagaagcgccgggaagagaccatctttgcctgacacagcactcttcctgtgggctgagggcatctccaaagctgcctgatgcctgtttttcagaaccctcacatccctctttccaggtcctcactcttgggatatgggggcttaggaaaacaatccaactccctagcccagaccctcaggtcaggaggcctgcgtgtggggctgcaaaaggagaggacgacgctgtcggaggcagggagagcaaattaccacagcttcttggcccagttctgcccttctttgctttgggattgcactgggccatcagctcatgccaggctatgggggcagccagttggcattgctccccagactgaacagaaacctggccgccggatgggacctcctttggcacagacttgactgtgtaactgcataaactgcagtagcatcattgccctagatgccccaggagacctggcaccatgaggattacagacagtggaatcttactgtcatctggacagctgttttcctgtttggatggtaaaggaagttgagagtctttagacctgtgcacagccccgcaccaaggggtgctgtatgctctaggcatcccctcccccaggggattttctaagtagatggggggacacggtgaactggctgtgtccatctttgtcactgagtgaaatctctgttttctattctctgagaagataagtttgtatgttctgagaataaatacatgaatattaagactgtta

SEQ ID NO: 442313 - DNA, 3335 bp, Homo sapiens
cgcggccgggggggtggggggtgttcatctccgcgaccaggaaacgggaaagatggcgacggctccgcgacgttgaggccgcgttgggcggttcagactcagggtgatggcaggagagctggctgacaaaaaggaccgtgatgcatcaccttccaaggaggaaaggaagcgatcacggactcctgacagagagcgggatagagaccgggaccggaagtcttccccatctaaagatagaaagcggcatcgttcaagggatagacgtcgaggaggcagccgttctcgctctcgttcccgttccaaatctgcagaaagagaacgacggcacaaagaacgagaacgagataaggagcgggatcggaataagaaggaccgagatcgagacaaggatgggcacagacgggacaaggaccgtaaacgatccagcttatctcctggtcgaggaaaagactttaaatctcggaaggacagagactctaagaaggatgaagaggatgaacatggtgataagaagcctaaggcccagccattatccctggaggagcttctggccaagaaaaaggctgaggaagaagctgaggctaagcccaagttcctctctaaagcagaacgagaggctgaagctctaaagcgacggcagcaggaggtggaagagcggcagaggatgcttgaagaagagaggaagaaaaggaaacagttccaagacttgggcaggaagatgttggaagatcctcaggaacgggaacgtcgggaacgcagggagaggatggaacgggagaccaatggaaatgaggatgaggaagggcggcagaagatccgggaagagaaggataagagcaaggaactgcatgccattaaggagcgttacctgggtggcatcaaaaagcggcgccgaacgagacatctcaatgaccggaaatttgtttttgagtgggatgcatctgaggacacatccattgactacaaccccctgtacaaagaacggcaccaggtgcagttgttagggcgaggcttcattgcaggcattgacctcaagcagcagaagcgagagcagtcacgtttctatggagacctaatggagaagaggcgaaccctggaagaaaaggagcaggaggaggcaagactccgcaaacttcgtaagaaggaagccaagcagcgctgggatgatcgtcattggtctcagaaaaagttagatgagatgacggacagggactggcggatcttccgtgaggactacagcatcaccaccaaaggtggcaagatccccaatcccatccgatcctggaaagactcttctctgcccccacacatcttggaggtcattgataagtgtggctacaaggaaccaacacctatacagcgtcaggcaattcccattgggctacagaatcgtgacatcattggtgtggctgagactggcagtggcaagacagcagccttcctcatccctctgctggtctggatcaccacacttcccaaaattgacaggatcgaagagtcagaccaaggcccttatgccatcatcctggctcccacccgtgagttggctcaacagattgaggaagagaccatcaagtttgggaaaccgctaggtatccgcactgtggctgtcattggtggcatctccagagaagaccagggcttcaggctgcgcatgggttgtgagattgtgattgctacccctgggcgtttgattgatgtgctggagaaccgctacctggtgctgagccgctgtacctatgtggttctggatgaggcagataggatgattgacatgggctttgagccagatgtccagaagatcctggagcacatgcctgtcagcaaccagaagccagacacggatgaggctgaggaccctgagaagatgctggccaactttgagtcgggaaaacataagtaccgccaaacagtcatgttcacggccaccatgcccccagcggtggagcgtctggccaggagctatcttcggcgacctgctgtggtgtacattggctccgcaggcaagccccatgagcgtgtggaacagaaggtcttcctcatgtcagagtcagaaaagaggaaaaagctgctggcaatcttggagcaaggctttgacccacccatcattatttttgtcaaccagaagaagggctgcgacgtgttggccaaatccctggagaagatggggtacaatgcttgcacactgcacggtggaaaaggccaggagcagcgagagtttgcgttgtccaacctcaaggctggggccaaggatattttggtggctacagatgtggctggtcgtggtattgacatccaagatgtgtctatggttgtcaactatgatatggccaaaaatattgaagattacatccaccgcattggccgcacgggacgagcaggcaagagtggggtggccatcaccttcctcacaaaagaggactctgctgtgttctacgagctgaagcaagctatcctggaaagcccagtgtcttcctgtccccccgaactagccaaccacccagatgcccagcataagccaggcaccatcctcaccaagaagcgccgggaagagaccatctttgcctgacacagcactcttcctgtgggctgagggcatctccaaagctgcctgatgcctgtttttcagaaccctcacatccctctttccaggtcctcactcttgggatatgggggcttaggaaaacaatccaactccctagcccagaccctcaggtcaggaggcctgcgtgtggggctgcaaaaggagaggacgacgctgtcggaggcagggagagcaaattaccacagcttcttggcccagttctgcccttctttgctttgggattgcactgggccatcagctcatgccaggctatgggggcagccagttggcattgctccccagactgaacagaaacctggccgccggatgggacctcctttggcacagacttgactgtgtaactgcataaactgcagtagcatcattgccctagatgccccaggagacctggcaccatgaggattacagacagtggaatcttactgtcatctggacagctgttttcctgtttggatggtaaaggaagttgagagtctttagacctgtgcacagccccgcaccaaggggtgctgtatgctctaggcatcccctcccccaggggattttctaagtagatggggggacacggtgaactggctgtgtccatctttgtcactgagtgaaatctctgttttctattctctgagaagataagtttgtatgttctgagaataaatacatgaatattaagactgttacacaaacaaaaaaaactgggaaaaacgcggagggagactaagagggaaaaagg

SEQ ID NO: 442314 - DNA, 1658 bp, Homo sapiens
gggcacctgctgggctataaatgattatactgtactcctcagattgtgattgctacccctgggcgtttgattgatgtgctggagaaccgctacctggtgctgagccgctgtacctatgtggttctggatgaggcagataggatgattgacatgggctttgagccagatgtccagaagatcctggagcacatgcctgtcagcaaccagaagccagacacggatgaggctgaggaccctgagaagatgctggccaactttgagtcgggaaaacataagtaccgccaaacagtcatgttcacggccaccatgcccccagcggtggagcgtctggccaggagctatcttcggcgacctgctgtggtgtacattggctccgcaggcaagccccatgagcgtgtggaacagaaggtcttcctcatgtcagagtcagaaaagaggaaaaagctgctggcaatcttggagcaaggctttgacccacccatcattatttttgtcaaccagaagaagggctgcgacgtgttggccaaatccctggagaagatggggtacaatgcttgcacactgcacggtggaaaaggccaggagcagcgagagtttgcgttgtccaacctcaaggctggggccaaggatattttggtggctacagatgtggctggtcgtggtattgacatccaagatgtgtctatggttgtcaactatgatatggccaaaaatattgaagattacatccaccgcattggccgcacgggacgagcaggcaagagtggggtggccatcaccttcctcacaaaagaggactctgctgtgttctacgagctgaagcaagctatcctggaaagcccagtgtcttcctgtccccccgaactagccaaccacccagatgcccagcataagccaggcaccatcctcaccaagaagcgccgggaagagaccatctttgcctgacacagcactcttcctgtgggctgagggcatctccaaagctgcctgatgcctgtttttcagaaccctcacatccctctttccaggtcctcactcttgggatatgggggcttaggaaaacaatccaactccctagcccagaccctcaggtcaggaggcctgcgtgtggggctgcaaaaggagaggacgacgctgtcggaggcagggagagcaaattaccacagcttcttggcccagttctgcccttctttgctttgggattgcactgggccatcagctcatgccaggctatgggggcagccagttggcattgctccccagactgaacagaaacctggccgccggatgggacctcctttggcacagacttgactgtgtaactgcataaactgcagtagcatcattgccctagatgccccaggagacctggcaccatgaggattacagacagtggaatcttactgtcatctggacagctgttttcctgtttggatggtaaaggaagttgagagtctttagacctgtgcacagccccgcaccaaggggtgctgtatgctctaggcatcccctcccccaggggattttctaagtagatggggggacacggtgaactggctgtgtccatctttgtcactgagtgaaatctctgttttctattctctgagaagataagtttgtatgttctgagaataaatacatgaatattaagactgtta

SEQ ID NO: 442315 - DNA, 2957 bp, Homo sapiens
cgcggccgggggggtggggggtgttcatctccgcgaccaggaaacgggaaagatggcgacggctccgcgacgttgaggccgcgttgggcggttcagactcagggtgatggcaggagagctggctgacaaaaaggaccgtgatgcatcaccttccaaggaggaaaggaagcgatcacggactcctgacagagagcgggatagagaccgggaccggaagtcttccccatctaaagatagaaagcggcatcgttcaagggatagacgtcgaggaggcagccgttctcgctctcgttcccgttccaaatctgcagaaagagaacgacggcacaaagaacgagaacgagataaggagcgggatcggaataagaaggaccgagatcgagacaaggatgggcacagacgggacaaggaccgtaaacgatccagcttatctcctggtcgaggaaaagactttaaatctcggaaggacagagactctaagaaggatgaagaggatgaacatggtgataagaagcctaaggcccagccattatccctggaggagcttctggccaagaaaaaggctgaggaagaagctgaggctaagcccaagttcctctctaaagcagaacgagaggctgaagctctaaagcgacggcagcaggaggtggaagagcggcagaggatgcttgaagaagagaggaagaaaaggaaacagttccaagacttgggcaggaagatgttggaagatcctcaggaacgggaacgtcgggaacgcagggagaggatggaacgggagaccaatggaaatgaggatgaggaagggcggcagaagatccgggaagagaaggataagagcaaggaactgcatgccattaaggagcgttacctgggtggcatcaaaaagcggcgccgaacgagacatctcaatgaccggaaatttgtttttgagtgggatgcatctgaggacacatccattgactacaaccccctgtacaaagaacggcaccaggtgcagttgttagggcgaggcttcattgcaggcattgacctcaagcagcagaagcgagagcagtcacgtttctatggagacctaatggagaagaggcgaaccctggaagaaaaggagcaggaggaggcaagactccgcaaacttcgtaagaaggaagccaagcagcgctgggatgatcgtcattggtctcagaaaaagttagatgagatgacggacagggactggcggatcttccgtgaggactacagcatcaccaccaaaggtggcaagatccccaatcccatccgatcctggaaagactcttctctgcccccacacatcttggaggtcattgataagtgtggctacaaggaaccaacacctatacagcgtcaggcaattcccattgggctacagaatcgtgacatcattggtgtggctgagactggcagtggcaagacagcagccttcctcatccctctgctggtctggatcaccacacttcccaaaattgacaggatcgaagagtcagaccaaggcccttatgccatcatcctggctcccacccgtgagttggctcaacagattgaggaagagaccatcaagtttgggaaaccgctaggtatccgcactgtggctgtcattggtggcatctccagagaagaccagggcttcaggctgcgcatgggttgtgagattgtgattgctacccctgggcgtttgattgatgtgctggagaaccgctacctggtgctgagccgctgtacctatgtggttctggatgaggcagataggatgattgacatgggctttgagccagatgtccagaagatcctggagcacatgcctgtcagcaaccagaagccagacacggatgaggctgaggaccctgagaagatgctggccaactttgagtcgggaaaacataagtaccgccaaacagtcatgttcacggccaccatgcccccagcggtggagcgtctggccaggagctatcttcggcgacctgctgtggtgtacattggctccgcaggcaagccccatgagcgtgtggaacagaaggtcttcctcatgtcagagtcagaaaagaggaaaaagctgctggcaatcttggagcaaggctttgacccacccatcattatttttgtcaaccagaagaagggctgcgacgtgttggccaaatccctggagaagatggggtacaatgcttgcacactgcacggtggaaaaggccaggagcagcgagagtttgcgttgtccaacctcaaggctggggccaaggatattttggtggctacagatgtggctggtcgtggtattgacatccaagatgtgtctatggttgtcaactatgatatggccaaaaatattgaagattacatccaccgcattggccgcacgggacgagcaggcaagagtggggtggccatcaccttcctcacaaaagaggactctgctgtgttctacgagctgaagcaagctatcctggaaagcccagtgtcttcctgtccccccgaactagccaaccacccagatgcccaactgaacagaaacctggccgccggatgggacctcctttggcacagacttgactgtgtaactgcataaactgcagtagcatcattgccctagatgccccaggagacctggcaccatgaggattacagacagtggaatcttactgtcatctggacagctgttttcctgtttggatggtaaaggaagttgagagtctttagacctgtgcacagccccgcaccaaggggtgctgtatgctctaggcatcccctcccccaggggattttctaagtagatggggggacacggtgaactggctgtgtccatctttgtcactgagtgaaatctctgttttctattctctgagaagataagtttgtatgttctgagaataaatacatgaatattaagactgttaaaaaaaaaaaaaacacacaacaaaaacaaaaaaaacacaacaacaaaacaa

SEQ ID NO: 442316 - DNA, 2640 bp, Homo sapiens
cgcggccgggggggtggggggtgttcatctccgcgaccaggaaacgggaaagatggcgacggctccgcgacgttgaggccgcgttgggcggttcagactcagggtgatggcaggagagctggctgacaaaaaggaccgtgatgcatcaccttccaaggaggaaaggaagcgatcacggactcctgacagagagcgggatagagaccgggaccggaagtcttccccatctaaagatagaaagcggcatcgttcaagggatagacgtcgaggaggcagccgttctcgctctcgttcccgttccaaatctgcagaaagagaacgacggcacaaagaacgagaacgagataaggagcgggatcggaataagaaggaccgagatcgagacaaggatgggcacagacgggacaaggaccgtaaacgatccagcttatctcctggtcgaggaaaagactttaaatctcggaaggacagagactctaagaaggatgaagaggatgaacatggtgataagaagcctaaggcccagccattatccctggaggagcttctggccaagaaaaaggctgaggaagaagctgaggctaagcccaagttcctctctaaagcagaacgagaggctgaagctctaaagcgacggcagcaggaggtggaagagcggcagaggatgcttgaagaagagaggaagaaaaggaaacagttccaagacttgggcaggaagatgttggaagatcctcaggaacgggaacgtcgggaacgcagggagaggatggaacgggagaccaatggaaatgaggatgaggaagggcggcagaagatccgggaagagaaggataagagcaaggaactgcatgccattaaggagcgttacctgggtggcatcaaaaagcggcgccgaacgagacatctcaatgaccggaaatttgtttttgagtgggatgcatctgaggacacatccattgactacaaccccctgtacaaagaacggcaccaggtgcagttgttagggcgaggcttcattgcaggcattgacctcaagcagcagaagcgagagcagtcacgtttctatggagacctaatggagaagaggcgaaccctggaagaaaaggagcaggaggaggcaagactccgcaaacttcgtaagaaggaagccaagcagcgctgggatgatcgtcattggtctcagaaaaagttagatgagatgacggacagggactggcggatcttccgtgaggactacagcatcaccaccaaaggtggcaagatccccaatcccatccgatcctggaaagactcttctctgcccccacacatcttggaggtcattgataagtgtggctacaaggaaccaacacctatacagcgtcaggcaattcccattgggctacagaatcgtgacatcattggtgtggctgagactggcagtggcaagacagcagccttcctcatccctctgctggtctggatcaccacacttcccaaaattgacaggatcgaagagtcagaccaaggcccttatgccatcatcctggctcccacccgtgagttggctcaacagattgaggaagagaccatcaagtttgggaaaccgctaggtatccgcactgtggctgtcattggtggcatctccagagaagaccagggcttcaggctgcgcatgggttgtgagattgtgattgctacccctgggcgtttgattgatgtgctggagaaccgctacctggtgctgagccgctgtacctatgtggttctggatgaggcagataggatgattgacatgggctttgagccagatgtccagaagatcctggagcacatgcctgtcagcaaccagaagccagacacggatgaggctgaggaccctgagaagatgctggccaactttgagtcgggaaaacataagtaccgccaaacagtcatgttcacggccaccatgcccccagcggtggagcgtctggccaggagctatcttcggcgacctgctgtggtgtacattggctccgcaggcaagccccatgagcgtgtggaacagaaggtcttcctcatgtcagagtcagaaaagaggaaaaagctgctggcaatcttggagcaaggctttgacccacccatcattatttttgtcaaccagaagaagggctgcgacgtgttggccaaatccctggagaagatgggggtgtgtctggcaggggagaacaaagtctagcctctgtggcactgctttctgaatctagcagggccccctaggctcttcctttcaagtctcaccctttctttaacctgtccagcaatcaacaagttaggaccagggtgaagggtggtttgagggaataaagagaatggaatcaattgctgggaccccctgtctgctgcagtaatgccagccaaagctgccttgggtcttcatcctggtgaggtggagccagggaaaggtttgagacccatatcctggcagtctgaggatgtagaaaagagtaggtgaaaactgcttaggtacgttgagaggaggtgatatggtcagaagggagctgataatcagtgtcctttactcctgtcactggtgcttgaggggaggggtgtgtccctgtcactcagctctccaacttccttaaacttcttgatccctgctttctaccctgatctcgc

SEQ ID NO: 442317 - DNA, 2157 bp, Homo sapiens
  misc_feature (2009)..(2009): n is a, c, g, or t
  misc_feature (2014)..(2014): n is a, c, g, or t
  misc_feature (2022)..(2022): n is a, c, g, or t
  misc_feature (2025)..(2025): n is a, c, g, or t
  misc_feature (2029)..(2029): n is a, c, g, or t
cgcggccgggggggtggggggtgttcatctccgcgaccaggaaacgggaaagatggcgacggctccgcgacgttgaggccgcgttgggcggttcagactcagggtgatggcaggagagctggctgacaaaaaggaccgtgatgcatcaccttccaaggaggaaaggaagcgatcacggactcctgacagagagcgggatagagaccgggaccggaagtcttccccatctaaagatagaaagcggcatcgttcaagggatagacgtcgaggaggcagccgttctcgctctcgttcccgttccaaatctgcagaaagagaacgacggcacaaagaacgagaacgagataaggagcgggatcggaataagaaggaccgagatcgagacaaggatgggcacagacgggacaaggaccgtaaacgatccagcttatctcctggtcgaggaaaagactttaaatctcggaaggacagagactctaagaaggatgaagaggatgaacatggtgataagaagcctaaggcccagccattatccctggaggagcttctggccaagaaaaaggctgaggaagaagctgaggctaagcccaagttcctctctaaagcagaacgagaggctgaagctctaaagcgacggcagcaggaggtggaagagcggcagaggatgcttgaagaagagaggaagaaaaggaaacagttccaagacttgggcaggaagatgttggaagatcctcaggaacgggaacgtcgggaacgcagggagaggatggaacgggagaccaatggaaatgaggatgaggaagggcggcagaagatccgggaagagaaggataagagcaaggaactgcatgccattaaggagcgttacctgggtggcatcaaaaagcggcgccgaacgagacatctcaatgaccggaaatttgtttttgagtgggatgcatctgaggacacatccattgactacaaccccctgtacaaagaacggcaccaggtgcagttgttagggcgaggcttcattgcaggcattgacctcaagcagcagaagcgagagcagtcacgtttctatggagacctaatggagaagaggcgaaccctggaagaaaaggagcaggaggaggcaagactccgcaaacttcgtaagaaggaagccaagcagcgctgggatgatcgtcattggtctcagaaaaagttagatgagatgacggacagggactggcggatcttccgtgaggactacagcatcaccaccaaaggtggcaagatccccaatcccatccgatcctggaaagactcttctctgcccccacacatcttggaggtcattgataagtgtggctacaaggaaccaacacctatacagcgtcaggcaattcccattgggctacagaatcgtgacatcattggtgtggctgagactggcagtggcaagacagcagccttcctcatccctctgctggtctggatcaccacacttcccaaaattgacaggctggagtgcagtggtgtgatcttggcttacagcaaccgttgcctcccaggctcatatcctcctacctcagcctcccaagtagctgggattacaggatcgaagagtcagaccaaggcccttatgccatcatcctggctcccacccgtgagttggctcaacagattgaggaagagaccatcaagtttgggaaaccgctaggtatccgcactgtggctgtcattggtggcatctccagagaagaccagggcttcaggctgcgcatgggttgtgagattgtgattgctacccctgggcgtttgattgatgtgctggagaaccgctacctggtgctgagccgctgtacctatgtggttctggatgaggcagataggatgattgacatgggctttgagccagatgtccagaagatcctggagcacatgcctgtcagcaaccagaagccagacacggatgaggctgaggaccctgagaagatgctggccaactttgagtcgggaaaacataagtaccgccaaacagncatgntcacggcnacnatgncccagggggggagcgttgggcaggagtatcttcgggaactcgcggggggcacttgggtccggagggaacccagtggtgtggacaaaagttccccatggggagcgaaaggggaaagggggggacttggg

SEQ ID NO: 442318 - DNA, 333 bp, Homo sapiens
gaacgggagaccaatggaaatgaggatgaggaagggcggcagaagatccgggaagagaaggataagagcaaggaactgcatgccattaaggtgcaggccttggctccatcttcacttctctcccacacaaaaatgaggtttagttatttggccattgtgatctctgcatgtgagaattgggcctcaaagctcatgtgctttgtgttctgtccctgggtaggagcgttacctgggtggcatcaaaaagcggcgccgaacgagacatctcaatgaccggaaatttgtttttgagtgggatgcatctgaggacacatccattgactacaaccccct

SEQ ID NO: 442319 - DNA, 2370 bp, Homo sapiens
tcaacgttgtactgaaaattctagccactgcaatcatgttttaattgggagtagggggaaagagggagggaaggagaaaaatgaaaggccttcgagcgcaacaggctgccgctgaggagctggagctggtggggactgggccgcaatggacaagctgaagaaggtgctgagcgggcaggacacggaggaccggagcggcctgtccgaggttgttgaggcatcttcattaagctggagtaccaggataaaaggcttcattgcgtgttttgctataggaattctctgctcactgctgggtactgttctgctgtgggtgcccaggaagggactacacctcttcgcagtgttttatacctttggtaatatcgcatcaattgggagtaccatcttcctcatgggaccagtgaaacagctgaagcgaatgtttgagcctactcgtttgattgcaactatcatggtgctgttgtgttttgcacttaccctgtgttctgccttttggtggcataacaagggacttgcacttatcttctgcattttgcagtctttggcattgacgtggtacagcctttccttcataccatttgcaagggatgctgtgaagaagtgttttgccgtgtgtcttgcataattcatggccagttttatgaagctttggaaggcactatggacagaagctggtggacagttttgtaactatcttcgaaacctctgtcttacagacatgtgccttttatcttgcagcaatgtgttgcttgtgattcgaacatttgagggttacttttggaagcaacaatacattctcgaacctgaatgtcagtagcacaggatgagaagtgggttctgtatcttgtggagtggaatcttcctcatgtacctgtttcctctctggatgttgtcccactgaattcccatgaatacaaacctattcagcaacagcacataagccttgggtgcaagtgattcccaggtggcaaaaggcagccccatcagagatcacgggagcaacagtaagggacagagttttggggtccacttgtccctcagcatggaagccatcaccgtggtcctgcatagagtgagtctgcttctactctggcatctgagaacaagtgactctgctttagacaagcccctggagagcctggccatggagtgaggtagaaaagaagcactttttggtggtatatgctgtttctgaatttgaatctaagcattcttggtgttctgattctgcgcctgactgtggaatgtattttctgacattaggtgcagactctttttctcttgggttttatttcccatccctccctccctctccctgcatatctttctttatgacctcctggcactagatggggaaagaacagagcagcagcagaaaatgctgctgttttttttttggacgagagcccataggagttgaaaaatcctgctgctctcagctatatttttttctccattatttataaatgtttgcttttaaactgattttattttccattctcccctggagttgggccaggggagagtggggtgggaagacagatccctgctgtgcagccagcaggaagtaggcacgcctgcccagtgacctttaaatagtcccagtgtttgcacttagcctgtgctggggacactggggataaactgcaggtggtctcatgtcagcctgatgcctaacctacaaagtgcttttgtgtccacgatcttacctggttcttatggagagccttgtgaggaagcagggattgttataccactgtgcagtcaagggaatcaaggcccacactggtttttggatccacccaaagccacagcttcagcctccttcatgaccccagagtttcctggcctgtttctggttgtgcctcctgtaactgcctgtgactgtttccctcgttttcatcagccaagccatctcctccctggccctccctgcccatctcttttggaagcttcttcctggatctgcaggatgttcactgtcccttgtgttccctttcagctcctccttgttgcctgactacgattagtgccctgtcttgtcagccagcattcctggccctccaggacctccagagtcatcctacaaatgacgtttatctggattgcctttctgttctttgcacagggccaactggtccactagggctcctcctctgtcactgctaaaccaaaggaagtggcctgctggttgtcccctttcttgtggctaattgctgaacctttctttgtcctactgtggctaagaactctgactggtttttttttttttttctttttgagatggagtctcactccgtcgcccaggctggagtgcagtggcgtgatctctgctcactgcaacctccacctcccgggttcaagcaa

SEQ ID NO: 442320 - DNA, 1048 bp, Homo sapiens
cccggtgggcaggtgcctgggcggggcgcgccgcggttggcgcctgggcggctgggcggctgcctagcacccggaagagccgtcaacttagcgagcgcaacaggctgccgctgaggagctggagctggtggggactgggccgcaatggacaagctgaagaaggtgctgagcgggcaggacacggaggaccggagcggcctgtccgagacaagccatgccaatcccactaccactcttcttcctacgaacaagccaggccaatcctactaccgctcttttcttcccacctgcagctagttcttttcgcaccttggcaaggttgttgaggcatcttcattaagctggagtaccaggataaaaggcttcattgcgtgttttgctataggaattctctgctcactgctgggtactgttctgctgtgggtgcccaggaagggactacacctcttcgcagtgttttatacctttggtaatatcgcatcaattgggagtaccatcttcctcatgggaccagtgaaacagctgaagcgaatgtttgagcctactcgtttgattgcaactatcatggtgctgttgtgttttgcacttaccctgtgttctgccttttggtggcataacaagggacttgcacttatcttctgcattttgcagtctttggcattgacgtggtacagcctttccttcataccatttgcaagggatgctgtgaagaagtgttttgccgtgtgtcttgcataattcatggccagttttatgaagctttggaaggcactatggacagaagctggtggacagttttgtaactatcttcgaaacctctgtcttacagacatgtgccttttatcttgcagcaatgtgttgcttgtgattcgaacatttgagggttacttttggaagcaacaatacattctcgaacctgaatgtcagtagcacaggatgagaagtgggttctgtatcttgtggagtggaatcttcctcatgtacctgtttcctctctggatgttgtcccactgaattcccatgaatacaaacctattcagcaacagca

SEQ ID NO: 442321 - DNA, 923 bp, Homo sapiens
cggatagccccccgggtgtagctacagttgcctagtgagcgtggtgctgcgtcgctgctgaaagtgggccatgcgcgcggcatggagtcgccatgccctagacacccggaagagccgtcaacttagcgagcgcaacaggctgccgctgaggagctggagctggtggggactgggccgcaatggacaagctgaagaaggtgctgagcgggcaggacacggaggaccggagcggcctgtccgaggttgttgaggcatcttcattaagctggagtaccaggatggtactgttctgctgtgggtgcccaggaagggactacacctcttcgcagtgttttatacctttggtaatatcgcatcaattgggagtaccatcttcctcatgggaccagtgaaacagctgaagcgaatgtttgagcctactcgtttgattgcaactatcatggtgctgttgtgttttgcacttaccctgtgttctgccttttggtggcataacaagggacttgcacttatcttctgcattttgcagtctttggcattgacgtggtacagcctttccttcataccatttgcaagggatgctgtgaagaagtgttttgccgtgtgtcttgcataattcatggccagttttatgaagctttggaaggcactatggacagaagctggtggacagttttgtaactatcttcgaaacctctgtcttacagacatgtgccttttatcttgcagcaatgtgttgcttgtgattcgaacatttgagggttacttttggaagcaacaatacattctcgaacctgaatgtcagtagcacaggatgagaagtgggttctgtatcttgtggagtggaatcttcctcatgtacctgtttcctctctggatgttgtcccactgaattcccatgaatacaaacctattcagcaacagca

SEQ ID NO: 442322 - DNA, 630 bp, Homo sapiens
cggatagccccccgggtgtagctacagttgcctagtgagcgtggtgctgcgtcgctgctgaaagtgggccatgcgcgcggcatggagtcgccatgccctagacacccggaagagccgtcaacttagcgagcgcaacaggctgccgctgaggagctggagctggtggggactgggccgcaatggacaagctgaagaaggtgctgagcgggcaggacacggaggaccggagcggcctgtccgaggttgttgaggcatcttcattaagctggagtaccaggataaaaggcttcattgcgtgttttgctataggaattctctgctcactgctgggtactgttctgctgtgggtgcccaggaagggactacacctcttcgcagtgttttatacctttggtaatatcgcatcaattgggagttgtgttttgcacttaccctgtgttctgccttttggtggcataacaagggacttgcacttatcttctgcattttgcagtctttggcattgacgtggcacagcctttccttcataccatttgcaagacaaacagaaaagtcaacaaaagacatgaatagatatttcctagaaaaggaaatatgaagagatgctcatcaccaccaaggagcagagaa

SEQ ID NO: 442323 - DNA, 1909 bp, Homo sapiens
tcaacgttgtactgaaaattctagccactgcaatcatgttttaattgggagtagggggaaagagggagggaaggagaaaaatgaaaggccttcgagcgcaacaggctgccgctgaggagctggagctggtggggactgggccgcaatggacaagctgaagaaggtgctgagcgggcaggacacggaggaccggagcggcctgtccgaggttgttgaggcatcttcattaagctggagtaccaggataaaaggcttcattgcgtgttttgctataggaattctctgctcactgctgggtactgttctgctgtgggtgcccaggaagggactacacctcttcgcagtgttttatacctttggtaatatcgcatcaattgggagtaccatcttcctcatgggaccagtgaaacagctgaagcgaatgtttgagcctactcgtttgattgcaactatcatggtgctgttgtgttttgcacttaccctgtgttctgccttttggtggcataacaagggacttgcacttatcttctgcattttgcagtctttggcattgacgtggtacagcctttccttcataccatttgcaagggatgctgtgaagaagtgttttgccgtgtgtcttgcataattcatggccagttttatgaagctttggaaggcactatggacagaagctggtggacagttttgtaactatcttcgaaacctctgtcttacagacatgtgccttttatcttgcagcaatgtgttgcttgtgattcgaacatttgagggttacttttggaagcaacaatacattctcgaacctgaatgtcagtagcacaggatgagaagtgggttctgtatcttgtggagtggaatcttcctcatgtacctgtttcctctctggatgttgtcccactgaattcccatgaatacaaacctattcagcaacagcacataagccttgggtgcaagtgattcccaggtggcaaaaggcagccccatcagagatcacgggagcaacagtaagggacagagttttggggtccacttgtccctcagcatggaagccatcaccgtggtcctgcatagagtgagtctgcttctactctggcatctgagaacaagtgactctgctttagacaagcccctggagagcctggccatggagtgaggtagaaaagaagcactttttggtggtatatgctgtttctgaatttgaatctaagcattcttggtgttctgattctgcgcctgactgtggaatgtattttctgacattaggtgcagactctttttctcttgggttttatttcccatccctccctccctctccctgcatatctttctttatgacctcctggcactagatggggaaagaacagagcagcagcagaaaatgctgctgttttttttttggacgagagcccataggagttgaaaaatcctgctgctctcagctatatttttttctccattatttataaatgtttgcttttaaactgattttattttccattctcccctggagttgggccaggggagagtggggtgggaagacagatccctgctgtgcagccagcaggaagtaggcacgcctgcccagtgacctttaaatagtcccagtgtttgcacttagcctgtgctggggacactggggataaactgcaggtggtctcatgtcagcctgatgcctaacctacaaagtgcttttgtgtccacgatcttacctggttcttatggagagccttgtgaggaagcagggattgttataccactgtgcagtcaagggaatcaaggcccacactggtttttggatccacccaaagccacagcttcagcctccttcatgaccccaagagccacaccattgagccaccatatgagccccgccaagagccactcgaagtgcccatcctaggtgcac

SEQ ID NO: 442324 - DNA, 275 bp, Homo sapiens
caggcactgagcgtacgttctgctctgcgtagctgtggtccacccctccaaccctctccttgctgtgctttaatgtgtatgacatgtagattttcataacaggctgacagatagttttgctttgttttgtttttgagacagtttctgtcacccaggctggactcagctcactgcctgcctcagactcccaagtagctgggattacaggcatgcaccaccactcctggcaaaatttttttttttttttttttttttttttttttttgagacagagt

SEQ ID NO: 442325 - DNA, 2682 bp, Homo sapiens
cggggcgcggccccgcggcccgcgcgctcctgggcgggggatgttgtgatggagaagccgcggcggagcccgaaccccgcagcctgagccacctccgtcatctgggcccggggcctcaccgcgcaggagctgccaaggccatgtctgttccatcatcactgagccagtcggccattaatgccaacagccacggaggccccgcactgagcctacccctgcctctgcacgctgcccacaaccagctgctcaacgccaagctgcaggccacagctgtgggacccaaggacctgcgcagcgccatgggggagggtggtgggcctgagccaggccctgccaatgccaagtggctaaaagagggccagaaccagctccggcgggccgccacggcccaccgtgaccagaatcgcaatgtgaccttgaccttggcggaggaggccagccaggagcctgagatggcacccttgggccccaaaggcctgatacacctgtactctgagctggagctctcagctcacaacgcagccaaccgaggcctacgaggacctggcctgatcatcagcactcaagagcaggggccagatgagggagaggagaaggcggccggggaggccgaggaggaggaggaggatgatgatgatgaagaggaggaggaggacttatcttctcccccagggctgcctgagcccctggagagtgtggaggcccctcccaggccccaagcccttacagatggcccccgggaacacagcaagagtgccagcctcctgtttggcatgcggaacagtgcagccagtgatgaggactcaagctgggctaccttatcccagggcagcccctcctatggctccccagaggacacagattccttctggaaccccaacgccttcgagacggattccgacctgccggctggatggatgagggtccaggacacctcagggacctattactggcacatcccaacagggaccacccagtgggaaccccccggccgggcctccccctcacaggggagcagcccccaagaggagtcccagctcacctggacaggttttgctcatggagaaggctttgaggatggagaattttggaaggatgaacccagtgatgaggccccaatggagctgggactgaaggaacctgaggaggggacgttgaccttcccagctcagagcctcagcccagagccgttgccccaagaggaggagaagcttcccccacggaataccaacccagggatcaagtgtttcgccgtgcgctccctaggctgggtagagatgaccgaggaggagctggcccctggacgcagcagtgtggcagtcaacaattgcatccgtcagctctcttaccacaaaaacaacctgcatgaccccatgtctgggggctggggggaaggaaaggatctgctactgcagctggaggatgagacactaaagctagtggagccacagagccaggcactgctgcacgcccaacccatcatcagcatccgcgtgtggggcgtcgggcgggacagtggaagagagagggactttgcctacgtagctcgtgataagctgacccagatgctcaagtgccacgtgtttcgctgtgaggcacctgccaagaacatcgccaccagcctgcatgagatctgctctaagatcatggccgaacggcgtaatgcccgctgcttggtaaatggactctccctggaccactctaaacttgtggatgtccctttccaagtggaattcccagcgcctaagaatgagttggtccagaagttccaagtctattacctggggaatgtacctgttgctaaacctgttggggtagatgtgattaatggggccctcgagtcagtcctgtcctccagcagccgtgaacaatggaccccaagtcatgtcagtgtggcccctgctaccctcaccatcttgcaccagcagacagaggcagtgctgggagagtgtcgggtgcgtttcctctccttcctggccgtgggcagagatgtccacacgtttgcattcatcatggctgccggcccagcctccttctgctgccacatgttctggtgcgagcccaatgctgccagcctctcagaggctgtgcaggctgcgtgcatgcttcgctaccagaagtgtctggatgcccgttcccaggcctccacctcctgcctcccagcaccccctgctgagtctgtggcacggcgtgtagggtggactgtccgcaggggtgttcagtcgctgtggggctccctgaagcccaaacggctgggggcccataccccatgaagaagcccccaccttccctccacctgcttgtgttgggccccagggaactaaagggtgtgggtcagggaggggtctagaggctattcctaggcctcaggcctcccaaatatgcccctccccagtagctacggttccctgcctaggagctggggagggagagatctaatcccttcaaggaagtgataacactggagtggtaacaagaggagcaggaagcaaggccagccctggttctccatccccatgtgtttcaggtggaacaggaggaactggtccaggccaggcctcatcctcctggacccagcaggggcagaaggaggaagggactggtccaggcatgggtcccttccccctgctccatgggcacctctgctgtattgatatcactaataaagtctgtctgcactgc

SEQ ID NO: 442326 - DNA, 936 bp, Homo sapiens
cggggcgcggccccgcggcccgcgcgctcctgggcgggggatgttgtgatggagaagccgcggcggagcccgaaccccgcagcctgagccacctccgtcatctgggcccggggcctcaccgcgcaggagctgccaaggccatgtctgttccatcatcactgagccagtcggccattaatgccaacagccacggaggccccgcactgagcctacccctgcctctgcacgctgcccacaaccagctgctcaacgccaagctgcaggccacagctgtgggacccaaggacctgcgcagcgccatgggggagggtggtgggcctgagccaggccctgccaatgccaagtggctaaaagagggccagaaccagctccggcgggccgccacggcccaccgtgaccagaatcgcaatgtgaccttgaccttggcggaggaggccagccaggagcctgagatggcacccttgggccccaaaggcctgatacacctgtactctgagctggagctctcagctcacaacgcagccaaccgaggcctacgaggacctggcctgatcatcagcactcaagagcaggggccagatgagggagaggagaaggcggccggggaggccgaggaggaggaggaggatgatgatgatgaagaggaggaggaggacttatcttctcccccagggctgcctgagcccctggagagtgtggaggcccctcccaggccccaagcccttacagatggcccccgggaacacagcaagagtgccagcctcctgtttggcatgcggaacagtgcagccagtgatgaggactcaagctgggctaccttatcccagggcagcctctaggtcccacacgaccttttcctctgaaccaagcttcagacgatcgactgccgctgatgatgaggtcagaccccacgactactacggcctcccacggacc

SEQ ID NO: 442327 - DNA, 3076 bp, Homo sapiens
  misc_feature (1718)..(1718): n is a, c, g, or t
cggggcgcggccccgcggcccgcgcgctcctgggcgggggatgttgtgatggagaagccgcggcggagcccgaaccccgcagcctgagccacctccgtcatctgggcccggggcctcaccgcgcaggagctgccaaggccatgtctgttccatcatcactgagccagtcggccattaatgccaacagccacggaggccccgcactgagcctacccctgcctctgcacgctgcccacaaccagctgctcaacgccaagctgcaggccacagctgtgggacccaaggacctgcgcagcgccatgggggagggtggtgggcctgagccaggccctgccaatgccaagtggctaaaagagggccagaaccagctccggcgggccgccacggcccaccgtgaccagaatcgcaatgtgaccttgaccttggcggaggaggccagccaggagcctgagatggcacccttgggccccaaaggcctgatacacctgtactctgagctggagctctcagctcacaacgcagccaaccgaggcctacgaggacctggcctgatcatcagcactcaagagcaggggccagatgagggagaggagaaggcggccggggaggccgaggaggaggaggaggatgatgatgatgaagaggaggaggaggacttatcttctcccccagggctgcctgagcccctggagagtgtggaggcccctcccaggccccaagcccttacagatggcccccgggaacacagcaagagtgccagcctcctgtttggcatgcggaacagtgcagccagtgatgaggactcaagctgggctaccttatcccagggcagcccctcctatggctccccagaggacacagattccttctggaaccccaacgccttcgagacggattccgacctgccggctggatggatgagggtccaggacacctcagggacctattactggcacatcccaacagggaccacccagtgggaaccccccggccgggcctccccctcacaggggagcagcccccaagaggagtcccagctcacctggacaggttttgctcatggagaaggctttgaggatggagaattttggaaggatgaacccagtgatgaggccccaatggagctgggactgaaggaacctgaggaggggacgttgaccttcccagctcagagcctcagcccagagccgttgccccaagaggaggagaagcttcccccacggaataccaacccagggatcaagtgtttcgccgtgcgctccctaggctgggtagagatgaccgaggaggagctggcccctggacgcagcagtgtggcagtcaacaattgcatccgtcagctctcttaccacaaaaacaacctgcatgaccccatgtctgggggctggggggaaggaaaggatctgctactgcagctggaggatgagacactaaagctagtggagccacagagccaggcactgctgcacgcccaacccatcatcagcatccgcgtgtggggcgtcgggcgggacagtggaagagagaggtgggaatagggcttgggattcgagggtgggagttcatccagcatcagagtcctcctctctaactctgttatttgcctctcttgtgctgctggacccagagagaggtactatgcctattttccccctcctacacctggaccagatgcctggaagcacccaagctcccctcttctgccctgccccttcccnacccgctatgctccaccattaccctccacctcagcatgcttgcctgtctacccctcccccccaagaaggcagcacctatgggggaccagctgtgggcagaagccctggaggagctgtgatgggcagggaggacgtgggtggggtggggaccaggctcagcactggatggtactgggagacactgaggtgccccttccccaacagggactttgcctacgtagctcgtgataagctgacccagatgctcaagtgccacgtgtttcgctgtgaggcacctgccaagaacatcgccaccagcctgcatgagatctgctctaagatcatggccgaacggcgtaatgcccgctgcttggtaaatggactctccctggaccactctaaacttgtggatgtccctttccaagtggaattcccagcgcctaagaatgagttggtccagaagttccaagtctattacctggggaatgtacctgttgctaaacctgttggggtagatgtgattaatggggccctcgagtcagtcctgtcctccagcagccgtgaacaatggaccccaagtcatgtcagtgtggcccctgctaccctcaccatcttgcaccagcagacagaggcagtgctgggagagtgtcgggtgcgtttcctctccttcctggccgtgggcagagatgtccacacgtttgcattcatcatggctgccggcccagcctccttctgctgccacatgttctggtgcgagcccaatgctgccagcctctcagaggctgtgcaggctgcgtgcatgcttcgctaccagaagtgtctggatgcccgttcccaggcctccacctcctgcctcccagcaccccctgctgagtctgtggcacggcgtgtagggtggactgtccgcaggggtgttcagtcgctgtggggctccctgaagcccaaacggctgggggcccataccccatgaagaagcccccaccttccctccacctgcttgtgttgggccccagggaactaaagggtgtgggtcagggaggggtctagaggctattcctaggcctcaggcctcccaaatatgcccctccccagtagctacggttccctgcctaggagctggggagggagagatctaatcccttcaaggaagtgataacactggagtggtaacaagaggagcaggaagcaaggccagccctggttctccatccccatgtgtttcaggtggaacaggaggaactggtccaggccaggcctcatcctcctggacccagcaggggcagaaggaggaagggactggtccaggcatgggtcccttccccctgctccatgggcacctctgctgtattgatatcactaataaagtctgtctgcactgc

SEQ ID NO: 442328 - DNA, 1950 bp, Homo sapiens
gcagagtgcctcccgggaatccttccccgcgcggccgcggcgccgcacagccgccgccattcgggctccagccccgtccgcgcgtctcccggcgtgggtgcgggaccagggcgctgcggggcgcgcaggattccttctggaaccccaacgccttcgagacggattccgacctgccggctggatggatgagggtccaggacacctcagggacctattactggcacatcccaacagggaccacccagtgggaaccccccggccgggcctccccctcacaggggagcagcccccaagaggagtcccagctcacctggacaggttttgctcatggagaaggctttgaggatggagaattttggaaggatgaacccagtgatgaggccccaatggagctgggactgaaggaacctgaggaggggacgttgaccttcccagctcagagcctcagcccagagccgttgccccaagaggaggagaagcttcccccacggaataccaacccagggatcaagtgtttcgccgtgcgctccctaggctgggtagagatgaccgaggaggagctggcccctggacgcagcagtgtggcagtcaacaattgcatccgtcagctctcttaccacaaaaacaacctgcatgaccccatgtctgggggctggggggaaggaaaggatctgctactgcagctggaggatgagacactaaagctagtggagccacagagccaggcactgctgcacgcccaacccatcatcagcatccgcgtgtggggcgtcgggcgggacagtggaagagagagggactttgcctacgtagctcgtgataagctgacccagatgctcaagtgccacgtgtttcgctgtgaggcacctgccaagaacatcgccaccagcctgcatgagatctgctctaagatcatggccgaacggcgtaatgcccgctgcttggtaaatggactctccctggaccactctaaacttgtggatgtccctttccaagtggaattcccagcgcctaagaatgagttggtccagaagttccaagtctattacctggggaatgtacctgttgctaaacctgttggggtagatgtgattaatggggccctcgagtcagtcctgtcctccagcagccgtgaacaatggaccccaagtcatgtcagtgtggcccctgctaccctcaccatcttgcaccagcagacagaggcagtgctgggagagtgtcgggtgcgtttcctctccttcctggccgtgggcagagatgtccacacgtttgcattcatcatggctgccggcccagcctccttctgctgccacatgttctggtgcgagcccaatgctgccagcctctcagaggctgtgcaggctgcgtgcatgcttcgctaccagaagtgtctggatgcccgttcccaggcctccacctcctgcctcccagcaccccctgctgagtctgtggcacggcgtgtagggtggactgtccgcaggggtgttcagtcgctgtggggctccctgaagcccaaacggctgggggcccataccccatgaagaagcccccaccttccctccacctgcttgtgttgggccccagggaactaaagggtgtgggtcagggaggggtctagaggctattcctaggcctcaggcctcccaaatatgcccctccccagtagctacggttccctgcctaggagctggggagggagagatctaatcccttcaaggaagtgataacactggagtggtaacaagaggagcaggaagcaaggccagccctggttctccatccccatgtgtttcaggtggaacaggaggaactggtccaggccaggcctcatcctcctggacccagcaggggcagaaggaggaagggactggtccaggcatgggtcccttccccctgctccatgggcacctctgctgtattgatatcactaataaagtctgtctgcactgc

SEQ ID NO: 442329 - DNA, 2184 bp, Homo sapiens
attcaggattgggggaggggagccagggcgaggaagaagaggtgtgagcagaaggggctggggtctcatgaacctccctttctcctcccttccccaccccccaaggagattccctagcatggtggtcctggcccctccctagcaagctccaagcgggggaggatcttgcctggcagacgctctgccctggtgagaagggggcgggatgagcttttctctgcagcccagcaccaggctgtgagcccagctggctgggctggaggggctgtgaggagggagggtggaggcaggaggggccgggaatgagcgccatgttctcccaggactttttcctggccattatcctgcaggacagcagcgcagattccttctggaaccccaacgccttcgagacggattccgacctgccggctggatggatgagggtccaggacacctcagggacctattactggcacatcccaacagggaccacccagtgggaaccccccggccgggcctccccctcacaggggagcagcccccaagaggagtcccagctcacctggacaggttttgctcatggagaaggctttgaggatggagaattttggaaggatgaacccagtgatgaggccccaatggagctgggactgaaggaacctgaggaggggacgttgaccttcccagctcagagcctcagcccagagccgttgccccaagaggaggagaagcttcccccacggaataccaacccagggatcaagtgtttcgccgtgcgctccctaggctgggtagagatgaccgaggaggagctggcccctggacgcagcagtgtggcagtcaacaattgcatccgtcagctctcttaccacaaaaacaacctgcatgaccccatgtctgggggctggggggaaggaaaggatctgctactgcagctggaggatgagacactaaagctagtggagccacagagccaggcactgctgcacgcccaacccatcatcagcatccgcgtgtggggcgtcgggcgggacagtggaagagagagggactttgcctacgtagctcgtgataagctgacccagatgctcaagtgccacgtgtttcgctgtgaggcacctgccaagaacatcgccaccagcctgcatgagatctgctctaagatcatggccgaacggcgtaatgcccgctgcttggtaaatggactctccctggaccactctaaacttgtggatgtccctttccaagtggaattcccagcgcctaagaatgagttggtccagaagttccaagtctattacctggggaatgtacctgttgctaaacctgttggggtagatgtgattaatggggccctcgagtcagtcctgtcctccagcagccgtgaacaatggaccccaagtcatgtcagtgtggcccctgctaccctcaccatcttgcaccagcagacagaggcagtgctgggagagtgtcgggtgcgtttcctctccttcctggccgtgggcagagatgtccacacgtttgcattcatcatggctgccggcccagcctccttctgctgccacatgttctggtgcgagcccaatgctgccagcctctcagaggctgtgcaggctgcgtgcatgcttcgctaccagaagtgtctggatgcccgttcccaggcctccacctcctgcctcccagcaccccctgctgagtctgtggcacggcgtgtagggtggactgtccgcaggggtgttcagtcgctgtggggctccctgaagcccaaacggctgggggcccataccccatgaagaagcccccaccttccctccacctgcttgtgttgggccccagggaactaaagggtgtgggtcagggaggggtctagaggctattcctaggcctcaggcctcccaaatatgcccctccccagtagctacggttccctgcctaggagctggggagggagagatctaatcccttcaaggaagtgataacactggagtggtaacaagaggagcaggaagcaaggccagccctggttctccatccccatgtgtttcaggtggaacaggaggaactggtccaggccaggcctcatcctcctggacccagcaggggcagaaggaggaagggactggtccaggcatgggtcccttccccctgctccatgggcacctctgctgtattgatatcactaataaagtctgtctgcactgc

SEQ ID NO: 442330 - DNA, 1332 bp, Homo sapiens
acgcaccctgtctgactacaacatccagaaagggtgcgcccatcctccatggtgctgatcagcacctggaggatgagacactaaagctagtggagccacagagccaggcactgctgcacgcccaacccatcatcagcatccgcgtgtggggcgtcgggcgggacagtggaagagagagggactttgcctacgtagctcgtgataagctgacccagatgctcaagtgccacgtgtttcgctgtgaggcacctgccaagaacatcgccaccagcctgcatgagatctgctctaagatcatggccgaacggcgtaatgcccgctgcttggtaaatggactctccctggaccactctaaacttgtggatgtccctttccaagtggaattcccagcgcctaagaatgagttggtccagaagttccaagtctattacctggggaatgtacctgttgctaaacctgttggggtagatgtgattaatggggccctcgagtcagtcctgtcctccagcagccgtgaacaatggaccccaagtcatgtcagtgtggcccctgctaccctcaccatcttgcaccagcagacagaggcagtgctgggagagtgtcgggtgcgtttcctctccttcctggccgtgggcagagatgtccacacgtttgcattcatcatggctgccggcccagcctccttctgctgccacatgttctggtgcgagcccaatgctgccagcctctcagaggctgtgcaggctgcgtgcatgcttcgctaccagaagtgtctggatgcccgttcccaggcctccacctcctgcctcccagcaccccctgctgagtctgtggcacggcgtgtagggtggactgtccgcaggggtgttcagtcgctgtggggctccctgaagcccaaacggctgggggcccataccccatgaagaagcccccaccttccctccacctgcttgtgttgggccccagggaactaaagggtgtgggtcagggaggggtctagaggctattcctaggcctcaggcctcccaaatatgcccctccccagtagctacggttccctgcctaggagctggggagggagagatctaatcccttcaaggaagtgataacactggagtggtaacaagaggagcaggaagcaaggccagccctggttctccatccccatgtgtttcaggtggaacaggaggaactggtccaggccaggcctcatcctcctggacccagcaggggcagaaggaggaagggactggtccaggcatgggtcccttccccctgctccatgggcacctctgctgtattgatatcactaataaagtctgtctgcactgc

SEQ ID NO: 442331 - DNA, 1004 bp, Homo sapiens
cgggtgagcaaggtctgccaccatgatcaaccttctcttctttcccatagtggaattcccagcgcctaagaatgagttggtccagaagttccaagtctattacctggggaatgtacctgttgctaaacctgttggggtagatgtgattaatggggccctcgagtcagtcctgtcctccagcagccgtgaacaatggaccccaagtcatgtcagtgtggcccctgctaccctcaccatcttgcaccagcagacagaggcagtgctgggagagtgtcgggtgcgtttcctctccttcctggccgtgggcagagatgtccacacgtttgcattcatcatggctgccggcccagcctccttctgctgccacatgttctggtgcgagcccaatgctgccagcctctcagaggctgtgcaggctgcgtgcatgcttcgctaccagaagtgtctggatgcccgttcccaggcctccacctcctgcctcccagcaccccctgctgagtctgtggcacggcgtgtagggtggactgtccgcaggggtgttcagtcgctgtggggctccctgaagcccaaacggctgggggcccataccccatgaagaagcccccaccttccctccacctgcttgtgttgggccccagggaactaaagggtgtgggtcagggaggggtctagaggctattcctaggcctcaggcctcccaaatatgcccctccccagtagctacggttccctgcctaggagctggggagggagagatctaatcccttcaaggaagtgataacactggagtggtaacaagaggagcaggaagcaaggccagccctggttctccatccccatgtgtttcaggtggaacaggaggaactggtccaggccaggcctcatcctcctggacccagcaggggcagaaggaggaagggactggtccaggcatgggtcccttccccctgctccatgggcacctctgctgtattgatatcactaataaagtctgtctgcactgc

SEQ ID NO: 442332 - DNA, 1721 bp, Homo sapiens
cggggcgcggccccgcggcccgcgcgctcctgggcgggggatgttgtgatggagaagccgcggcggagcccgaaccccgcagcctgagccacctccgtcatctgggcccggggcctcaccgcgcaggagctgccaaggccatgtctgttccatcatcactgagccagtcggccattaatgccaacagccacggaggccccgcactgagcctacccctgcctctgcacgctgcccacaaccagctgctcaacgccaagctgcaggccacagctgtgggacccaaggacctgcgcagcgccatgggggagggtggtgggcctgagccaggccctgccaatgccaagtggctaaaagagggccagaaccagctccggcgggccgccacggcccaccgtgaccagaatcgcaatgtgaccttgaccttggcggaggaggccagccaggagcctgagatggcacccttgggccccaaaggcctgatacacctgtactctgagctggagctctcagctcacaacgcagccaaccgaggcctacgaggacctggcctgatcatcagcactcaagagcaggggccagatgagggagaggagaaggcggccggggaggccgaggaggaggaggaggatgatgatgatgaagaggaggaggaggacttatcttctcccccagggctgcctgagcccctggagagtgtggaggcccctcccaggccccaagcccttacagatggcccccgggaacacagcaagagtgccagcctcctgtttggcatgcggaacagtgcagccagtgatgaggactcaagctgggctaccttatcccagggcagcccctcctatggctccccagaggacacagattccttctggaaccccaacgccttcgagacggattccgacctgccggctggatggatgagggtccaggacacctcagggacctattactggcacatcccaacagggaccacccagtgggaaccccccggccgggcctccccctcacaggggagcagcccccaagaggagtcccagctcacctggacaggttttgctcatggagaaggctttgaggatggagaattttggaaggatgaacccagtgatgaggccccaatggagctgggactgaaggaacctgaggaggggacgttgaccttcccagctcagagcctcagcccagagccgttgccccaagaggaggagaagcttcccccacggaataccaacccagggatcaagtgtttcgccgtgcgctccctaggctgggtagagatgaccgaggaggagctggcccctggacgcagcagtgtggcagtcaacaattgcatccgtcagctctcttaccacaaaaacaacctgcatgaccccatgtctgggggctggggggaaggaaaggatctgctactgcagctggaggatgagacactaaagctagtggagccacagagccaggcactgctgcacgcccaacccatcatcagcatccgcgtgtggggcgtcgggcgggacagtggaagagagagggactttgcctacgtagctcgtgataagctgacccagatgctcaagtgccacgtgtttcgctgtgaggcacctgccaagaacatcgccaccagcctgcatgagatctgctctaagatcatggccgaacggcgtaatgcccgctgtttgggaatcaattttacacacagcacgtgttatgatcaggatttccga

SEQ ID NO: 442333 - DNA, 664 bp, Homo sapiens
cggggcgcggccccgcggcccgcgcgctcctgggcgggggatgttgtgatggagaagccgcggcggagcccgaaccccgcagcctgagccacctccgtcatctgggcccggggcctcaccgcgcaggagctgccaaggccatgtctgttccatcatcactgagccagtcggccattaatgccaacagccacggaggccccgcactgagcctacccctgcctctgcacgctgcccacaaccagctgctcaacgccaagctgcaggccacagctgtgggacccaaggacctgcgcagcgccatgggggagggtggtgggcctgagccaggccctgccaatgccaagtggctaaaagagggccagaaccagctccggcgggccgccacggcccaccgtgaccagaatcgcaatgtgaccttgaccttggcggaggaggccagccaggagcctgagatggcacccttgggccccaaaggcctgatacacctgtactctgagctggagctctcagctcacaacgcagccaaccgagaggccaggcctcatcctcctggacccagcaggggcagaaggaggaagggactggtccaggcatgggtcccttccccctgctccatgggcacctctgctgtattgatatcactaataaagtctgtctgcactgc

SEQ ID NO: 442334 - DNA, 2685 bp, Homo sapiens
gcagagtgcctcccgggaatccttccccgcgcggccgcggcgccgcacagccgccgccattcgggctccagccccgtccgcgcgtctcccggcgtgggtgcgggaccagggcgctgcggggcgcgcagggagctgccaaggccatgtctgttccatcatcactgagccagtcggccattaatgccaacagccacggaggccccgcactgagcctacccctgcctctgcacgctgcccacaaccagctgctcaacgccaagctgcaggccacagctgtgggacccaaggacctgcgcagcgccatgggggagggtggtgggcctgagccaggccctgccaatgccaagtggctaaaagagggccagaaccagctccggcgggccgccacggcccaccgtgaccagaatcgcaatgtgaccttgaccttggcggaggaggccagccaggagcctgagatggcacccttgggccccaaaggcctgatacacctgtactctgagctggagctctcagctcacaacgcagccaaccgaggcctacgaggacctggcctgatcatcagcactcaagagcaggggccagatgagggagaggagaaggcggccggggaggccgaggaggaggaggaggatgatgatgatgaagaggaggaggaggacttatcttctcccccagggctgcctgagcccctggagagtgtggaggcccctcccaggccccaagcccttacagatggcccccgggaacacagcaagagtgccagcctcctgtttggcatgcggaacagtgcagccagtgatgaggactcaagctgggctaccttatcccagggcagcccctcctatggctccccagaggacacagattccttctggaaccccaacgccttcgagacggattccgacctgccggctggatggatgagggtccaggacacctcagggacctattactggcacatcccaacagggaccacccagtgggaaccccccggccgggcctccccctcacaggggagcagcccccaagaggagtcccagctcacctggacaggttttgctcatggagaaggctttgaggatggagaattttggaaggatgaacccagtgatgaggccccaatggagctgggactgaaggaacctgaggaggggacgttgaccttcccagctcagagcctcagcccagagccgttgccccaagaggaggagaagcttcccccacggaataccaacccagggatcaagtgtttcgccgtgcgctccctaggctgggtagagatgaccgaggaggagctggcccctggacgcagcagtgtggcagtcaacaattgcatccgtcagctctcttaccacaaaaacaacctgcatgaccccatgtctgggggctggggggaaggaaaggatctgctactgcagctggaggatgagacactaaagctagtggagccacagagccaggcactgctgcacgcccaacccatcatcagcatccgcgtgtggggcgtcgggcgggacagtggaagagagagggactttgcctacgtagctcgtgataagctgacccagatgctcaagtgccacgtgtttcgctgtgaggcacctgccaagaacatcgccaccagcctgcatgagatctgctctaagatcatggccgaacggcgtaatgcccgctgcttggtaaatggactctccctggaccactctaaacttgtggatgtccctttccaagtggaattcccagcgcctaagaatgagttggtccagaagttccaagtctattacctggggaatgtacctgttgctaaacctgttggggtagatgtgattaatggggccctcgagtcagtcctgtcctccagcagccgtgaacaatggaccccaagtcatgtcagtgtggcccctgctaccctcaccatcttgcaccagcagacagaggcagtgctgggagagtgtcgggtgcgtttcctctccttcctggccgtgggcagagatgtccacacgtttgcattcatcatggctgccggcccagcctccttctgctgccacatgttctggtgcgagcccaatgctgccagcctctcagaggctgtgcaggctgcgtgcatgcttcgctaccagaagtgtctggatgcccgttcccaggcctccacctcctgcctcccagcaccccctgctgagtctgtggcacggcgtgtagggtggactgtccgcaggggtgttcagtcgctgtggggctccctgaagcccaaacggctgggggcccataccccatgaagaagcccccaccttccctccacctgcttgtgttgggccccagggaactaaagggtgtgggtcagggaggggtctagaggctattcctaggcctcaggcctcccaaatatgcccctccccagtagctacggttccctgcctaggagctggggagggagagatctaatcccttcaaggaagtgataacactggagtggtaacaagaggagcaggaagcaaggccagccctggttctccatccccatgtgtttcaggtggaacaggaggaactggtccaggccaggcctcatcctcctggacccagcaggggcagaaggaggaagggactggtccaggcatgggtcccttccccctgctccatgggcacctctgctgtattgatatcactaataaagtctgtctgcactgc

SEQ ID NO: 442335 - DNA, 1901 bp, Homo sapiens
cagcggagtctgggcgctcccagccggtcctggtgctgcggttgccgaggagacgctgcagcctagctgggccctggcagattccttctggaaccccaacgccttcgagacggattccgacctgccggctggatggatgagggtccaggacacctcagggacctattactggcacatcccaacagggaccacccagtgggaaccccccggccgggcctccccctcacaggggagcagcccccaagaggagtcccagctcacctggacaggttttgctcatggagaaggctttgaggatggagaattttggaaggatgaacccagtgatgaggccccaatggagctgggactgaaggaacctgaggaggggacgttgaccttcccagctcagagcctcagcccagagccgttgccccaagaggaggagaagcttcccccacggaataccaacccagggatcaagtgtttcgccgtgcgctccctaggctgggtagagatgaccgaggaggagctggcccctggacgcagcagtgtggcagtcaacaattgcatccgtcagctctcttaccacaaaaacaacctgcatgaccccatgtctgggggctggggggaaggaaaggatctgctactgcagctggaggatgagacactaaagctagtggagccacagagccaggcactgctgcacgcccaacccatcatcagcatccgcgtgtggggcgtcgggcgggacagtggaagagagagggactttgcctacgtagctcgtgataagctgacccagatgctcaagtgccacgtgtttcgctgtgaggcacctgccaagaacatcgccaccagcctgcatgagatctgctctaagatcatggccgaacggcgtaatgcccgctgcttggtaaatggactctccctggaccactctaaacttgtggatgtccctttccaagtggaattcccagcgcctaagaatgagttggtccagaagttccaagtctattacctggggaatgtacctgttgctaaacctgttggggtagatgtgattaatggggccctcgagtcagtcctgtcctccagcagccgtgaacaatggaccccaagtcatgtcagtgtggcccctgctaccctcaccatcttgcaccagcagacagaggcagtgctgggagagtgtcgggtgcgtttcctctccttcctggccgtgggcagagatgtccacacgtttgcattcatcatggctgccggcccagcctccttctgctgccacatgttctggtgcgagcccaatgctgccagcctctcagaggctgtgcaggctgcgtgcatgcttcgctaccagaagtgtctggatgcccgttcccaggcctccacctcctgcctcccagcaccccctgctgagtctgtggcacggcgtgtagggtggactgtccgcaggggtgttcagtcgctgtggggctccctgaagcccaaacggctgggggcccataccccatgaagaagcccccaccttccctccacctgcttgtgttgggccccagggaactaaagggtgtgggtcagggaggggtctagaggctattcctaggcctcaggcctcccaaatatgcccctccccagtagctacggttccctgcctaggagctggggagggagagatctaatcccttcaaggaagtgataacactggagtggtaacaagaggagcaggaagcaaggccagccctggttctccatccccatgtgtttcaggtggaacaggaggaactggtccaggccaggcctcatcctcctggacccagcaggggcagaaggaggaagggactggtccaggcatgggtcccttccccctgctccatgggcacctctgctgtattgatatcactaataaagtctgtctgcactgc

SEQ ID NO: 442336 - DNA, 1947 bp, Homo sapiens
cggggcgcggccccgcggcccgcgcgctcctgggcgggggatgttgtgatggagaagccgcggcggagcccgaaccccgcagcctgagccacctccgtcatctgggcccggggcctcaccgcgcagattccttctggaaccccaacgccttcgagacggattccgacctgccggctggatggatgagggtccaggacacctcagggacctattactggcacatcccaacagggaccacccagtgggaaccccccggccgggcctccccctcacaggggagcagcccccaagaggagtcccagctcacctggacaggttttgctcatggagaaggctttgaggatggagaattttggaaggatgaacccagtgatgaggccccaatggagctgggactgaaggaacctgaggaggggacgttgaccttcccagctcagagcctcagcccagagccgttgccccaagaggaggagaagcttcccccacggaataccaacccagggatcaagtgtttcgccgtgcgctccctaggctgggtagagatgaccgaggaggagctggcccctggacgcagcagtgtggcagtcaacaattgcatccgtcagctctcttaccacaaaaacaacctgcatgaccccatgtctgggggctggggggaaggaaaggatctgctactgcagctggaggatgagacactaaagctagtggagccacagagccaggcactgctgcacgcccaacccatcatcagcatccgcgtgtggggcgtcgggcgggacagtggaagagagagggactttgcctacgtagctcgtgataagctgacccagatgctcaagtgccacgtgtttcgctgtgaggcacctgccaagaacatcgccaccagcctgcatgagatctgctctaagatcatggccgaacggcgtaatgcccgctgcttggtaaatggactctccctggaccactctaaacttgtggatgtccctttccaagtggaattcccagcgcctaagaatgagttggtccagaagttccaagtctattacctggggaatgtacctgttgctaaacctgttggggtagatgtgattaatggggccctcgagtcagtcctgtcctccagcagccgtgaacaatggaccccaagtcatgtcagtgtggcccctgctaccctcaccatcttgcaccagcagacagaggcagtgctgggagagtgtcgggtgcgtttcctctccttcctggccgtgggcagagatgtccacacgtttgcattcatcatggctgccggcccagcctccttctgctgccacatgttctggtgcgagcccaatgctgccagcctctcagaggctgtgcaggctgcgtgcatgcttcgctaccagaagtgtctggatgcccgttcccaggcctccacctcctgcctcccagcaccccctgctgagtctgtggcacggcgtgtagggtggactgtccgcaggggtgttcagtcgctgtggggctccctgaagcccaaacggctgggggcccataccccatgaagaagcccccaccttccctccacctgcttgtgttgggccccagggaactaaagggtgtgggtcagggaggggtctagaggctattcctaggcctcaggcctcccaaatatgcccctccccagtagctacggttccctgcctaggagctggggagggagagatctaatcccttcaaggaagtgataacactggagtggtaacaagaggagcaggaagcaaggccagccctggttctccatccccatgtgtttcaggtggaacaggaggaactggtccaggccaggcctcatcctcctggacccagcaggggcagaaggaggaagggactggtccaggcatgggtcccttccccctgctccatgggcacctctgctgtattgatatcactaataaagtctgtctgcactgc

SEQ ID NO: 442337 - DNA, 1846 bp, Homo sapiens
caagggtgtatgacacagatgcgagattccttctggaaccccaacgccttcgagacggattccgacctgccggctggatggatgagggtccaggacacctcagggacctattactggcacatcccaacagggaccacccagtgggaaccccccggccgggcctccccctcacaggggagcagcccccaagaggagtcccagctcacctggacaggttttgctcatggagaaggctttgaggatggagaattttggaaggatgaacccagtgatgaggccccaatggagctgggactgaaggaacctgaggaggggacgttgaccttcccagctcagagcctcagcccagagccgttgccccaagaggaggagaagcttcccccacggaataccaacccagggatcaagtgtttcgccgtgcgctccctaggctgggtagagatgaccgaggaggagctggcccctggacgcagcagtgtggcagtcaacaattgcatccgtcagctctcttaccacaaaaacaacctgcatgaccccatgtctgggggctggggggaaggaaaggatctgctactgcagctggaggatgagacactaaagctagtggagccacagagccaggcactgctgcacgcccaacccatcatcagcatccgcgtgtggggcgtcgggcgggacagtggaagagagagggactttgcctacgtagctcgtgataagctgacccagatgctcaagtgccacgtgtttcgctgtgaggcacctgccaagaacatcgccaccagcctgcatgagatctgctctaagatcatggccgaacggcgtaatgcccgctgcttggtaaatggactctccctggaccactctaaacttgtggatgtccctttccaagtggaattcccagcgcctaagaatgagttggtccagaagttccaagtctattacctggggaatgtacctgttgctaaacctgttggggtagatgtgattaatggggccctcgagtcagtcctgtcctccagcagccgtgaacaatggaccccaagtcatgtcagtgtggcccctgctaccctcaccatcttgcaccagcagacagaggcagtgctgggagagtgtcgggtgcgtttcctctccttcctggccgtgggcagagatgtccacacgtttgcattcatcatggctgccggcccagcctccttctgctgccacatgttctggtgcgagcccaatgctgccagcctctcagaggctgtgcaggctgcgtgcatgcttcgctaccagaagtgtctggatgcccgttcccaggcctccacctcctgcctcccagcaccccctgctgagtctgtggcacggcgtgtagggtggactgtccgcaggggtgttcagtcgctgtggggctccctgaagcccaaacggctgggggcccataccccatgaagaagcccccaccttccctccacctgcttgtgttgggccccagggaactaaagggtgtgggtcagggaggggtctagaggctattcctaggcctcaggcctcccaaatatgcccctccccagtagctacggttccctgcctaggagctggggagggagagatctaatcccttcaaggaagtgataacactggagtggtaacaagaggagcaggaagcaaggccagccctggttctccatccccatgtgtttcaggtggaacaggaggaactggtccaggccaggcctcatcctcctggacccagcaggggcagaaggaggaagggactggtccaggcatgggtcccttccccctgctccatgggcacctctgctgtattgatatcactaataaagtctgtctgcactgc

SEQ ID NO: 442338 - DNA, 2338 bp, Homo sapiens
cggggcgcggccccgcggcccgcgcgctcctgggcgggggatgttgtgatggagaagccgcggcggagcccgaaccccgcagcctgagccacctccgtcatctgggcccggggcctcaccgcgcaggagctgccaaggccatgtctgttccatcatcactgagccagtcggccattaatgccaacagccacggaggccccgcactgagcctacccctgcctctgcacgctgcccacaaccagctgctcaacgccaagctgcaggccacagctgtgggacccaaggacctgcgcagcgccatgggggagggtggtgggcctgagccaggccctgccaatgccaagtggctaaaagagggccagaaccagctccggcgggccgccacggcccaccgtgaccagaatcgcaatgtgaccttgaccttggcggaggaggccagccaggagcctgagatggcacccttgggccccaaaggcctgatacacctgtactctgagctggagctctcagctcacaacgcagccaaccgaggcctacgaggacctggcctgatcatcagcactcaagagcaggggccagatgagggagaggagaaggcggccggggaggccgaggaggaggaggaggatgatgatgatgaagaggaggaggaggacttatcttctcccccagggctgcctgagcccctggagagtgtggaggcccctcccaggccccaagcccttacagatggcccccgggaacacagcaagagtgccagcctcctgtttggcatgcggaacagtgcagccagtgatgaggactcaagctgggctaccttatcccagggcagcccctcctatggctccccagaggacacagattccttctggaaccccaacgccttcgagacggattccgacctgccggctggatggatgagggtccaggacacctcagggacctattactggcacatcccaacagggaccacccagtgggaaccccccggccgggcctccccctcacaggggagcagcccccaagaggagtcccagctcacctggacaggttttgctcatggagaaggctttgaggatggagaattttggaaggatgaacccagtgatgaggccccaatggagctgggactgaaggaacctgaggaggggacgttgaccttcccagctcagagcctcagcccagagccgttgccccaagaggaggagaagcttcccccacggaataccaacccagggatcaagtgtttcgccgtgcgctccctaggctgggtagagatgaccgaggaggagctggcccctggacgcagcagtgtggcagtcaacaattgcatccgtcagctctcttaccacaaaaacaacctgcatgaccccatgtctgggggctggggggaaggaaaggatctgctactgcagctggaggatgagacactaaagctagtggagccacagagccaggcactgctgcacgcccaacccatcatcagcatccgcgtgtggggcgtcgggcgggacagtggaagagagagggactttgcctacgtagctcgtgataagctgacccagatgctcaagtgccacgtgtttcgctgtgaggcacctgccaagaacatcgccaccagcctgcatgagatctgctctaagatcatggccgaacggcgtaatgcccgctgcttggtaaatggactctccctggaccactctaaacttgtggatgtccctttccaagtggaattcccagcgcctaagaatgagttggtccagaagttccaagtctattacctggggaatgtacctgttgctaaacctgttggggtagatgtgattaatggggccctcgagtcagtcctgtcctccagcagccgtgaacaatggaccccaagtcatgtcagtgtggcccctgctaccctcaccatcttgcaccagcagacagaggcagtgctgggagagtgtcgggtgcgtttcctctccttcctggccgtgggcagagatgtccacacgtttgcattcatcatggctgccggcccagcctccttctgctgccacatgttctggtgcgagcccaatgctgccagcctctcagaggctgtgcaggctgcgtgcatgcttcgctaccagaagtgtctggatgcccgttcccaggcctccaaggcagtggtggggagagttttgacggtataaaagatgcttataaaagtttggtttggggtggaacctctactttagaggggcacccaggaaacttaaatttatattctttggcctgaataagtatttcaaaatttgcctttttttttttttttttttttttggaaacaatttccccctttttcccccgg

SEQ ID NO: 442339 - DNA, 1349 bp, Homo sapiens
cggggcgcggccccgcggcccgcgcgctcctgggcgggggatgttgtgatggagaagccgcggcggagcccgaaccccgcagcctgagccacctccgtcatctgggcccggggcctcaccgcgcaggagctgccaaggccatgtctgttccatcatcactgagccagtcggccattaatgccaacagccacggaggccccgcactgagcctacccctgcctctgcacgctgcccacaaccagctgctcaacgccaagctgcaggccacagctgtgggacccaaggacctgcgcagcgccatgggggagggtggtgggcctgagccaggccctgccaatgccaagtggctaaaagagggccagaaccagctccggcgggccgccacggcccaccgtgaccagaatcgcaatgtgaccttgaccttggcggaggaggccagccaggagcctgagatggcacccttgggccccaaaggcctgatacacctgtactctgagctggagctctcagctcacaacgcagccaaccgaggcctacgaggacctggcctgatcatcagcactcaagagcaggggccagatgagggagaggagaaggcggccggggaggccgaggaggaggaggaggatgatgatgatgaagaggaggaggaggacttatcttctcccccagggctgcctgagcccctggagagtgtggaggcccctcccaggccccaagcccttacagatggcccccgggaacacagcaagagtgccagcctcctgtttggcatgcggaacagtgcagccagtgatgaggactcaagctgggctaccttatcccagggcagcccctcctatggctccccagaggacacagattccttctggaaccccaacgccttcgagacggattccgacctgccggctggatggatgagggtccaggacacctcagggacctattactggcacatcccaacagggaccacccagtgggaaccccccggccgggcctccccctcacaggggagcagcccccaagaggagtcccagctcacctggacaggttttgctcatggagaaggctttgaggatggagaattttggaagggagagatctaatcccttcaaggaagtgataacactggagtggtaacaagaggagcaggaagcaaggccagccctggttctccatccccatgtgtttcaggtggaacaggaggaactggtccaggccaggcctcatcctcctggacccagcaggggcagaaggaggaagggactggtccaggcatgggtcccttccccctgctccatgggcacctctgctgtattgatatcactaataaagtctgtctgcactgc

SEQ ID NO: 442340 - DNA, 2471 bp, Homo sapiens
tttggctgccctcccggaggtccgttctgtctgtcagccgctttggtacgctgcatcgggatcgaagtgacggaccgtgaaggcgcgagagtcaggtctgagggtcgggggcagagccgcccgcgaggccggcctggggatagcgatgctcgggttccccccgggtcgcccgcagctcccggtccagctccgcccacagactcggatggcgaccgcactgagggacccggcttcggttcccatagctacagaggtgcttttcaaacttacacagggaagtgtgacctttgaagatgtggccgtgtacttctcctgggaggaatgggatctccttgatgaggctcagaaacacctgtacttcgatgtgatgctggagaactttgcacttacgtcctccctgggttgttggtgtggagtggaacatgaggaaacaccttctgaacagagaatttctggagaaagagtgccacagttcaggacttccaaagaaggttcatcttcccagaatgccgactcctgtgaaatatgttgcctggtcttgagagatattttgcacttggctgaacaccaaggaacaaactgcgggcagaaactacacacatgtggaaaacaattctacatcagtgcaaatcttcaacagcaccagaggcagcacattacagaggcacctttcagaagttatgtggacactgcctcgtttacacagagttgcatagtccatgtgtcggagaaaccctttacctgcagggagatcaggaaagacttcctggccaacatgaggtttctccatcaagacgccactcaaacaggggagaagccaaataacagtaacaagtgtgcggtggccttttacagtggaaaaagtcatcacaactggggaaaatgcagtaaagcctttagccacatagacacacttgttcaggaccagagaatcctcactagagaaggactttttgagtgcagtaaatgtgggaaagcatgtacgcgaagatgtaacctcattcagcaccagaaagtccacagtgaagaaaggccttatgaatgcaatgaatgtggaaaattctttacctactactccagtttcattatacatcagagagttcatactggagaaaggccttatgcgtgccctgaatgtgggaaatcgtttagtcagatatacagcctcaatagccataggaaagttcacactggagaaaggccttatgaatgtggggaatgtgggaaatcttttagccaaaggtccaacctcatgcagcatcgcagagttcacactggagaaaggccttatgaatgcagcgaatgtgggaaatcttttagccaaaactttagcctgatctaccaccagagagttcacactggagaaagacctcatgagtgcaatgaatgtggaaaatcctttagccgaagctccagcctcattcaccaccggagacttcacactggagaaagaccctatgagtgcagtaaatgtgggaagtcatttaagcaaagctccagcttcagttcacatcggaaagtccacacaggggaaaggccttatgtgtgtggggaatgtgggaaatcctttagccatagctccaaccttaagaaccaccagagagttcacactggagaaagacctgttgagtgcagtgaatgtagcaaatcctttagctgtaaatctaacctcattaaacacctgagagttcacactggagaaaggccttatgagtgcagtgaatgtgggaaatcctttagccaaagttctagcctcattcaacaccgcagagttcacacgggaaaaaggccttatcagtgcagtcaatgtgggaaatcctttggctgcaaatctgtcctcattcaacaccagagagttcacattggagaaaagccttagctgtactgagaatatgcaatttccttttagtgtaattatactgaaggagtacacctgtgagagagacaagtacctgatttggaagccccaacatctaaggatatacagtgggcggattccccttaagttccaggtatgtgttacactttctaacatgccatttagaaagtgttagactttctcacctgccatttatggctcttgccgtttatgtcactgacagtttctgaggcagaagccgtatcatgtctaccacctgtgaggtccacacagtgtgtatcatttacctcctgaacctgctcaaggaagcagacctctgcttctccccatttgctagaagaaatcatgaatagtctgagtcttcctctctgacaagttagggcatggacttgacccagctttgtgccagagaacccaatatgagtgttgttggcagcttgccaagaaggactgtctttttcaagacatactggtttcatgtgacacctccatggatttttttccagcctctaagtcaccaacttgggaactgcttgtctcacgttgctttgttttttacaataataaaagcattattatttaagctaattta

SEQ ID NO: 442341 - DNA, 2628 bp, Homo sapiens
tttggctgccctcccggaggtccgttctgtctgtcagccgctttggtacgctgcatcgggatcgaagtgacggaccgtgaaggcgcgagagtcaggtctgagggtcgggggcagagccgcccgcgaggccggcctggggatagcgatgctcgggttccccccgggtcgcccgcagctcccggtccagctccgcccacagactcggatggcgaccgcactgagggacccggcttcggttcccatagctacagaggtgcttttcaaacttacacagggaagtgtgacctttgaagatgtggccgtgtacttctcctgggaggaatgggatctccttgatgaggctcagaaacacctgtacttcgatgtgatgctggagaactttgcacttacgtcctccctgggacttatatcatcctggtctcatgtagttgctcaactagggctaggggaagtgccctctgttcttcacaggatgttcatgactccagcctcagcaagatgggatcagagagggcctggcctacatgaatggcacttgggaaaaggcatgtcatcagggttgttggtgtggagtggaacatgaggaaacaccttctgaacagagaatttctggagaaagagtgccacagttcaggacttccaaagaaggttcatcttcccagaatgccgactcctgtgaaatatgttgcctggtcttgagagatattttgcacttggctgaacaccaaggaacaaactgcgggcagaaactacacacatgtggaaaacaattctacatcagtgcaaatcttcaacagcaccagaggcagcacattacagaggcacctttcagaagttatgtggacactgcctcgtttacacagagttgcatagtccatgtgtcggagaaaccctttacctgcagggagatcaggaaagacttcctggccaacatgaggtttctccatcaagacgccactcaaacaggggagaagccaaataacagtaacaagtgtgcggtggccttttacagtggaaaaagtcatcacaactggggaaaatgcagtaaagcctttagccacatagacacacttgttcaggaccagagaatcctcactagagaaggactttttgagtgcagtaaatgtgggaaagcatgtacgcgaagatgtaacctcattcagcaccagaaagtccacagtgaagaaaggccttatgaatgcaatgaatgtggaaaattctttacctactactccagtttcattatacatcagagagttcatactggagaaaggccttatgcgtgccctgaatgtgggaaatcgtttagtcagatatacagcctcaatagccataggaaagttcacactggagaaaggccttatgaatgtggggaatgtgggaaatcttttagccaaaggtccaacctcatgcagcatcgcagagttcacactggagaaaggccttatgaatgcagcgaatgtgggaaatcttttagccaaaactttagcctgatctaccaccagagagttcacactggagaaagacctcatgagtgcaatgaatgtggaaaatcctttagccgaagctccagcctcattcaccaccggagacttcacactggagaaagaccctatgagtgcagtaaatgtgggaagtcatttaagcaaagctccagcttcagttcacatcggaaagtccacacaggggaaaggccttatgtgtgtggggaatgtgggaaatcctttagccatagctccaaccttaagaaccaccagagagttcacactggagaaagacctgttgagtgcagtgaatgtagcaaatcctttagctgtaaatctaacctcattaaacacctgagagttcacactggagaaaggccttatgagtgcagtgaatgtgggaaatcctttagccaaagttctagcctcattcaacaccgcagagttcacacgggaaaaaggccttatcagtgcagtcaatgtgggaaatcctttggctgcaaatctgtcctcattcaacaccagagagttcacattggagaaaagccttagctgtactgagaatatgcaatttccttttagtgtaattatactgaaggagtacacctgtgagagagacaagtacctgatttggaagccccaacatctaaggatatacagtgggcggattccccttaagttccaggtatgtgttacactttctaacatgccatttagaaagtgttagactttctcacctgccatttatggctcttgccgtttatgtcactgacagtttctgaggcagaagccgtatcatgtctaccacctgtgaggtccacacagtgtgtatcatttacctcctgaacctgctcaaggaagcagacctctgcttctccccatttgctagaagaaatcatgaatagtctgagtcttcctctctgacaagttagggcatggacttgacccagctttgtgccagagaacccaatatgagtgttgttggcagcttgccaagaaggactgtctttttcaagacatactggtttcatgtgacacctccatggatttttttccagcctctaagtcaccaacttgggaactgcttgtctcacgttgctttgttttttacaataataaaagcattattatttaagctaattta

SEQ ID NO: 442342 - DNA, 281 bp, Homo sapiens
ctggtgagaggcagcactaaggaccgaggcgcacaggttagacagtcgacccaaagttacgtggctctgggccggggcaagggtacagggaaggcctgtgcccatggagcactgccatgatcacattcctctgaggcctgcgtctttccacaggttcccatagctacagaggtgcttttcaaacttacacaggtaagtggaggtatctcagcccctcactggtctggaatgtccctccaccctccccagacagatattttctttagatttgtggtgtcatg

SEQ ID NO: 442343 - DNA, 2432 bp, Homo sapiens
tttggctgccctcccggaggtccgttctgtctgtcagccgctttggtacgctgcatcgggatcgaagtgacggaccgtgaaggcgcgagagtcaggtctgagggtcgggggcagagccgcccgcgaggccggcctggggatagcgatgctcgggttccccccgggtcgcccgcagctcccggtccagctccgcccacagactcggatggcgaccgcactgagggacccggcttcgggaagtgtgacctttgaagatgtggccgtgtacttctcctgggaggaatgggatctccttgatgaggctcagaaacacctgtacttcgatgtgatgctggagaactttgcacttacgtcctccctgggttgttggtgtggagtggaacatgaggaaacaccttctgaacagagaatttctggagaaagagtgccacagttcaggacttccaaagaaggttcatcttcccagaatgccgactcctgtgaaatatgttgcctggtcttgagagatattttgcacttggctgaacaccaaggaacaaactgcgggcagaaactacacacatgtggaaaacaattctacatcagtgcaaatcttcaacagcaccagaggcagcacattacagaggcacctttcagaagttatgtggacactgcctcgtttacacagagttgcatagtccatgtgtcggagaaaccctttacctgcagggagatcaggaaagacttcctggccaacatgaggtttctccatcaagacgccactcaaacaggggagaagccaaataacagtaacaagtgtgcggtggccttttacagtggaaaaagtcatcacaactggggaaaatgcagtaaagcctttagccacatagacacacttgttcaggaccagagaatcctcactagagaaggactttttgagtgcagtaaatgtgggaaagcatgtacgcgaagatgtaacctcattcagcaccagaaagtccacagtgaagaaaggccttatgaatgcaatgaatgtggaaaattctttacctactactccagtttcattatacatcagagagttcatactggagaaaggccttatgcgtgccctgaatgtgggaaatcgtttagtcagatatacagcctcaatagccataggaaagttcacactggagaaaggccttatgaatgtggggaatgtgggaaatcttttagccaaaggtccaacctcatgcagcatcgcagagttcacactggagaaaggccttatgaatgcagcgaatgtgggaaatcttttagccaaaactttagcctgatctaccaccagagagttcacactggagaaagacctcatgagtgcaatgaatgtggaaaatcctttagccgaagctccagcctcattcaccaccggagacttcacactggagaaagaccctatgagtgcagtaaatgtgggaagtcatttaagcaaagctccagcttcagttcacatcggaaagtccacacaggggaaaggccttatgtgtgtggggaatgtgggaaatcctttagccatagctccaaccttaagaaccaccagagagttcacactggagaaagacctgttgagtgcagtgaatgtagcaaatcctttagctgtaaatctaacctcattaaacacctgagagttcacactggagaaaggccttatgagtgcagtgaatgtgggaaatcctttagccaaagttctagcctcattcaacaccgcagagttcacacgggaaaaaggccttatcagtgcagtcaatgtgggaaatcctttggctgcaaatctgtcctcattcaacaccagagagttcacattggagaaaagccttagctgtactgagaatatgcaatttccttttagtgtaattatactgaaggagtacacctgtgagagagacaagtacctgatttggaagccccaacatctaaggatatacagtgggcggattccccttaagttccaggtatgtgttacactttctaacatgccatttagaaagtgttagactttctcacctgccatttatggctcttgccgtttatgtcactgacagtttctgaggcagaagccgtatcatgtctaccacctgtgaggtccacacagtgtgtatcatttacctcctgaacctgctcaaggaagcagacctctgcttctccccatttgctagaagaaatcatgaatagtctgagtcttcctctctgacaagttagggcatggacttgacccagctttgtgccagagaacccaatatgagtgttgttggcagcttgccaagaaggactgtctttttcaagacatactggtttcatgtgacacctccatggatttttttccagcctctaagtcaccaacttgggaactgcttgtctcacgttgctttgttttttacaataataaaagcattattatttaagctaattta

SEQ ID NO: 442344 - DNA, 2748 bp, Homo sapiens
tttggctgccctcccggaggtccgttctgtctgtcagccgctttggtacgctgcatcgggatcgaagtgacggaccgtgaaggcgcgagagtcaggtctgagggtcgggggcagagccgcccgcgaggccggcctggggatagcgatgctcgggttccccccgggtcgcccgcagctcccggtccagctccgcccacagactcggatggcgaccgcactgagggacccggcttcggctgttcagtggaagaaaagactttagagatggatgaggacgttgaggcagagggaggttgaatatttttccaaggccacacaactggtgagaggcagcactaaggaccgaggcgcacaggttcccatagctacagaggtgcttttcaaacttacacagggaagtgtgacctttgaagatgtggccgtgtacttctcctgggaggaatgggatctccttgatgaggctcagaaacacctgtacttcgatgtgatgctggagaactttgcacttacgtcctccctgggacttatatcatcctggtctcatgtagttgctcaactagggctaggggaagtgccctctgttcttcacaggatgttcatgactccagcctcagcaagatgggatcagagagggcctggcctacatgaatggcacttgggaaaaggcatgtcatcagggttgttggtgtggagtggaacatgaggaaacaccttctgaacagagaatttctggagaaagagtgccacagttcaggacttccaaagaaggttcatcttcccagaatgccgactcctgtgaaatatgttgcctggtcttgagagatattttgcacttggctgaacaccaaggaacaaactgcgggcagaaactacacacatgtggaaaacaattctacatcagtgcaaatcttcaacagcaccagaggcagcacattacagaggcacctttcagaagttatgtggacactgcctcgtttacacagagttgcatagtccatgtgtcggagaaaccctttacctgcagggagatcaggaaagacttcctggccaacatgaggtttctccatcaagacgccactcaaacaggggagaagccaaataacagtaacaagtgtgcggtggccttttacagtggaaaaagtcatcacaactggggaaaatgcagtaaagcctttagccacatagacacacttgttcaggaccagagaatcctcactagagaaggactttttgagtgcagtaaatgtgggaaagcatgtacgcgaagatgtaacctcattcagcaccagaaagtccacagtgaagaaaggccttatgaatgcaatgaatgtggaaaattctttacctactactccagtttcattatacatcagagagttcatactggagaaaggccttatgcgtgccctgaatgtgggaaatcgtttagtcagatatacagcctcaatagccataggaaagttcacactggagaaaggccttatgaatgtggggaatgtgggaaatcttttagccaaaggtccaacctcatgcagcatcgcagagttcacactggagaaaggccttatgaatgcagcgaatgtgggaaatcttttagccaaaactttagcctgatctaccaccagagagttcacactggagaaagacctcatgagtgcaatgaatgtggaaaatcctttagccgaagctccagcctcattcaccaccggagacttcacactggagaaagaccctatgagtgcagtaaatgtgggaagtcatttaagcaaagctccagcttcagttcacatcggaaagtccacacaggggaaaggccttatgtgtgtggggaatgtgggaaatcctttagccatagctccaaccttaagaaccaccagagagttcacactggagaaagacctgttgagtgcagtgaatgtagcaaatcctttagctgtaaatctaacctcattaaacacctgagagttcacactggagaaaggccttatgagtgcagtgaatgtgggaaatcctttagccaaagttctagcctcattcaacaccgcagagttcacacgggaaaaaggccttatcagtgcagtcaatgtgggaaatcctttggctgcaaatctgtcctcattcaacaccagagagttcacattggagaaaagccttagctgtactgagaatatgcaatttccttttagtgtaattatactgaaggagtacacctgtgagagagacaagtacctgatttggaagccccaacatctaaggatatacagtgggcggattccccttaagttccaggtatgtgttacactttctaacatgccatttagaaagtgttagactttctcacctgccatttatggctcttgccgtttatgtcactgacagtttctgaggcagaagccgtatcatgtctaccacctgtgaggtccacacagtgtgtatcatttacctcctgaacctgctcaaggaagcagacctctgcttctccccatttgctagaagaaatcatgaatagtctgagtcttcctctctgacaagttagggcatggacttgacccagctttgtgccagagaacccaatatgagtgttgttggcagcttgccaagaaggactgtctttttcaagacatactggtttcatgtgacacctccatggatttttttccagcctctaagtcaccaacttgggaactgcttgtctcacgttgctttgttttttacaataataaaagcattattatttaagctaattta

SEQ ID NO: 442345 - DNA, 1470 bp, Homo sapiens
aggcgcatttccaacgcttggaggagagggcggggtgtcgtttcctttcgctgatgcaagagcctagtgcggtggtgggagaggtatcggcaggggcagcgctgccgccggggcctggggctgacccgtctgacttcccgtccgtgccgagcccactcgagccgcagccatgtctggggacgagatgatttttgatcctactatgagcaagaagaaaaagaagaagaagaagccttttatgttagatgaggaaggggatacccaaacagaggaaacccagccttcagaaacaaaagaagtggagccagagccaactgaggacaaggatttggaagctgatgaagaggacactaggaaaaaagatgcttctgatgatctagatgacttgaacttctttaatcaaaagaaaaagaagaaaaaaactaaaaagatatttgatattgatgaagctgaagaaggtgtaaaggatcttaagattgaaagtgatgttcaagaaccaactgaaccagaggatgaccttgacattatgcttggcaataaaaagaagaaaaagaagaatgttaagttcccagatgaggatgaaatactagagaaagatgaagctctagaagatgaagacaacaaaaaagatgatggtatctcattcagtaatcagacaggccctgcttgggcaggctcagaaagagactacacatacgaggagctgctgaatcgagtgttcaacatcatgagggaaaagaatccagatatggttgctggggagaaaaggaaatttgtcatgaaacctccacaagtcgtccgagtaggaaccaagaaaacttcttttgtcaactttacagatatctgtaaactattacatcgtcagcccaaacatctccttgcatttttgttggctgaattgggtacaagtggttctatagatggtaataaccaacttgtaatcaaaggaagattccaacagaaacagatagaaaatgtcttgagaagatatatcaaggaatatgtcacttgtcacacatgccgatcaccggacacaatcctgcagaaggacacacgactctatttcctacagtgcgaaacttgtcattctagatgttctgttgccagtatcaaaaccggcttccaggctgtcacgggcaagcgagcacagctccgtgccaaagctaactaatttgctaatcactgattttgcaaagcttgttgtggagatgtggctggacaggtttgccatcagagtggatataccgttgtattaaaaacaagataaaaaagctgccaagatttttggcgagtggttggtctgaagtccttgcaagacgctgatgctcaagctgttgacatactcattgcctactttaacacctgtcagagaaacgtgatatggggtaaggaggtgcttttttaaaatcgttcatagacttctgtaaaatgcaagataaattaaagttattataacagtgattctttcaa

SEQ ID NO: 442346 - DNA, 1277 bp, Homo sapiens
aggcgcatttccaacgcttggaggagagggcggggtgtcgtttcctttcgctgatgcaagagcctagtgcggtggtgggagaggtatcggcaggggcagcgctgccgccggggcctggggctgacccgtctgacttcccgtccgtgccgagcccactcgagccgcagccatgtctggggacgagatgatttttgatcctactatgagcaagaagaaaaagaagaagaagaagccttttatgttagatgaggaaggggatacccaaacagaggaaacccagccttcagaaacaaaagaagtggagccagagccaactgaggacaaggatttggaagctgatgaagaggacactaggaaaaaagatgcttctgatgatctagatgacttgaacttctttaatcaaaagaaaaagaagaaaaaaactaaaaagatatttgatattgatgaagctgaagaaggtgtaaaggatcttaagattgaaagtgatgttcaagaaccaactgaaccagaggatgaccttgacattatgcttggcaataaaaagaagaaaaagaagaatgttaagttcccagatgaggatgaaatactagagaaagatgaagctctagaagatgaagacaacaaaaaagatgatggtatctcattcagtaatcagacaggccctgcttgggcaggctcagaaagagactacacatacgaggagctgctgaatcgagtgttcaacatcatgagggaaaagaatccagatatggttgctggggagaaaaggaaatttgtcatgaaacctccacaagtcgtccgagtaggaaccaagaaaacttcttttgtcaactttacagatatctgtaaactattacatcgtcagcccaaacatctccttgcatttttgttggctgaattgggtacaagtggttctatagatggtaataaccaacttgtaatcaaaggaagattccaacagaaacagatagaaaatgtcttgagaagatatatcaaggaatatgtcacttgtcacacatgccgatcaccggacacaatcctgcagaaggacacacgactctatttcctacagtgcgaaacttgtcattctagatgttctgttgccagtatcaaaaccggcttccaggctgtcacgggcaagcgagcacagctccgtgccaaagctaactaatttgctaatcactgattttgcaaagcttgttgtggagatgtggctggacaggtttgccatcagagtggatataccgttgtattaaaaacaagataaaaaagctgcc

SEQ ID NO: 442347 - DNA, 520 bp, Homo sapiens
ggatcgggatacgtgatgaagatgactctaggagaaacgatgcttcgtgatgatctacaatgatcttgagcttttttaatccggcacgacgcaagacgactggccgtcgtttgatatttgatattgatgaagctgaagaaggtgtaaaggatcttaagattgaaagtgatgttcaagaaccaactgaaccagaggatgaccttgacattatgcttggcaataaaaagaagaaaaagaagaatgttaagttcccagatgaggatgaaatactagagaaagatgaagctctagaagatgaagacaacaaaaaagatgatggtatctcattcagtaatcagacaggccctgcttgggcaggctcagaaagagactacacatacgaggagctgctgaatcgagtgttcaacatcatgaggggaagatcccaggcagccagaggaaacgaaaaagagaaagatggaactacagactctgggatcaaactagaacctgttccaggattgccaggagctcttcctcc

SEQ ID NO: 442348 - DNA, 661 bp, Homo sapiens
agaggaccccgcatctgcgtcccatcagtgaggaaggatgtagagagtatactctaatgactgggtctcttgcatggtcacctaaaatagaagtgggaaccatcactaagacagataaagaagagtagtaaccatggatgtgtgggggtaggatgaaacgggtgtccagctgttggcacagtctttaaatggggaatgttaagagattcattcagaggcaaagcagtaatggaggtcaaataacaccaaggtcaggactggtgcttttcctcccttttgctggctcagacttttgttggtaactcttggtagggcctaagtagtttcagacggtgtgacagattaggttaaaagcaaatgagattgactgggagagtcattcagcctgatgggagcaagatggcgcagtcttctcccatcagaatcaaaagaaaaagaagaaaaaaactaaaaagatatttgatattgatgaagctgaagaaggtgtaaaggatcttaagattgaaagtgatgttcaagaaccaactgaaccagaggatgaccttgacattatgcttggcaataaaaagaagaaaaagaagaatgttaagttcccagatgggagcaagatggccagtcttctcccatcagcaattcctgaaacgggttaaaacttaactgg

SEQ ID NO: 442349 - DNA, 219 bp, Homo sapiens
aatttggttcctttaggaaaaaacaataataatggagatatttttgttttctttcatagtggttctatagatggtaataaccaacttgtaatcaaaggaagattccaacagaaacagatagaaaatgtcttgagaagatatatcagtaagtgtataattcatttcattagatcaccctgaaatgttctcatgaggctgcagtgttagaggaagagccat

SEQ ID NO: 442350 - DNA, 1887 bp, Homo sapiens
aggcgcatttccaacgcttggaggagagggcggggtgtcgtttcctttcgctgatgcaagagcctagtgcggtggtgggagaggtatcggcaggggcagcgctgccgccggggcctggggctgacccgtctgacttcccgtccgtgccgagcccactcgagccgcagccatgtctggggacgagggtgaggatctgagcccggcgtaagggctaaggattgaggcgagaagcctaacccactccagtgtgggagaacgggcctgcggcctagcagccggccgccgccatgtgaggcagccgcgcctaggcggcccggagcggcagagccggcgaggactccggagccgcaggcttggccgcagcccgctttcctcagggcggcagcgctgaggcggacctcctgccgtggttggcgtttccggaatggagagcacacgttgagtcgtcctcccggaaggggctcgaatgcccggttaataaccccgaacgagactggggctggcgatccctgcattcctttctgctgggcactgccgccccagctcgcctcactgggtgccgggggtgccaggggtgccgcgaggagcctctcttggcttgatgatttttgatcctactatgagcaagaagaaaaagaagaagaagaagccttttatgttagatgaggaaggggatacccaaacagaggaaacccagccttcagaaacaaaagaagtggagccagagccaactgaggacaaggatttggaagctgatgaagaggacactaggaaaaaagatgcttctgatgatctagatgacttgaacttctttaatcaaaagaaaaagaagaaaaaaactaaaaagatatttgatattgatgaagctgaagaaggtgtaaaggatcttaagattgaaagtgatgttcaagaaccaactgaaccagaggatgaccttgacattatgcttggcaataaaaagaagaaaaagaagaatgttaagttcccagatgaggatgaaatactagagaaagatgaagctctagaagatgaagacaacaaaaaagatgatggtatctcattcagtaatcagacaggccctgcttgggcaggctcagaaagagactacacatacgaggagctgctgaatcgagtgttcaacatcatgagggaaaagaatccagatatggttgctggggagaaaaggaaatttgtcatgaaacctccacaagtcgtccgagtaggaaccaagaaaacttcttttgtcaactttacagatatctgtaaactattacatcgtcagcccaaacatctccttgcatttttgttggctgaattgggtacaagtggttctatagatggtaataaccaacttgtaatcaaaggaagattccaacagaaacagatagaaaatgtcttgagaagatatatcaaggaatatgtcacttgtcacacatgccgatcaccggacacaatcctgcagaaggacacacgactctatttcctacagtgcgaaacttgtcattctagatgttctgttgccagtatcaaaaccggcttccaggctgtcacgggcaagcgagcacagctccgtgccaaagctaactaatttgctaatcactgattttgcaaagcttgttgtggagatgtggctggacaggtttgccatcagagtggatataccgttgtattaaaaacaagataaaaaagctgccaagatttttggcgagtggttggtctgaagtccttgcaagacgctgatgctcaagctgttgacatactcattgcctactttaacacctgtcagagaaacgtgatatggggtaaggaggtgcttttttaaaatcgttcatagacttctgtaaaatgcaagataaattaaagttattataacagtgattctttcaa

SEQ ID NO: 442351 - DNA, 1390 bp, Homo sapiens
actatctcatcaacaactgactaaacaccacccaacaatgactaatcaaactaacctcaaaacaaatgaagaccatacacaacactaaaggacgaacctgatctcttatactagtatccttaatcatttgcattgccacaactaacctcctcggactccggcctcacttcattagcaccaagccaccgaagagtctcaggccttcagaaacaaaagaagtggagccagagccaactgaggacaaggatttggaagctgatgaagaggacactaggaaaaaagatgcttctgatgatctagatgacttgaacttctttaatcaaaagaaaaagaagaaaaaaactaaaaagatatttgatattgatgaagctgaagaaggtgtaaaggatcttaagattgaaagtgatgttcaagaaccaactgaaccagaggatgaccttgacattatgcttggcaataaaaagaagaaaaagaagaatgttaagttcccagatgaggatgaaatactagagaaagatgaagctctagaagatgaagacaacaaaaaagatgatggtatctcattcagtaatcagacaggccctgcttgggcaggctcagaaagagactacacatacgaggagctgctgaatcgagtgttcaacatcatgagggaaaagaatccagatatggttgctggggagaaaaggaaatttgtcatgaaacctccacaagtcgtccgagtaggaaccaagaaaacttcttttgtcaactttacagatatctgtaaactattacatcgtcagcccaaacatctccttgcatttttgttggctgaattgggtacaagtggttctatagatggtaataaccaacttgtaatcaaaggaagattccaacagaaacagatagaaaatgtcttgagaagatatatcaaggaatatgtcacttgtcacacatgccgatcaccggacacaatcctgcagaaggacacacgactctatttcctacagtgcgaaacttgtcattctagatgttctgttgccagtatcaaaaccggcttccaggctgtcacgggcaagcgagcacagctccgtgccaaagctaactaatttgctaatcactgattttgcaaagcttgttgtggagatgtggctggacaggtttgccatcagagtggatataccgttgtattaaaaacaagataaaaaagctgccaagatttttggcgagtggttggtctgaagtccttgcaagacgctgatgctcaagctgttgacatactcattgcctactttaacacctgtcagagaaacgtgatatggggtaaggaggtgcttttttaaaatcgttcatagacttctgtaaaatgcaagataaattaaagttattataacagtgattctttcaa

SEQ ID NO: 442352 - DNA, 1247 bp, Homo sapiens
tttccctgccaaaataatgtcagcccacgtcatttttaaaaaagaacaggctgggtgtggtggctcatgcctgtaatcccagcattttgggaggccagggcgggaggatctcttgaggccaggagtttgagactagcctgagcaacaaagcaagacctcctcatctcaacagaaaatgtaataaaataaataaaaaagaatagtcccagtatcaaatgttcagactcatctcactttcttagggatcttaagattgaaagtgatgttcaagaaccaactgaaccagaggatgaccttgacattatgcttggcaataaaaagaagaaaaagaagaatgttaagttcccagatgaggatgaaatactagagaaagatgaagctctagaagatgaagacaacaaaaaagatgatggtatctcattcagtaatcagacaggccctgcttgggcaggctcagaaagagactacacatacgaggagctgctgaatcgagtgttcaacatcatgagggaaaagaatccagatatggttgctggggagaaaaggaaatttgtcatgaaacctccacaagtcgtccgagtaggaaccaagaaaacttcttttgtcaactttacagatatctgtaaactattacatcgtcagcccaaacatctccttgcatttttgttggctgaattgggtacaagtggttctatagatggtaataaccaacttgtaatcaaaggaagattccaacagaaacagatagaaaatgtcttgagaagatatatcaaggaatatgtcacttgtcacacatgccgatcaccggacacaatcctgcagaaggacacacgactctatttcctacagtgcgaaacttgtcattctagatgttctgttgccagtatcaaaaccggcttccaggctgtcacgggcaagcgagcacagctccgtgccaaagctaactaatttgctaatcactgattttgcaaagcttgttgtggagatgtggctggacaggtttgccatcagagtggatataccgttgtattaaaaacaagataaaaaagctgccaagatttttggcgagtggttggtctgaagtccttgcaagacgctgatgctcaagctgttgacatactcattgcctactttaacacctgtcagagaaacgtgatatggggtaaggaggtgcttttttaaaatcgttcatagacttctgtaaaatgcaagataaattaaagttattataacagtgattctttcaa

SEQ ID NO: 442353 - DNA, 2922 bp, Homo sapiens
aggcgcatttccaacgcttggaggagagggcggggtgtcgtttcctttcgctgatgcaagagcctagtgcggtggtgggagaggtatcggcaggggcagcgctgccgccggggcctggggctgacccgtctgacttcccgtccgtgccgagcccactcgagccgcagccatgtctggggacgagatgatttttgatcctactatgagcaagaagaaaaagaagaagaagaagccttttatgttagatgaggaaggggatacccaaacagaggaaacccagccttcagaaacaaaagaagtggagccagagccaactgaggacaaggatttggaagctgatgaagaggacactaggaaaaaagatgcttctgatgatctagatgacttgaacttctttaatcaaaagaaaaagaagaaaaaaactaaaaagatatttgatattgatgaagctgaagaaggtgtaaaggatcttaagattgaaagtgatgttcaagaaccaactgaaccagaggatgaccttgacattatgcttggcaataaaaagaagaaaaagaagaatgttaagttcccagatgaggatgaaatactagagaaagatgaagctctagaagatgaagacaacaaaaaagatgatggtatctcattcagtaatcagacaggccctgcttgggcaggctcagaaagagactacacatacgaggagctgctgaatcgagtgttcaacatcatgagggaaaagaatccagatatggttgctggggagaaaaggaaatttgtcatgaaacctccacaagtcgtccgagtaggaaccaagaaaacttcttttgtcaactttacagatatctgtaaactattacatcgtcagcccaaacatctccttgcatttttgttggctgaattgggtacaagtggttctatagatggtaataaccaacttgtaatcaaaggaagattccaacagaaacagatagaaaatgtcttgagaagatatatcaaggaatatgtcacttgtcacacatgccgatcaccggacacaatcctgcagaaggacacacgactctatttcctacagtgcgaaacttgtcattctagatgttctgttgccagtatcaaaaccggcttccaggctgtcacgggcaagcgagcacagctccgtgccaaagctaactaatttgctaatcactgattttgcaaagcttgttgtggagatgtggctggacaggtttgccatcagagtggatataccgttgtattaaaaacaagataaaaaagctgccaagatttttggcgagtggttggtctgaagtccttgcaagacgctgatgctcaagctgttgacatactcattgcctactttaacacctgtcagagaaacgtgatatggggtaaggaggtgcttttttaaaatcgttcatagacttctgtaaaatgcaagataaattaaagttattataacagtgattctttcaatttggtttgtccttcagttttcttttctataaatgtgcttggtgaaatcagcaagaaaccaaccatataaaacagtgtgtgccgggctctgactgagaaactgaacaatggcaggcgcttcatctgggcagccatttttcttctctgcttctcttgagatacatagttaaagtagacacggcgagacttaggaggattgcctgttttcagtgtccagggaatgactccatagatttgaattcttttccgtatgtggggatggttgctactacctcaccgccaagtcctcccccagctgttaccacatgagggaatacaaggtgctaggtaccctccttcctcgttggccactaagaggtcttagaaacatagcctgtaaatgtgtcttgtaactggcacactaaaaaagatcctagttgagcatctctcttggtgaggaagcgatgtgtgtgcggttcaggaaactcctccaagaggaggaggagtccaaacagggatgccagaggaagctttccgttttcctagccaacttgtgttctgggtttgaaaaagacccaccacaaatgctttttctattttctgatttaaaagtcgcttttgaatatgaccatgagaaaccaagaaatgctgcttgtgtggtgctctgcttcctgaggatttggctggaaggggattctccgctggcacatgggagaaggccatcttctgtgtcggtgctgtgatctgccttgttctcacttgctgaggataagggcatacacgctgctcctcgctttcttgttgcccgacttcgtactaagcagctcaggagcagtcactcagacccaaatgtcttgactgtgttgtttttaatcactgtgacccttaaagtacaggccaagtgttgtcaaacaccttggctaaaacagtggagggtgatgggtaaagcagtagagggccctcaacccacacactggctgaaactgccaccaactgccacgatgaacccaactgctgtttatgcccccattttcctttttttgtatctacacccacacgattcccaatgttggatatttctacatgaataaagcaaggatcagtgcctcttatgtaaaaaaaaaaacaaaaaaaaaaaaaaaaaaaaaaaacaaaaaaaacaaaaacaaagaaaaaaaaaaaaaaaaaaaaaaaaaaaaaaaagaggggggggcggcgcgccaaaataaaacccgcccggggcgcgccaacattgtcagtatcaccgccaacgtatttgttgtgtgcaaagaacggcgtgcccccacataaggaggagcagtatattataaaaagaggcaaggcgcgcgacggcatatatataaaaaaaaccgcgtcagaaggcaaaaacacgcggtgctgcagtgcaccttctgggagagacaacacccaacatggcggggaggaagcacaactcaggtggagacccccttg

SEQ ID NO: 442354 - DNA, 1089 bp, Homo sapiens
tcgcgttagtccgtaccagatcataatcttgacacatctgatatccagttcttggaggatgctggaaacaacgtggaggtagatgagtctttgttccaagaaatggatgacttggagctagaaaatgatgaaactgtccagactaccctcaagtttacatacagtgaaaaatacccagatgaagctcccctttatgaaatattctcccaggaaagatgaagctctagaagatgaagacaacaaaaaagatgatggtatctcattcagtaatcagacaggccctgcttgggcaggctcagaaagagactacacatacgaggagctgctgaatcgagtgttcaacatcatgagggaaaagaatccagatatggttgctggggagaaaaggaaatttgtcatgaaacctccacaagtcgtccgagtaggaaccaagaaaacttcttttgtcaactttacagatatctgtaaactattacatcgtcagcccaaacatctccttgcatttttgttggctgaattgggtacaagtggttctatagatggtaataaccaacttgtaatcaaaggaagattccaacagaaacagatagaaaatgtcttgagaagatatatcaaggaatatgtcacttgtcacacatgccgatcaccggacacaatcctgcagaaggacacacgactctatttcctacagtgcgaaacttgtcattctagatgttctgttgccagtatcaaaaccggcttccaggctgtcacgggcaagcgagcacagctccgtgccaaagctaactaatttgctaatcactgattttgcaaagcttgttgtggagatgtggctggacaggtttgccatcagagtggatataccgttgtattaaaaacaagataaaaaagctgccaagatttttggcgagtggttggtctgaagtccttgcaagacgctgatgctcaagctgttgacatactcattgcctactttaacacctgtcagagaaacgtgatatggggtaaggaggtgcttttttaaaatcgttcatagacttctgtaaaatgcaagataaattaaagttattataacagtgattctttcaa

SEQ ID NO: 442355 - DNA, 1043 bp, Homo sapiens
  misc_feature (1)..(1): n is a, c, g, or t
nctttcacaattgaaacatatagtggaaatatgaagagtacatttaggccggggacgtggttcatgcatgtatcctagcactttgggaggctgagctattgtttgtattttctcattttttcgtatgtttatacgaaaatagggaatacatgaaattttttaaatgtaaaaagccctctagaagatgaagacaacaaaaaagatgatggtatctcattcagtaatcagacaggccctgcttgggcaggctcagaaagagactacacatacgaggagctgctgaatcgagtgttcaacatcatgagggaaaagaatccagatatggttgctggggagaaaaggaaatttgtcatgaaacctccacaagtcgtccgagtaggaaccaagaaaacttcttttgtcaactttacagatatctgtaaactattacatcgtcagcccaaacatctccttgcatttttgttggctgaattgggtacaagtggttctatagatggtaataaccaacttgtaatcaaaggaagattccaacagaaacagatagaaaatgtcttgagaagatatatcaaggaatatgtcacttgtcacacatgccgatcaccggacacaatcctgcagaaggacacacgactctatttcctacagtgcgaaacttgtcattctagatgttctgttgccagtatcaaaaccggcttccaggctgtcacgggcaagcgagcacagctccgtgccaaagctaactaatttgctaatcactgattttgcaaagcttgttgtggagatgtggctggacaggtttgccatcagagtggatataccgttgtattaaaaacaagataaaaaagctgccaagatttttggcgagtggttggtctgaagtccttgcaagacgctgatgctcaagctgttgacatactcattgcctactttaacacctgtcagagaaacgtgatatggggtaaggaggtgcttttttaaaatcgttcatagacttctgtaaaatgcaagataaattaaagttattataacagtgattctttcaa

SEQ ID NO: 442356 - DNA, 1604 bp, Homo sapiens
aggcgcatttccaacgcttggaggagagggcggggtgtcgtttcctttcgctgatgcaagagcctagtgcggtggtgggagaggtatcggcaggggcagcgctgccgccggggcctggggctgacccgtctgacttcccgtccgtgccgagcccactcgagccgcagccatgtctggggacgagatgatttttgatcctactatgagcaagaagaaaaagaagaagaagaagccttttatgttagatgaggaaggggatacccaaacagaggaaacccagccttcagaaacaaaagaagtggagccagagccaactgaggacaaggatttggaagctgatgaagaggacactaggaaaaaagatgcttctgatgatctagatgacttgaacttctttaatcaaaagaaaaagaagaaaaaaactaaaaagatatttgatattgatgaagctgaagaaggtgtaaaggatcttaagattgaaagtgatgttcaagaaccaactgaaccagaggatgaccttgacattatgcttggcaataaaaagaagaaaaagaagaatgttaagttcccagatgaggatgaaatactagagaaagatgaagctctagaagatgaagacaacaaaaaagatgatggtatctcattcagtaatcagacaggccctgcttgggcaggctcagaaagagactacacatacgaggagctgctgaatcgagtgttcaacatcatgagggaaaagaatccagatatggttgctggggagaaaaggaaatttgtcatgaaacctccacaagtcgtccgagtaggaaccaagaaaacttcttttgtcaactttacagatatctgtaaactattacatcgtcagcccaaacatctccttgcatttttgttggctgaattgggtacaagtggttctatagatggtaataaccaacttgtaatcaaaggaagattccaacagaaacagatagaaaatgtcttgagaagatatatcaaggaatatgtcacttgtcacacatgccgatcaccggacacaatcctgcagaaggacacacgactctatttcctacagtgcgaaacttgtcattctagatgttctgttgccagtatcaaaaccggcttccaggctgtcacgggcaagcgagcacagctccgtgccaaagctaactaatttgctaatcactgattttgcaaagcttgttgtggagatgtggctggacaggtttgccatcagagtggatataccgttgtattaaaaacaagataaaaaagctgccaagatttttggcgagtggttggtctgaagtccttgcaagacgctgatgctcaagctgttgacatactcattgcctactttaacacctgtcagagaaacgtgatatggggtaaggaggtgcttttttaaaatcgttcatagacttctgtaaaatgcaagataaattaaagttattataacagtgattctttcaaaaaaaaaaaaacaaaaaaaaaggggggggaaaatatccggggcccaattggcacacttttggaaagggccaaaggggggttaaaaaggaggggggtaaagggggaaaggggtttgggaccctgggggagggcgc

SEQ ID NO: 442357 - DNA, 1014 bp, Homo sapiens
  misc_feature (933)..(933): n is a, c, g, or t
  misc_feature (955)..(955): n is a, c, g, or t
  misc_feature (1014)..(1014): n is a, c, g, or t
aggcgcatttccaacgcttggaggagagggcggggtgtcgtttcctttcgctgatgcaagagcctagtgcggtggtgggagaggtatcggcaggggcagcgctgccgccggggcctggggctgacccgtctgacttcccgtccgtgccgagcccactcgagccgcagccatgtctggggacgagatgatttttgatcctactatgagcaagaagaaaaagaagaagaagaagccttttatgttagatgaggaaggggatacccaaacagaggaaacccagccttcagaaacaaaagaagtggagccagagccaactgaggacaaggatttggaagctgatgaagaggacactaggaaaaaagatgcttctgatgatctagatgacttgaacttctttaatcaaaagaaaaagaagaaaaaaactaaaaagatatttgatattgatgaagctgaagaaggtgtaaaggatcttaagattgaaagtgatgttcaagaaccaactgaaccagaggatgaccttgacattatgcttggcaataaaaagaagaaaaagaagaatgttaagttcccagatgaggatgaaatactagagaaagatgaagctctagaagatgaagacaacaaaaaagatgatggtatctcattcagtaatcagacaggccctgcttgggcaggctcagaaagagactacacatacgaggagctgctgaatcgagtgttcaacatcatgagggaaaagaatccagatatggttgctggggagaaaaggaaatttgtcatgaaacctccacaagtcgtccgagtaggaaccaagaaaacttcttttgtcaactttacagatatctgtaaactattacatcgtcagcccaaacatctccttgcatttttgttggctgaattgggtacaagctatagatggtataaccaacttgnatcaaggaagattcacagaacngatgaaatgcttggaaattacaggattgccttgccctccgtacgcacatctgagaagcn

SEQ ID NO: 442358 - DNA, 503 bp, Homo sapiens
gtaattctgtgtgttgctttatttgcagaggaatatgtcacttgtcacacatgccgatcaccggacacaatcctgcagaaggacacacgactctatttcctacagtgcgaaacttgtcattctagatgttctgttgccagtatcaaaaccggcttccaggctgtcacgggcaagcgagcacagctccgtgccaaagctaactaatttgctaatcactgattttgcaaagcttgttgtggagatgtggctggacaggtttgccatcagagtggatataccgttgtattaaaaacaagataaaaaagctgccaagatttttggcgagtggttggtctgaagtccttgcaagacgctgatgctcaagctgttgacatactcattgcctactttaacacctgtcagagaaacgtgatatggggtaaggaggtgcttttttaaaatcgttcatagacttctgtaaaatgcaagataaattaaagttattataacagtgattctttcaa

SEQ ID NO: 442359 - DNA, 1229 bp, Homo sapiens
ggcacgagggaagaggacactaggaaaaaagatgcttcgccttcagaaacaaaagaagtggagccagagccaactgaggacaaggatttggaagctgatgaagaggacactaggaaaaaagatgcttctgatgatctagatgacttgaacttctttaatcaaaagaaaaagaagaaaaaaactaaaaagatatttgatattgatgaagctgaagaaggtgtaaaggatcttaagattgaaagtgatgttcaagaaccaactgaaccagaggatgaccttgacattatgcttggcaataaaaagaagaaaaagaagaatgttaagttcccagatgaggatgaaatactagagaaagatgaagctctagaagatgaagacaacaaaaaagatgatggtatctcattcagtaatcagacaggccctgcttgggcaggctcagaaagagactacacatacgaggagctgctgaatcgagtgttcaacatcatgagggaaaagaatccagatatggttgctggggagaaaaggaaatttgtcatgaaacctccacaagtcgtccgagtaggaaccaagaaaacttcttttgtcaactttacagatatctgtaaactattacatcgtcagcccaaacatctccttgcatttttgttggctgaattgggtacaagtggttctatagatggtaataaccaacttgtaatcaaaggaagattccaacagaaacagatagaaaatgtcttgagaagatatatcaaggaatatgtcacttgtcacacatgccgatcaccggacacaatcctgcagaaggacacacgactctatttcctacagtgcgaaacttgtcattctagatgttctgttgccagtatcaaaaccggcttccaggctgtcacgggcaagcgagcacagctccgtgccaaagctaactaatttgctaatcactgattttgcaaagcttgttgtggagatgtggctggacaggtttgccatcagagtggatataccgttgtattaaaaacaagataaaaaagctgccaagatttttggcgagtggttggtctgaagtccttgcaagacgctgatgctcaagctgttgacatactcattgcctactttaacacctgtcagagaaacgtgatatggggtaaggaggtgcttttttaaaatcgttcatagacttctgtaaaatgcaagataaattaaagttattataacagtgattctttcaa

SEQ ID NO: 442360 - DNA, 697 bp, Homo sapiens
ttttcttggttcctactcggacgacttgtggaggtttcatgacaacttcttttgtcaacttgacagatatctgtaaactattacatcgtcagcccaaacatctccttgcatttttgttggctgaattgggtacaagtggttctatagatggtaataaccaacttgtaatcaaaggaagattccaacagaaacagatagaaaatgtcttgagaagatatatcaaggaatatgtcacttgtcacacatgccgatcaccggacacaatcctgcagaaggacacacgactctatttcctacagtgcgaaacttgtcattctagatgttctgttgccagtatcaaaaccggcttccaggctgtcacgggcaagcgagcacagctccgtgccaaagctaactaatttgctaatcactgattttgcaaagcttgttgtggagatgtggctggacaggtttgccatcagagtggatataccgttgtattaaaaacaagataaaaaagctgccaagatttttggcgagtggttggtctgaagtccttgcaagacgctgatgctcaagctgttgacatactcattgcctactttaacacctgtcagagaaacgtgatatggggtaaggaggtgcttttttaaaatcgttcatagacttctgtaaaatgcaagataaattaaagttattataacagtgattctttcaa

SEQ ID NO: 442361 - DNA, 1532 bp, Homo sapiens
aggcgcatttccaacgcttggaggagagggcggggtgtcgtttcctttcgctgatgcaagagcctagtgcggtggtgggagaggtatcggcaggggcagcgctgccgccggggcctggggctgacccgtctgacttcccgtccgtgccgagcccactcgagccgcagccatgtctggggacgagctgacccgtctgacttcccgtccgtgccgagcccactcgagccgcagccatgtctggggacgatgatttttgatcctactatgagcaagaagaaaaagaagaagaagaagccttttatgttagatgaggaaggggatacccaaacagaggaaacccagccttcagaaacaaaagaagtggagccagagccaactgaggacaaggatttggaagctgatgaagaggacactaggaaaaaagatgcttctgatgatctagatgacttgaacttctttaatcaaaagaaaaagaagaaaaaaactaaaaagatatttgatattgatgaagctgaagaaggtgtaaaggatcttaagattgaaagtgatgttcaagaaccaactgaaccagaggatgaccttgacattatgcttggcaataaaaagaagaaaaagaagaatgttaagttcccagatgaggatgaaatactagagaaagatgaagctctagaagatgaagacaacaaaaaagatgatggtatctcattcagtaatcagacaggccctgcttgggcaggctcagaaagagactacacatacgaggagctgctgaatcgagtgttcaacatcatgagggaaaagaatccagatatggttgctggggagaaaaggaaatttgtcatgaaacctccacaagtcgtccgagtaggaaccaagaaaacttcttttgtcaactttacagatatctgtaaactattacatcgtcagcccaaacatctccttgcatttttgttggctgaattgggtacaagtggttctatagatggtaataaccaacttgtaatcaaaggaagattccaacagaaacagatagaaaatgtcttgagaagatatatcaaggaatatgtcacttgtcacacatgccgatcaccggacacaatcctgcagaaggacacacgactctatttcctacagtgcgaaacttgtcattctagatgttctgttgccagtatcaaaaccggcttccaggctgtcacgggcaagcgagcacagctccgtgccaaagctaactaatttgctaatcactgattttgcaaagcttgttgtggagatgtggctggacaggtttgccatcagagtggatataccgttgtattaaaaacaagataaaaaagctgccaagatttttggcgagtggttggtctgaagtccttgcaagacgctgatgctcaagctgttgacatactcattgcctactttaacacctgtcagagaaacgtgatatggggtaaggaggtgcttttttaaaatcgttcatagacttctgtaaaatgcaagataaattaaagttattataacagtgattctttcaa

SEQ ID NO: 442362 - DNA, 1493 bp, Homo sapiens
aggcgcatttccaacgcttggaggagagggcggggtgtcgtttcctttcgctgatgcaagagcctagtgcggtggtgggagaggtatcggcaggggcagcgctgccgccggggcctggggctgacccgtctgacttcccgtccgtgccgagcccactcgagccgcagccatgtctggggacgagatgatttttgatcctactatgagcaagaagaaaaagaagaagaagaagccttttatgttagatgaggaaggggatacccaaacagaggaaacccagccttcagaaacaaaagaagtggagccagagccaactgaggacaaggatttggaagctgatgaagaggacactaggaaaaaagatgcttctgatgatctagatgacttgaacttctttaatcaaaagaaaaagaagaaaaaaactaaaaagatatttgatattgatgaagctgaagaaggtgtaaaggtagtattgctttcttgttgaaggatcttaagattgaaagtgatgttcaagaaccaactgaaccagaggatgaccttgacattatgcttggcaataaaaagaagaaaaagaagaatgttaagttcccagatgaggatgaaatactagagaaagatgaagctctagaagatgaagacaacaaaaaagatgatggtatctcattcagtaatcagacaggccctgcttgggcaggctcagaaagagactacacatacgaggagctgctgaatcgagtgttcaacatcatgagggaaaagaatccagatatggttgctggggagaaaaggaaatttgtcatgaaacctccacaagtcgtccgagtaggaaccaagaaaacttcttttgtcaactttacagatatctgtaaactattacatcgtcagcccaaacatctccttgcatttttgttggctgaattgggtacaagtggttctatagatggtaataaccaacttgtaatcaaaggaagattccaacagaaacagatagaaaatgtcttgagaagatatatcaaggaatatgtcacttgtcacacatgccgatcaccggacacaatcctgcagaaggacacacgactctatttcctacagtgcgaaacttgtcattctagatgttctgttgccagtatcaaaaccggcttccaggctgtcacgggcaagcgagcacagctccgtgccaaagctaactaatttgctaatcactgattttgcaaagcttgttgtggagatgtggctggacaggtttgccatcagagtggatataccgttgtattaaaaacaagataaaaaagctgccaagatttttggcgagtggttggtctgaagtccttgcaagacgctgatgctcaagctgttgacatactcattgcctactttaacacctgtcagagaaacgtgatatggggtaaggaggtgcttttttaaaatcgttcatagacttctgtaaaatgcaagataaattaaagttattataacagtgattctttcaa

SEQ ID NO: 442363 - DNA, 1049 bp, Homo sapiens
ctgaagaaggtgtaaaggatcttaagattgaaagtgatgttcaaggtcatcctctggttcagttggttcttgaacatcactttcaatcttaagatccttgacattatgcttggcaataaaaagaagaaaaagaagaatgttaagttcccagatgaggatgaaatactagagaaagatgaagctctagaagatgaagacaacaaaaaagatgatggtatctcattcagtaatcagacaggccctgcttgggcaggctcagaaagagactacacatacgaggagctgctgaatcgagtgttcaacatcatgagggaaaagaatccagatatggttgctggggagaaaaggaaatttgtcatgaaacctccacaagtcgtccgagtaggaaccaagaaaacttcttttgtcaactttacagatatctgtaaactattacatcgtcagcccaaacatctccttgcatttttgttggctgaattgggtacaagtggttctatagatggtaataaccaacttgtaatcaaaggaagattccaacagaaacagatagaaaatgtcttgagaagatatatcaaggaatatgtcacttgtcacacatgccgatcaccggacacaatcctgcagaaggacacacgactctatttcctacagtgcgaaacttgtcattctagatgttctgttgccagtatcaaaaccggcttccaggctgtcacgggcaagcgagcacagctccgtgccaaagctaactaatttgctaatcactgattttgcaaagcttgttgtggagatgtggctggacaggtttgccatcagagtggatataccgttgtattaaaaacaagataaaaaagctgccaagatttttggcgagtggttggtctgaagtccttgcaagacgctgatgctcaagctgttgacatactcattgcctactttaacacctgtcagagaaacgtgatatggggtaaggaggtgcttttttaaaatcgttcatagacttctgtaaaatgcaagataaattaaagttattataacagtgattctttcaa

SEQ ID NO: 442364 - DNA, 2948 bp, Homo sapiens
aggcgcatttccaacgcttggaggagagggcggggtgtcgtttcctttcgctgatgcaagagcctagtgcggtggtgggagaggtatcggcaggggcagcgctgccgccggggcctggggctgacccgtctgacttcccgtccgtgccgagcccactcgagccgcagccatgtctggggacgagatgatttttgatcctactatgagcaagaagaaaaagaagaagaagaagccttttatgttagatgaggaaggggatacccaaacagaggaaacccagccttcagaaacaaaagaagtggagccagagccaactgaggacaaggatttggaagctgatgaagaggacactaggaaaaaagatgcttctgatgatctagatgacttgaacttctttaatcaaaagaaaaagaagaaaaaaactaaaaagatatttgatattgatgaagctgaagaaggtgtaaaggatcttaagattgaaagtgatgttcaagaaccaactgaaccagaggatgaccttgacattatgcttggcaataaaaagaagaaaaagaagaatgttaagttcccagatgaggatgaaatactagagaaagatgaagctctagaagatgaagacaacaaaaaagatgatggtatctcattcagtaatcagacaggccctgcttgggcaggctcagaaagagactacacatacgaggagctgctgaatcgagtgttcaacatcatgagggaaaagaatccagatatggttgctggggagaaaaggaaatttgtcatgaaacctccacaagtcgtccgagtaggaaccaagaaaacttcttttgtcaactttacagatatctgtaaactattacatcgtcagcccaaacatctccttgcatttttgttggctgaattgggtacaagtggttctatagatggtaataaccaacttgtaatcaaaggaagattccaacagaaacagatagaaaatgtcttgagaagatatatcaaggaatatgtcacttgtcacacatgccgatcaccggacacaatcctgcagaaggacacacgactctatttcctacagtgcgaaacttgtcattctagatgttctgttgccagtatcaaaaccggcttccaggctgtcacgggcaagcgagcacagctccgtgccaaagctaactaatttgctaatcactgattttgcaaagcttgttgtggagatgtggctggacaggtttgccatcagagtggatataccgttgtattaaaaacaagataaaaaagctgccaagatttttggcgagtggttggtctgaagtccttgcaagacgctgatgctcaagctgttgacatactcattgcctactttaacacctgtcagagaaacgtgatatggggtaaggaggtgcttttttaaaatcgttcatagacttctgtaaaatgcaagataaattaaagttattataacagtgattctttcaatttggtttgtccttcagttttcttttctataaatgtgcttggtgaaatcagcaagaaaccaaccatataaaacagtgtgtgccgggctctgactgagaaactgaacaatggcaggcgcttcatctgggcagccatttttcttctctgcttctcttgagatacatagttaaagtagacacggcctcccacgcgagtgtggtgggaccttgagacttaggaggattgcctgttttcagtgtccagggaatgactccatagatttgaattcttttccgtatgtggggatggttgctactacctcaccgccaagtcctcccccagctgttaccacatgagggaatacaaggtgctaggtaccctccttcctcgttggccactaagaggtcttagaaacatagcctgtaaatgtgtcttgtaactggcacactaaaaaagatcctagttgagcatctctcttggtgaggaagcgatgtgtgtgcggttcaggaaactcctccaagaggaggaggagtccaaacagggatgccagaggaagctttccgttttcctagccaacttgtgttctgggtttgaaaaagacccaccacaaatgctttttctattttctgatttaaaagtcgcttttgaatatgaccatgagaaaccaagaaatgctgcttgtgtggtgctctgcttcctgaggatttggctggaaggggattctccgctggcacatgggagaaggccatcttctgtgtcggtgctgtgatctgccttgttctcacttgctgaggataagggcatacacgctgctcctcgctttcttgttgcccgacttcgtactaagcagctcaggagcagtcactcagacccaaatgtcttgactgtgttgtttttaatcactgtgacccttaaagtacaggccaagtgttgtcaaacaccttggctaaaacagtggagggtgatgggtaaagcagtagagggccctcaacccacacactggctgaaactgccaccaactgccacgatgaacccaactgctgtttatgcccccattttcctttttttgtatctacacccacacgattcccaatgttggatatttctacatgaataaagcaaggatcagtgcctcttatgtaaaaaaaaaaacaaaaaaaaaaaaaaaaaaaaaaaacaaaaaaaacaaaaacaaagaaaaaaaaaaaaaaaaaaaaaaaaaaaaaaaagaggggggggcggcgcgccaaaataaaacccgcccggggcgcgccaacattgtcagtatcaccgccaacgtatttgttgtgtgcaaagaacggcgtgcccccacataaggaggagcagtatattataaaaagaggcaaggcgcgcgacggcatatatataaaaaaaaccgcgtcagaaggcaaaaacacgcggtgctgcagtgcaccttctgggagagacaacacccaacatggcggggaggaagcacaactcaggtggagacccccttg

SEQ ID NO: 442365 - DNA, 1413 bp, Homo sapiens
aggcgcatttccaacgcttggaggagagggcggggtgtcgtttcctttcgctgatgcaagagcctagtgcggtggtgggagaggtatcggcaggggcagcgctgccgccggggcctggggctgacccgtctgacttcccgtccgtgccgagcccactcgagccgcagccatgtctggggacgagatgatttttgatcctactatgagcaagaagaaaaagaagaagaagaagccttttatgttagatgaggaaggggatacccaaacagaggaaacccagccttcagaaacaaaagaagtggagccagagccaactgaggacaaggatttggaagctgatgaagaggacactaggaaaaaagatgcttctgatgatctagatgacttgaacttctttaatcaaaagaaaaagaagaaaaaaactaaaaagatatttgatattgatgaagctgaagaaggtgtaaaggatcttaagattgaaagtgatgttcaagaaccaactgaaccagaggatgaccttgacattatgcttggcaataaaaagaagaaaaagaagaatgttaagttcccagatgaggatgaaatactagagaaagatgaagctctagaagatgaagacaacaaaaaagatgatggtatctcattcagtaatcagacaggccctgcttgggcaggctcagaaagagactacacatacgaggagctgctgaatcgagtgttcaacatcatgagggaaaagaatccagatatggttgctggggagaaaaggaaatttgtcatgaaacctccacaagtcgtccgagtaggaaccaagaaaacttcttttgtcaactttacagatatctgtaaacttggttctatagatggtaataaccaacttgtaatcaaaggaagattccaacagaaacagatagaaaatgtcttgagaagatatatcaaggaatatgtcacttgtcacacatgccgatcaccggacacaatcctgcagaaggacacacgactctatttcctacagtgcgaaacttgtcattctagatgttctgttgccagtatcaaaaccggcttccaggctgtcacgggcaagcgagcacagctccgtgccaaagctaactaatttgctaatcactgattttgcaaagcttgttgtggagatgtggctggacaggtttgccatcagagtggatataccgttgtattaaaaacaagataaaaaagctgccaagatttttggcgagtggttggtctgaagtccttgcaagacgctgatgctcaagctgttgacatactcattgcctactttaacacctgtcagagaaacgtgatatggggtaaggaggtgcttttttaaaatcgttcatagacttctgtaaaatgcaagataaattaaagttattataacagtgattctttcaa

SEQ ID NO: 442366 - DNA, 1322 bp, Homo sapiens
aggcgcatttccaacgcttggaggagagggcggggtgtcgtttcctttcgctgatgcaagagcctagtgcggtggtgggagaggtatcggcaggggcagcgctgccgccggggcctggggctgacccgtctgacttcccgtccgtgccgagcccactcgagccgcagccatgtctggggacgagatgatttttgatcctactatgagcaagaagaaaaagaagaagaagaagccttttatgttagatgaggaaggggatacccaaacagaggaaacccagccttcagaaacaaaagaagtggagccagagccaactgaggacaaggatttggaagctgatgaagaggacactaggaaaaaagatgcttctgatgatctagatgacttgaacttctttaatcaaaagaaaaagaagaaaaaaactaaaaagatatttgatattgatgaagctgaagaaggtgtaaaggatcttaagattgaaagtgatgttcaagaaccaactgaaccagaggatgaccttgacattatgcttggcaataaaaagaagaaaaagaagaatgttaagttcccagatgaggatgaaatactagagaaagatgaagctctagaagatgaagacaacaaaaaagatgatggtatctcattcagtaatcagacaggccctgcttgggcaggctcagaaagagactacacatacgaggagctgctgaatcgagtgttcaacatcatgagggaaaagaatccagatatggttgctggggagaaaaggaaatttgtcatgaaacctccacaagtcgtccgagtaggaaccaagaaaacttcttttgtcaactttacagatatctgtaaactattacatcgtcagcccaaacatctccttgcatttttgttggctgaattgggtacaagtggttctatagatggtaataaccaacttgtaatcaaaggaagattccaacagaaacagatagaaaatgtcttgagaagatatatcaaggaatatgtcacttgtcacacatgccgatcaccggacacaatcctgcagaaggacacacgactctatttcctacagtgcgaaacttgtcattctagatgttctgttgccagtatcaaaaccggcttccaggctgtcacgggcaagcgagcacagctccgtgccaaagctaactaatttgctttttagggaaaaatattacacagagatggttatgacagctagtatcgtaatagtgtcagtaccacgtggtaacaacattgtaacgtgcctgttccacgcgccgttcgtactatataacacggtacggactgattgtatatgtacc

SEQ ID NO: 442367 - DNA, 1043 bp, Homo sapiens
aggcgcatttccaacgcttggaggagagggcggggtgtcgtttcctttcgctgatgcaagagcctagtgcggtggtgggagaggtatcggcaggggcagcgctgccgccggggcctggggctgacccgtctgacttcccgtccgtgccgagcccactcgagccgcagccatgtctggggacgagatgatttttgatcctactatgagcaagaagaaaaagaagaagaagaagccttttatgttagatgaggaaggggatacccaaacagaggaaacccagccttcagaaacaaaagaagtggagccagagccaactgaggacaaggatttggaagctgatgaagaggacactaggaaaaaagatgcttctgatgatctagatgacttgaacttctttaatcaaaagaaaaagaagaaaaaaactaaaaagatatttgatattgatgaagctgaagaaggtgtaaaggatcttaagattgaaagtgatgttcaagaaccaactgaaccagaggatgaccttgacattatgcttggcaataaaaagaagaaaaagaagaatgttaagttcccagatgaggatgaaatactagagaaagatgaagctctagaagatgaagacaacaaaaaagatgatggtatctcattcagtaatcagacaggccctgcttgggcaggctcagaaagagactacacatacgaggagctgctgaatcgagtgttcaacatcatgagggaaaagaatccagatatggttgctggggagaaaaggaaatttgtcatgaaacctccacaagtcgtccgagtaggaaccaagaaaacttcttttgtcaactttacagatatctgtaaactattacatcgtcagcccaaacatctccttgcatttttgttggctgaattgggtacaagctttattgagataacagcttacaaatttaaagtgtataatccaggagagtcccactcggacgtccgtctctctcgcaagacagagctattctttctcttttgcctattaaacctccacccttggaccccccccc

SEQ ID NO: 442368 - DNA, 1664 bp, Homo sapiens
ctcaggtccggagcgcggtcgggacacagcgcctctaggagaaagcctggaaggcgctccgggggtacccagagctcttagcgggccggcagcatgtgcggggcccaagtaaatggaaatgttttctaacatataaaaacctacagaagaagaaaataattttctggatcaaattagaagtctgtattatattgatgtctccagattcaaatatattagaaagcagccgtggagacaaccatcttcattttgggagaaataactaaagcccgcctcaagcattagaactacagacaaaccctgatgcgacctctccagattgtcccaagtcgattgatttcccagctatattgtggcctgaagcctccagcgtccacacgaaaccagatttgcctgaaaatggctcggccaagttcaagtatggcagattttcgaaagttttttgcaaaagcaaagcacatagtcatcatctcaggagctggtgttagtgcagaaagtggtgttccgaccttcagaggagctggaggttattggagaaaatggcaagcccaggacctggcgactcccctggcctttgcccacaacccgtcccgggtgtgggagttctaccactaccggcgggaggtcatggggagcaaggagcccaacgccgggcaccgcgccatagccgagtgtgagacccggctgggcaagcagggccggcgagtcgtggtcatcacccagaacatcgatgagctgcaccgcaaggctggcaccaagaaccttctggagatccatggtagcttatttaaaactcgatgtacctcttgtggagttgtggctgagaattacaagagtccaatttgtccagctttatcaggaaaaggtgctccagaacctggaactcaagatgccagcatcccagttgagaaacttccccggtgtgaagaggcaggctgcgggggcttgctgcgacctcacgtcgtgtggtttggagaaaacctggatcctgccattctggaggaggttgacagagagctcgcccactgtgatttatgtctagtggtgggcacttcctctgtggtgtacccagcagccatgtttgccccccaggtggctgccaggggcgtgccagtggctgaatttaacacggagaccaccccagctacgaacagattcaggtttcatttccagggaccctgtggaacgactcttcctgaagcccttgcctgtcatgaaaatgaaactgtttcttaagtgtcctggggaagaaagaaattacagtatatctaagaactaggccacacgcagaggagaaatggtcttatgggtggtgagctgagtactgaacaatctaaaaatagcctctgattccctcgctggaatccaacctgttgataagtgatgggggtttagaagtagcaaagagcacccacattcaaaagtcacagaactggaaagttaattcatattatttggtttgaactgaaacgtgaggtatctttgatgtgtatggttggttattgggagggaaaaattttgtaaattagattgtctaaaaaaaatagttattctgattatatttttgttatctgggcaaagtagaagtcaaggggtaaaaaccctactattctgatttttgcacaagttttagtggaaaataaaatcacactctacagtaggta

SEQ ID NO: 442369 - DNA, 2425 bp, Homo sapiens
ctcaggtccggagcgcggtcgggacacagcgcctctaggagaaagcctggaaggcgctccgggggtacccagagctcttagcgggccggcagcatgtgcggggcccaagtaaatggaaatgttttctaacatataaaaacctacagaagaagaaaataattttctggatcaaattagaagtctgtattatattgatgtctccagattcaaatatattagaaagcagccgtggagacaaccatcttcattttgggagaaataactaaagcccgcctcaagcattagaactacagacaaaccctgatgcgacctctccagattgtcccaagtcgattgatttcccagctatattgtggcctgaagcctccagcgtccacacgaaaccagatttgcctgaaaatggctcggccaagttcaagtatggcagattttcgaaagttttttgcaaaagcaaagcacatagtcatcatctcaggagctggtgttagtgcagaaagtggtgttccgaccttcagaggagctggaggttattggagaaaatggcaagcccaggacctggcgactcccctggcctttgcccacaacccgtcccgggtgtgggagttctaccactaccggcgggaggtcatggggagcaaggagcccaacgccgggcaccgcgccatagccgagtgtgagacccggctgggcaagcagggccggcgagtcgtggtcatcacccagaacatcgatgagctgcaccgcaaggctggcaccaagaaccttctggagatccatggtagcttatttaaaactcgatgtacctcttgtggagttgtggctgagaattacaagagtccaatttgtccagctttatcaggaaaaggtgctccagaacctggaactcaagatgccagcatcccagttgagaaacttccccggtgtgaagaggcaggctgcgggggcttgctgcgacctcacgtcgtgtggtttggagaaaacctggatcctgccattctggaggaggttgacagagagctcgcccactgtgatttatgtctagtggtgggcacttcctctgtggtgtacccagcagccatgtttgccccccaggtggctgccaggggcgtgccagtggctgaatttaacacggagaccaccccagctacgaacagattcagtcatttgatctccatctcatctctaattattataaagaattaaaacaagtcatcattgtagaaaagcaagaaaatgcagatagagaaaaagaagaaaataaaactggagtatttccacaacccaagtttagagttggcccccacctcccatgccatggactgagcagcaggggcccagcatcccttggatatggtggctgtgtcttcatgtgaaagaaactgaacttggtggtttttcctgccagttcaggagagattcttggcatgtaatatatatcactgctcaagtcaagcctcctaaaaccacagacctgtttcagctgctacttcagccaaaattcttcagcttcatattgtcttgaaaacctatgattgtctctaacaaacaggctacttgctagttagaaattcttatcaatttggcaagctacttatcaaccagactgaccacaagaactgtcatctcatcaatgaaggagtaactgatcaatgaagccagcaatgcttttttcttggcatcatcaaagctgacatttagaagagatgctggtgatagtcatctcatcctactcaatttttcaaaggcagaaaccaaccctggagcaattgagaggactgtttaaacacagagcttaacaatggcagaattgtatatctcgtgcttaacagattttggttgaactttaccctaggtcaggggtcagcaaactactgcctgtgggccaaatttgcccaccacctgtatctgtaaataaggtttcattggaacacagctgtggccatatgtttgtatattgtgtgtggctgcttttgcattaggatgacagaggtgaatagttgcaacagagactggctggtctgcaaagcctaaaatatgtcctgtgtggccctttacagaaaaagttttctaacccctgctctaggttacggagaaaaaaaaaatggaataatgttctctgctacttttaacctgattttctttgttacctaaataggcagctagaatgctgcctatattttaataaggatttggatctcacaagacaccttaggccttacacaagttgttcagattctttgccccagttctaatctagtgacaaaggcatagaattctcctcccacaggaatgtatttctattttcaaggtgttaattagttccagttttggttttgtcgttttccccatgtccgatgcttatattggatgatttctgataaaccctgactattccaataaaccctaggcatttttgaatttaaac

SEQ ID NO: 442370 - DNA, 925 bp, Homo sapiens
agtttctatgattaagatcaaaatttaagcaaggctgccacgttccttcctagataggtgtggattgcatttattcaggtaacagtttctcctaataattgtgttaaagtgaaatcagaagaccttggttagcatcattcattactttattctaaaattattgaactcaagtatgacacataaagtttctgtgaacttttcatgttaaaactaatgtcagttattgaagggttaggatttgatattcaaaaatttataggaagcccttcagaatgtaagttctgtgaaggtgcggatttttttaattcaatttttattgagatctaatatacataaagtaaaagtcaccagttttaagtgtacaatttaatgagttttaacaaatggacatagttgtatagccagcaccataatcacaatatggaacaattctgtccctccagaacattccttcatggccctttgcagtccgtgctctcccatcccactggctcaggaaatccctagctttggaagacaaggaattgtttgattgtttgagatggaggtttgctcttgttgcccaggctggagtacaatggcgtgatctcggctcactgcaacctctgcctcccagattctcctgcctcagcctcccgagtagctgggattacaggcatgcaccgccacacccggctaatttttgtatttttcagtagagacagggtttcaccatgttggccaggctggtctcaaactcctgacctcaggtgatccacccatcttggcctcccaaagtgctgggattacaggcatgagccaccgcgcccggcctctgtttgttttattcgttgcattgtctccagtttccagaactctggcacattataggtgcttaatggattttcgttggctgaacgaaagcagtcataaataaatactgcaa

SEQ ID NO: 442371 - DNA, 1798 bp, Homo sapiens
ctcaggtccggagcgcggtcgggacacagcgcctctaggagaaagcctggaaggcgctccgggggtacccagagctcttagcgggccggcagcatgtgcggggcccaagtaaatggaaatgttttctaacatataaaaacctacagaagaagaaaataattttctggatcaaattagaagtctgtattatattgatgtctccagattcaaatatattagaaagcagccgtggagacaaccatcttcattttgggagaaataactaaagcccgcctcaagcattagaactacagacaaaccctgatgcgacctctccagattgtcccaagtcgattgatttcccagctatattgtggcctgaagcctccagcgtccacacgaaaccagatttgcctgaaaatggctcggccaagttcaagtatggcagattttcgaaagttttttgcaaaagcaaagcacatagtcatcatctcaggagctggtgttagtgcagaaagtggtgttccgaccttcagaggagctggaggttattggagaaaatggcaagcccaggacctggcgactcccctggcctttgcccacaacccgtcccgggtgtgggagttctaccactaccggcgggaggtcatggggagcaaggagcccaacgccgggcaccgcgccatagccgagtgtgagacccggctgggcaagcagggccggcgagtcgtggtcatcacccagaacatcgatgagctgcaccgcaaggctggcaccaagaaccttctggagatccatggtagcttatttaaaactcgatgtacctcttgtggagttgtggctgagaattacaagagtccaatttgtccagctttatcaggaaaaggtgctccagaacctggaactcaagatgccagcatcccagttgagaaacttccccgggatgaggtttcgccatgttggccaggctggtctcgagctcttgacctcagatgatccacccgcctcagcctcccaacatgctgggattacaggcgtgaaccactgcacccggctggattagagtgtttttaaggtgtgaagaggcaggctgcgggggcttgctgcgacctcacgtcgtgtggtttggagaaaacctggatcctgccattctggaggaggttgacagagagctcgcccactgtgatttatgtctagtggtgggcacttcctctgtggtgtacccagcagccatgtttgccccccaggtggctgccaggggcgtgccagtggctgaatttaacacggagaccaccccagctacgaacagattcaggtttcatttccagggaccctgtggaacgactcttcctgaagcccttgcctgtcatgaaaatgaaactgtttcttaagtgtcctggggaagaaagaaattacagtatatctaagaactaggccacacgcagaggagaaatggtcttatgggtggtgagctgagtactgaacaatctaaaaatagcctctgattccctcgctggaatccaacctgttgataagtgatgggggtttagaagtagcaaagagcacccacattcaaaagtcacagaactggaaagttaattcatattatttggtttgaactgaaacgtgaggtatctttgatgtgtatggttggttattgggagggaaaaattttgtaaattagattgtctaaaaaaaatagttattctgattatatttttgttatctgggcaaagtagaagtcaaggggtaaaaaccctactattctgatttttgcacaagttttagtggaaaataaaatcacactctacagtaggta

SEQ ID NO: 442372 - DNA, 1795 bp, Homo sapiens
ctcaggtccggagcgcggtcgggacacagcgcctctaggagaaagcctggaaggcgctccgggggtacccagagctcttagcgggccggcagcatgtgcggggcccaagtaaatggaaatgttttctaacatataaaaacctacagaagaagaaaataattttctggatcaaattagaagtctgtattatattgatgtctccagattcaaatatattagaaagcagccgtggagacaaccatcttcattttgggagaaataactaaagcccgcctcaagcattagaactacagacaaaccctgatgcgacctctccagattgtcccaagtcgattgatttcccagctatattgtggcctgaagcctccagcgtccacacgaaaccagatttgcctgaaaatggctcggccaagttcaagtatggcagattttcgaaagttttttgcaaaagcaaagcacatagtcatcatctcaggagctggtgttagtgcagaaagtggtgttccgaccttcagaggagctggaggttattggagaaaatggcaagcccaggacctggcgactcccctggcctttgcccacaacccgtcccgggtgtgggagttctaccactaccggcgggaggtcatggggagcaaggagcccaacgccgggcaccgcgccatagccgagtgtgagacccggctgggcaagcagggccggcgagtcgtggtcatcacccagaacatcgatgagctgcaccgcaaggctggcaccaagaaccttctggagatccatggtagcttatttaaaactcgatgtacctcttgtggagttgtggctgagaattacaagagtccaatttgtccagctttatcaggaaaaggtgctccagaacctggaactcaagatgccagcatcccagttgagaaacttccccggtgtgaagaggcaggctgcgggggcttgctgcgacctcacgtcgtgtggtttggagaaaacctggatcctgccattctggaggaggttgacagagagctcgcccactgtgatttatgtctagtggtgggtcatgcccttccctaaccccaggacaggactggagtttgttattttttccttccccctctcctcttttccttcctccctcccttgcttctttccttcccgccttctctcctccctccatttcttcctttccttcaaatgtatgttgagaggtctttgtggtatcctatagaaaaactgagaaacaatgaataagaatttgtattaaaataggaaaccatgcatgtcttgggcatctcaaagcctcctcccccagccccaccaaaaacaaagaaaagaacatgctattggttttttaaataatacatgcttatgattaaatttaattgagaacatgcaaaaattatcacattataaagaggaaattagaaatcgcccatagttctgctatccagaaatagttaccgttagcagtttagtatgttttcttctagacccaggagtgagcaaacagcagcctttgggccacattgggcctgctacctgtttttggaaataaagttttattggaactcagccacactcattcttccacacactgtctatgactactttcaaactacaagtggcagagttgagtacttgtgacagagattgaatggcctgcaaagcctgaaaaatttactgtatggtcattttcagaataagtttgcccacctctggtctaaaccttttcttatgcagatgtacacgtattaattaaaattcaaaactgagttcatgacatatgttctgttttgaaactact

SEQ ID NO: 442373 - DNA, 1019 bp, Homo sapiens
gtgggagactgtattcgggggcgcgagctgccccagtaaatggaaatgttttctaacatataaaaacctacagaagaagaaaataattttctggatcaaattagaagtctgtattatattgatgtctccagattcaaatatattagaaagcagccgtggagacaaccatcttcattttgggagaaataactaaagcccgcctcaagcattagaactacagacaaaccctgatgcgacctctccagattgtcccaagtcgattgatttcccagctatattgtggcctgaagcctccagcgtccacacgaaaccagatttgcctgaaaatggctcggccaagttcaatgctccagaacctggaactcaagatgccagcatcccagttgagaaacttccccggtgggcacttcctctgtggtgtacccagcagccatgtttgccccccaggtggctgccaggggcgtgccagtggctgaatttaacacggagaccaccccagctacgaacagattcaggtttcatttccagggaccctgtggaacgactcttcctgaagcccttgcctgtcatgaaaatgaaactgtttcttaagtgtcctggggaagaaagaaattacagtatatctaagaactaggccacacgcagaggagaaatggtcttatgggtggtgagctgagtactgaacaatctaaaaatagcctctgattccctcgctggaatccaacctgttgataagtgatgggggtttagaagtagcaaagagcacccacattcaaaagtcacagaactggaaagttaattcatattatttggtttgaactgaaacgtgaggtatctttgatgtgtatggttggttattgggagggaaaaattttgtaaattagattgtctaaaaaaaatagttattctgattatatttttgttatctgggcaaagtagaagtcaaggggtaaaaaccctactattctgatttttgcacaagttttagtggaaaataaaatcacactctacagtaggta

SEQ ID NO: 442374 - DNA, 962 bp, Homo sapiens
ctcaggtccggagcgcggtcgggacacagcgcctctaggagaaagcctggaaggcgctccgggggtacccagagctcttagcgggccggcagcatgtgcggggcccaagtaaatggaaatgttttctaacatataaaaacctacagaagaagaaaataattttctggatcaaattagaagtctgtattatattgatgtctccagattcaaatatattagaaagcagccgtggagacaaccatcttcattttgggagaaataactaaagcccgcctcaagcattagaactacagacaaaccctgatgcgacctctccagattgtcccaagtcgattgatttcccagctatattgtggcctgaagcctccagcgtccacacgaaaccagatttgcctgaaaatggctcggccaagttcaagtatggcagattttcgaaagttttttgcaaaagcaaagcacatagtcatcatctcaggagctggtgttagtgcagaaagtggtgttccgaccttcagaggagctggaggttattggagaaaatggcaagcccaggacctggcgactcccctggcctttgcccacaacccgtcccgggtgtgggagttctaccactaccggcgggaggtcatggggagcaaggagcccaacgccgggcaccgcgccatagccgagtgtgagacccggctgggcaagcagggccggcgagtcgtggtcatcacccagaacatcgatgagctgcaccgcaaggctggcaccaagaaccttctggagatccatggtagcttatttaaaactcgatgtacctcttgtggagttgtggctgagaattacaagagtccaatttgtccagctttatcaggaaaaggtgctccagaacctggaactcaagatgccagcatcccagttgagaaacttccccggtaggtagaaaactctgatttgtactggtgttccaggttacc

SEQ ID NO: 442375 - DNA, 1034 bp, Homo sapiens
ctcaggtccggagcgcggtcgggacacagcgcctctaggagaaagcctggaaggcgctccgggggtacccagagctcttagcgggccggcagcatgtgcggggcccaagtaaatggaaatgttttctaacatataaaaacctacagaagaagaaaataattttctggatcaaattagaagtctgtattatattgatgtctccagattcaaatatattagaaagcagccgtggagacaaccatcttcattttgggagaaataactaaagcccgcctcaagcattagaactacagacaaaccctgatgcgacctctccagattgtcccaagtcgattgatttcccagctatattgtggcctgaagcctccagcgtccacacgaaaccagatttgcctgaaaatggctcggccaagttcaagtatggcagattttcgaaagttttttgcaaaagcaaagcacatagtcatcatctcaggagctggtgttagtgcagaaagtggtgttccgaccttcagaggagctggaggttattggagaaaatggcaagcccagaacattccttcatggccctttgcagtccgtgctctcccatcccactggctcaggaaatccctagctttggaagacaaggaattgtttgattgtttgagatggaggtttgctcttgttgcccaggctggagtacaatggcgtgatctcggctcactgcaacctctgcctcccagattctcctgcctcagcctcccgagtagctgggattacaggcatgcaccgccacacccggctaatttttgtatttttcagtagagacagggtttcaccatgttggccaggctggtctcaaactcctgacctcaggtgatccacccatcttggcctcccaaagtgctgggattacaggcatgagccaccgcgcccggcctctgtttgttttattcgttgcattgtctccagtttccagaactctggcacattataggtgcttaatggattttcgttggctgaacgaaagcagtcataaataaatactgcaa

SEQ ID NO: 442376 - DNA, 398 bp, Homo sapiens
tcataagcaaggcaagtttatataggctgggagggagggtgtagggaataagaggcatcagaggtgacccatctggatgtactaggtttggggcagcccctggcctccctccgatccagctgggcagacttggctcggggttggcttaaggatcccattcttccaggtgtgaagaggcaggctgcgggggcttgctgcgacctcacgtcgtgtggtttggagaaaacctggatcctgccattctggaggaggttgacagagagctcgcccactgtgatttatgtctagtggtgggtcatgcccttccctaaccccaggacaggactggagtttgttattttttccttccccctctcctcttttccttcctccctcccttgcttctttccttcccgcct

SEQ ID NO: 442377 - DNA, 268 bp, Homo sapiens
acacaaacggaaaacagccagttcagaggatgatctgttactaaagattttttaaaggacattcgtgtatgtgtgcgtgtgggtataatataatatacatgatgcgtttctgtaatatataaaatataaatatttatacatatttccatatataaaaatatttgctgattgtttctacactatttgtttttgtgatttttctaaagcccgcctcaagcattagaactacagacaaaccctgatgcgacctctccagattgtcccaagt

SEQ ID NO: 442378 - DNA, 231 bp, Homo sapiens
acaaatgtccaaactgtacactggattgataaagatttcactctgtttaggtatggcagattttcgaaagttttttgcaaaagcaaagcacatagtcatcatctcaggagctggtgttagtgcagaaagtggtgttccgaccttcagaggagctggaggttattggagaaaatggcaagcccaggtttgtaaagtttccagaacattaaaagcctctgtcgaatgaaacca

SEQ ID NO: 442379 - DNA, 1916 bp, Homo sapiens
ctcaggtccggagcgcggtcgggacacagcgcctctaggagaaagcctggaaggcgctccgggggtacccagagctcttagcgggccggcagcatgtgcggggcccaagtaaatggaaatgttttctaacatataaaaacctacagaagaagaaaataattttctggatcaaattagaagtctgtattatattgatgtctccagattcaaatatattagaaagcagccgtggagacaaccatcttcattttgggagaaataactaaagcccgcctcaagcattagaactacagacaaaccctgatgcgacctctccagattgtcccaagtcgattgatttcccagctatattgtggcctgaagcctccagcgtccacacgaaaccagatttgcctgaaaatggctcggccaagttcaagtatggcagattttcgaaagttttttgcaaaagcaaagcacatagtcatcatctcaggagctggtgttagtgcagaaagtggtgttccgaccttcagaggagctggaggttattggagaaaatggcaagcccaggacctggcgactcccctggcctttgcccacaacccgtcccgggtgtgggagttctaccactaccggcgggaggtcatggggagcaaggagcccaacgccgggcaccgcgccatagccgagtgtgagacccggctgggcaagcagggccggcgagtcgtggtcatcacccagaacatcgatgagctgcaccgcaaggctggcaccaagaaccttctggagatccatggtagcttatttaaaactcgatgtacctcttgtggagttgtggctgagaattacaagagtccaatttgtccagctttatcaggaaaaggtgctccagaacctggaactcaagatgccagcatcccagttgagaaacttccccggtgtgaagaggcaggctgcgggggcttgctgcgacctcacgtcgtgtggtttggagaaaacctggatcctgccattctggaggaggttgacagagagctcgcccactgtgatttatgtctagtggtgggcacttcctctgtggtgtacccagcagccatgtttgccccccaggtggctgccaggggcgtgccagtggctgaatttaacacggagaccaccccagctacgaacagattcaggtttcatttccagggaccctgtggaacgactcttcctgaagcccttgcctgtcatgaaaatgaaactgtttcttaagtgtcctggggaagaaagaaattacagtatatctaagaactaggccacacgcagaggagaaatggtcttatgggtggtgagctgagtactgaacaatctaaaaatagcctctgattccctcgctggaatccaacctgttgataagtgatgggggtttagaagtagcaaagagcacccacattcaaaagtcacagaactggaaagttaattcatattatttggtttgaactgaaacgtgaggtatctttgatgtgtatggttggttattgggagggaaaaattttgtaaattagattgtctaaaaaaaaaaaaaaaaaaaaaaaaaaaaaaaaaaggaaaaaaaaaaagaacacggagaagaagagcaccaacaagaaggggacaaaagtggagcagaagggacatacggagagtgacgcccgatataatagccaggagcaaaaagctgaggaaaagacgcccgcgcatctagcagcgaccacgcgaagcgcgacgacggacgaccacaggagagcaccacctaaacgaccagcgcagataacagcgaagaacacaccagcaggcgagaaagacgctaacacgtcacccaaacagaacaactgaaaacacgggacacgaaccggccaacacgcagcggcaacaaggaccgcagacgaagcacacgcgcacagagccacagt

SEQ ID NO: 442380 - DNA, 1457 bp, Homo sapiens
gtgggagactgtattcgggggcgcgagctgccccagtaaatggaaatgttttctaacatataaaaacctacagaagaagaaaataattttctggatcaaattagaagtctgtattatattgatgtctccagattcaaatatattagaaagcagccgtggagacaaccatcttcattttgggagaaataactaaagcccgcctcaagcattagaactacagacaaaccctgatgcgacctctccagattgtcccaagtcgattgatttcccagctatattgtggcctgaagcctccagcgtccacacgaaaccagatttgcctgaaaatggctcggccaagttcaagacctggcgactcccctggcctttgcccacaacccgtcccgggtgtgggagttctaccactaccggcgggaggtcatggggagcaaggagcccaacgccgggcaccgcgccatagccgagtgtgagacccggctgggcaagcagggccggcgagtcgtggtcatcacccagaacatcgatgagctgcaccgcaaggctggcaccaagaaccttctggagatccatggtagcttatttaaaactcgatgtacctcttgtggagttgtggctgagaattacaagagtccaatttgtccagctttatcaggaaaaggtgctccagaacctggaactcaagatgccagcatcccagttgagaaacttccccggtgtgaagaggcaggctgcgggggcttgctgcgacctcacgtcgtgtggtttggagaaaacctggatcctgccattctggaggaggttgacagagagctcgcccactgtgatttatgtctagtggtgggcacttcctctgtggtgtacccagcagccatgtttgccccccaggtggctgccaggggcgtgccagtggctgaatttaacacggagaccaccccagctacgaacagattcaggtttcatttccagggaccctgtggaacgactcttcctgaagcccttgcctgtcatgaaaatgaaactgtttcttaagtgtcctggggaagaaagaaattacagtatatctaagaactaggccacacgcagaggagaaatggtcttatgggtggtgagctgagtactgaacaatctaaaaatagcctctgattccctcgctggaatccaacctgttgataagtgatgggggtttagaagtagcaaagagcacccacattcaaaagtcacagaactggaaagttaattcatattatttggtttgaactgaaacgtgaggtatctttgatgtgtatggttggttattgggagggaaaaattttgtaaattagattgtctaaaaaaaatagttattctgattatatttttgttatctgggcaaagtagaagtcaaggggtaaaaaccctactattctgatttttgcacaagttttagtggaaaataaaatcacactctacagtaggta

SEQ ID NO: 442381 - DNA, 1929 bp, Homo sapiens
ctcaggtccggagcgcggtcgggacacagcgcctctaggagaaagcctggaaggcgctccgggggtacccagagctcttagcgggccggcagcatgtgcggggcccaagtaaatggaaatgttttctaacatataaaaacctacagaagaagaaaataattttctggatcaaattagaagtctgtattatattgatgtctccagattcaaatatattagaaagcagccgtggagacaaccatcttcattttgggagaaataactaaagcccgcctcaagcattagaactacagacaaaccctgatgcgacctctccagattgtcccaagtcgattgatttcccagctatattgtggcctgaagcctccagcgtccacacgaaaccagatttgcctgaaaatggctcggccaagttcaagtatggcagattttcgaaagttttttgcaaaagcaaagcacatagtcatcatctcaggagctggtgttagtgcagaaagtggtgttccgaccttcagaggagctggaggttattggagaaaatggcaagcccaggacctggcgactcccctggcctttgcccacaacccgtcccgggtgtgggagttctaccactaccggcgggaggtcatggggagcaaggagcccaacgccgggcaccgcgccatagccgagtgtgagacccggctgggcaagcagggccggcgagtcgtggtcatcacccagaacatcgatgagctgcaccgcaaggctggcaccaagaaccttctggagatccatggtagcttatttaaaactcgatgtacctcttgtggagttgtggctgagaattacaagagtccaatttgtccagctttatcaggaaaaggtgctccagaacctggaactcaagatgccagcatcccagttgagaaacttccccgggatgaggtttcgccatgttggccaggctggtctcgagctcttgacctcagatgatccacccgcctcagcctcccaacatgctgggattacaggcgtgaaccactgcacccggctggattagagtgtttttaaggtgtgaagaggcaggctgcgggggcttgctgcgacctcacgtcgtgtggtttggagaaaacctggatcctgccattctggaggaggttgacagagagctcgcccactgtgatttatgtctagtggtgggtcatgcccttccctaaccccaggacaggactggagtttgttattttttccttccccctctcctcttttccttcctccctcccttgcttctttccttcccgccttctctcctccctccatttcttcctttccttcaaatgtatgttgagaggtctttgtggtatcctatagaaaaactgagaaacaatgaataagaatttgtattaaaataggaaaccatgcatgtcttgggcatctcaaagcctcctcccccagccccaccaaaaacaaagaaaagaacatgctattggttttttaaataatacatgcttatgattaaatttaattgagaacatgcaaaaattatcacattataaagaggaaattagaaatcgcccatagttctgctatccagaaatagttaccgttagcagtttagtatgttttcttctagacccaggagtgagcaaacagcagcctttgggccacattgggcctgctacctgtttttggaaataaagttttattggaactcagccacactcattcttccacacactgtctatgactactttcaaactacaagtggcagagttgagtacttgtgacagagattgaatggcctgcaaagcctgaaaaatttactgtatggtcattttcagaataagtttgcccacctctggtctaaaccttttcttatgcagatgtacacgtattaattaaaattcaaaactgagttcatgacatatgttctgttttgaaactact

SEQ ID NO: 442382 - DNA, 1882 bp, Homo sapiens
tatttttcttttgtccccctatgtttcccctccctctatgttttgtggttccttgctcacaatgttctccatgtgtctacgtgttgtccccgctgtcgcgggcgtgtgtttatttcgtccgcgcgcattgctttgccggttttctacgtcccttctctcctcatagtggtctcctctgttctcacatactttttttgtgttccccctatctttggtgccccctcctgtgtgtgcttctttgtgtgtctccccccctttttttttttttcttttttttttttttttttttttttttttttcttaggagaatgttttaatgcttaagaggcaggatcaagtgaagaggttacagaaatcagtgtctctggctgggcagtcaagagagcgggctcaaattctgtgactcacttctctgtgtctcggttggaaatgaatgggtatcctggttcccaccttcccacacgctgtgatacttcaaactccttgggtgaagggcctcttctcagcccaagatcttgattgtgaacattaacaaagagaacagtcatcctccacagaagataactcattaatgacatttgattcagtgaataaatatatcatttaaaaaaatattgtagggggatcatgaaagtagtggaggtaattacaatcaggagagattggtattaaaattgagcaaagtcccaactctcaccagatgacaattatgcatcctgctagatgccccagggctgtcagcctggaactgaaataaatgtgttataagtggtgctggatgcctttttcagttcatttgaaaacatggatttgatcatgtcagctccctttctgctggaaaaaaaagtagtttgcataattggtgttaactactctgttttgattctacagagtaagtaatactcaaatgtggtcttactttaacttcttgcctttgttacccccagaaccatgcagacattgaaatgtggtgtgcgtgtgtgtgtgtgtgtgtgtgtgtgtgtgtgttcatataacaggaggacaggaaaggtaaggacccagaacaatgaagacttattgaaatgtggtatgtgtgtgcgtgtgtgtgtgtgtgtgtgtgtgtgtgtgtgtgtgtgttcatataacaggaggacaggaaaggtaatgaccatccatggaagatgaaggggtagtacttagcaccagaatcttttccagtttttacccatctttcattactccttgtctccaaatcatcccttccttaataacttaaaataacttaaaatattttctgaggacttgatgacaccagtcagaagtccaagagtggtctggtataagggagtgttcatcaaggggcagctggaaaaagtggaattggcacaggcaacatctttcttttcagatgtttgaggtcacccagaggagataacagtctgtcaacatagagccctcaaagttaaaaagcagtagccaggcaagacttgtgtcttttcagggctcttccaggctctaagagtgtgaaattcagacaggtttttaaaaatcaaaataaaaggagagtagttcttacaggcagaaactcttagagctcacaaattggaaacaactgcaaacttcagagtaaattcatagcttccaaatacaaatgttcacattgtccctccgctatttttacacaaatgcattcaggtgaagacagcaacacacattgggaaaggacatctgcttcctattttagtcccagaatcacttttgcttctagtcccaactgttccctctccccaatcccaaccttatccatgtaacagtatgaatttcctggcccagagacctaaacaagaagtcacgaatatacctacttttggttgcacttgccatttcaatgcttaggaaa

SEQ ID NO: 442383 - DNA, 7927 bp, Homo sapiens
caaggcgggggcctgtttgcagagagccgggcatttgcatgaagcgactcgaccccacggagcagcggcagcagcagcggaccccggcggcggcggcggcgcgcggtcccagccaggcggccccggtgtcccggccccggtggatgcacggctggggaggagcccatgggccggagctgaggctgcccggggcggcggggcgcggggcagggggcgcggtcgaggcccggaggcggcggcgcaggaggaagcggaggaggtcgggcgctcggggcccgggaggcgggccgcgcagcgccgcagccccgggctcgccatgctcctggcctcggccgtggtggtctgggaatggctgaacgagcacggccgctggcgtccctacagcccagcggtgagccaccacatcgaggcggtggtccgcgccggcccccgcgcggggggcagcgtggtgctgggccaggtggacagccgtctcgcgccctacatcatcgacctgcagtccatgaaccagttccgccaagacacgggaactctccgcccagttcgccgcaactactacgacccctcctcggcccctgggaagggcgtggtgtgggagtgggagaacgacaatggctcctggacgccctacgacatggaagtgggcatcaccatccagcatgcctatgagaagcagcacccctggatcgacctcacttccattggctttagctacgtaattgacttcaacaccatgggccagatcaaccgtcagacccagcgccaacgccgcgtccgccggcgcctcgacctcatctaccccatggtcacagggaccttgcctaaggctcagtcctggccagtcagccctgggccagccacctcgccccccatgtccccctgctcctgtccccagtgtgtcttggtgatgagtgttaaggcagccgtggtcaatggcagcactgggcccctacagctgccagtgacccgcaagaacatgccgcctcctggagtggtcaagctacccccactgccaggctctggggccaagccactggacagcacaggcaccattcgaggcccactgaagaccgccccatcgcaggtgatccggagacaagcctccagcatgcccactgggacaaccatgggctctcctgccagtcccccaggacccaacagcaagaccggaagggtggccctggccaccttgaatcgtaccaacctgcagcgactggccattgcccagtcccgggtgctgatcgcctctggggtccccacagtcccagtgaagaacctaaatgggtccagtcctgtcaaccctgccttggcaggaatcactgggatcctcatgagtgcagcggggctgcctgtgtgtctcaccaggccaccaaagctggtcctacacccaccccccgtcagcaagagtgaaataaaatccatcccaggggtttccaacacaagccgcaagaccaccaaaaaacaagccaagaaaggtaaaaccccagaggaagtgctaaaaaaatatctacagaaagtccggcacccaccagatgaggactgcaccatctgtatggaacgcctcacggccccctcaggctacaagggcccgcagcctacggtaaaacctgacctggtagggaagctgtccagatgcggccacgtctaccacatctactgcttggttgccatgtacaacaatgggaacaaggatggaagtttgcagtgtccaacctgcaagaccatttatggggtgaagacaggcacccaacctccagggaagatggagtaccacctcatcccccactccttgcctggccacccagactgcaaaaccatccggatcatctacagcatcccccccggcattcagggaccggaacacccgaatcctgggaagagtttcagcgcccgaggcttcccacgacactgttaccttccggacagcgagaaagggagaaaagttctgaagctgctgctcgtggcctgggatcgccgcctcatttttgccattggcacctccagcaccacaggcgagtcagacaccgtcatctggaatgaggtccaccacaagacagagtttggctctaatctcactggccatggctacccagatgccaattacctggataatgtgctggctgaactggctgcccagggcatctctgaggacagcactgcccaggagaaggactgaggccagaaaagctttgaggtgggaggggccatggagactgcaggacaggaagtgaggagagtgagtcaatgtagaagaagttggtgtcctgccctcccaactttctatcctcccctcctgccctgtgtccatccctcatccctcccaaccacagtgggagccagactgaatatagcgacatcattcataaatctcatccaacacaaagggagatgggatgagggccatcctgggtctgttcccatggagtttttggtgctgggtaggcaggaatcccctccctaccccacctcccaagtaggggcatggtcagcacacctagggtatgggcagtgcttaggcactccatatcctggctttgggaagccggggtttcttgcctcagccggcttcttgctacttccactctgctttgagactggagtttctgctattctccctctgctggaggcagggagctctcactgtgcaaggttggggggtgggcaaaggggtgaatcactaaactgctgtgacatcagaaactgatgccttggtgtagagcaaggaagcacttcttcccaagagggtcggagaaggaaaagcctctgggagcacattctgctgtcatcacagtccttggcttctctgggccctcctctcctcctcacagctctcacctgtccaaagaggcatctggttctctcatgtggatggatggactctggggttcctctttggagtggcatcccatgatgctgtttctagaccctctctgatcaaaccagagcctgcatcccactgagcatctgaactgtcctcagggagaggagcccacagccttcttcccaactcattctagaccagctcaaagattccatgagtttcatcgagtcactgtgagtggagcccatgctgggctctgtgccctctgtgtctgtgcatgcgcgtgtgtgtgtgggcgtgtgtgcattgctgggccagcttgaagggaaggcccgtcatgtccctgcactctgttttgcaagatgccaaaccccagttctgatggggctccaacagccaggctgtggtcctttgacgttcctcacctgttgccaacctatcccgtagtgaactgaaaccccaatgaagacagaactgtgcctggggagatgcaatgaggtgagggctgaactcatccttttatatttcttttcaagattggatcagagctcatctccatccagtcttgtttctatgaaggcttcaatctgtttccatgcaaatttgctaatcagagcccagagctgctgggtccctcatctccctcatctattatagattgacttacagcagggagagaatctctttagctcattcctaatggggttgggatcacaatatggtctggtccaatctgcatcttgttgtgtcccaagaccctatctcctccccaacattcttattgcctttggctcccagtaaggaacgaattgggggccagggaggagaacaggggggatcaagaagggaaacccaattccccctttgaaagtgggttctttgaactatgtgtttgggggaagttcctctggatactaatttgaatttatatacctcatgttttgggggtttgacgtatatatatatatatatatatatgcatatatatttcataatatttggaaggtttttgatgctagaaaaatggaaacaagagaaccttcaaaaatggtacttagatgggaactggaggccaatctttcataaagccagccccatagctgcttgctgttaggcctccagccattttgacattggggtggatagtcgattcacctgcctgtcagtcgattcacctgcctgtcacccagttctgtggatgtgctggtgctgagcctttgctctctttccaaatggttacagggatgttgatcagctccaccagagggagctctgatgggaggaattgctctgccatccttgtccctgtgtctcctgtcggcaggcagccattgtatctcaccagcagaccaggagactggtcccaaggttactgcaccacagggcaatttcctgccatagttaggaaggaaacacctgaactaaatggaagagacatccctgcggtgtttaatatcacacccatgccctttgtcaggttaccatgtacagagattacttggagagcctcatgccgtctctaccttcgcacactggtcaagtatctgctgagcttcttggccgcaaggatgcagaaataggctgagggtccatgggaagaaagacacaatgaggcagtaggaggtggggaagaaaagaagacagactttcaaaatggaattaggcactggggagagatcagtttccccacatcagggagaagaaggtataggtggggaagggggtggccaggagcagaaggaagaagactcaagatggaaagggagccgctgtgcctgtggcaataccacttggagaggtcgacttcataccttcaagccttttcccctgggcttttgattgtgtctgtgccccctttcttgtcctctctgcagatgcccagtaggggctacctcatcctcgtgctgttcttgtgtggctttctgggcagtagggatcttgaatttcctttctaacactgtgcccggcaaggcggggagcattcctctgccctttgtcttgtgccaacctggaaaggtgcagtctagatttcagtgagaaccctgccagctgagccctgtgcatctactaccttgacacagagtgttttcccactagaagctctgctctgctctcctggcccaagtaggggattccatgccttccctttcatggtcttagcaccagcagcctagtttctcccttccagagtctccagggatgacaaattggattggagacaaacctcgtcagatgctcatcccctaaaaggttaattgtgtatttgtggctgcgtgtgcctttgtgttttcattctcttcccatttttgtacattttggtcttctctgtggttttatacttggtcaaaagtactcgtcttggtattgcactgttgtgtgcatgagaaaactgggggaaggctcactggtacaagaaaggacccctgacccctttccttctctgtggtccccggcattagattgggggttctgggagaggcaggtgaatgtcctaagtgaattgttctgtttgtaactggaatgtttttgaagtctttggtgttgctccgtgaaaggacatcgccacctggtgctcatgaggtgtctttgcagaacaataaatggcaaatgaacaaccacaaaattgttactcttgttggccttctgctgtttgtagattagtgcacctatctgtgagggatttgggttacctccctgagtctgtaagcaaccacaagccctgccactgggtgggggaagtccctccccaaccacttaaaaacaaattttccacatattacccacccacacatttgacctggctagactctttgtttgcctaaaggaacagaccacattgctgggaaaatgagtaagtgaacgtgtgggagaaaaacacttttagaatcacgaatattcacttttaaaggtctctttgcctggctgcaatatagtgtgtgtttaaattatttacaggctgttgtttctcaaataaatgtttaatattaatcattcccaaactgacaagaacacaaaaataaaatgcaaatacagagccagctttgtcacccaaatctgtgtctatttctgatagtccatggaatgtggttttcttggaagccagggttggtctccccacagaccccaggctaaggtcaccagttaggaacccaggacttggaaggcagagcctgtgagctcttccatcagggatctgactccgcaaaacgacttgatgaatgcaattggcaaactcccatgttcggacttcatatgcatgagccgttggacagagggtttcttagtatatactttaatgcatgtttatgtgcaatcttgttagtgggtatacaagtttgtgaagaacttctcatttcaataggcagttaatgtaatgcattaaaagcctgggaatttggggctatatttttcctttctgactcaataatcttcaaagaattcataggaaagtcagtacttgcagacaagtggttagcttggctaaaatgtacaaaacacccagaacccacaaaacactcagaggtttaggagaatgttttaatgcttaagaggcaggatcaagtgaagaggttacagaaatcagtgtctctggctgggcagtcaagagagcgggctcaaattctgtgactcacttctctgtgtctcggttggaaatgaatgggtatcctggttcccaccttcccacacgctgtgatacttcaaactccttgggtgaagggcctcttctcagcccaagatcttgattgtgaacattaacaaagagaacagtcatcctccacagaagataactcattaatgacatttgattcagtgaataaatatatcatttaaaaaaatattgtagggggatcatgaaagtagtggaggtaattacaatcaggagagattggtattaaaattgagcaaagtcccaactctcaccagatgacaattatgcatcctgctagatgccccagggctgtcagcctggaactgaaataaatgtgttataagtggtgctggatgcctttttcagttcatttgaaaacatggatttgatcatgtcagctccctttctgctggaaaaaaaagtagtttgcataattggtgttaactactctgttttgattctacagagtaagtaatactcaaatgtggtcttactttaacttcttgcctttgttacccccagaaccatgcagacattgaaatgtggtgtgcgtgtgtgtgtgtgtgtgtgtgtgtgtgtgtgttcatataacaggaggacaggaaaggtaaggacccagaacaatgaagacttattgaaatgtggtatgtgtgtgcgtgtgtgtgtgtgtgtgtgtgtgtgtgtgtgtgtgtgttcatataacaggaggacaggaaaggtaatgaccatccatggaagatgaaggggtagtacttagcaccagaatcttttccagtttttacccatctttcattactccttgtctccaaatcatcccttccttaataacttaaaataacttaaaatattttctgaggacttgatgacaccagtcagaagtccaagagtggtctggtataagggagtgttcatcaaggggcagctggaaaaagtggaattggcacaggcaacatctttcttttcagatgtttgaggtcacccagaggagataacagtctgtcaacatagagccctcaaagttaaaaagcagtagccaggcaagacttgtgtcttttcagggctcttccaggctctaagagtgtgaaattcagacaggtttttaaaaatcaaaataaaaggagagtagttcttacaggcagaaactcttagagctcacaaattggaaacaactgcaaacttcagagtaaattcatagcttccaaatacaaatgttcacattgtccctccgctatttttacacaaatgcattcaggtgaagacagcaacacacattgggaaaggacatctgcttcctattttagtcccagaatcacttttgcttctagtcccaactgttccctctccccaatcccaaccttatccatgtaacagtatgaatttcctggcccagagacctaaacaagaagtcacgaatatacctacttttggttgcacttgccatttcaatgcttaggaaa

SEQ ID NO: 442384 - DNA, 5444 bp, Homo sapiens
caaggcgggggcctgtttgcagagagccgggcatttgcatgaagcgactcgaccccacggagcagcggcagcagcagcggaccccggcggcggcggcggcgcgcggtcccagccaggcggccccggtgtcccggccccggtggatgcacggctggggaggagcccatgggccggagctgaggctgcccggggcggcggggcgcggggcagggggcgcggtcgaggcccggaggcggcggcgcaggaggaagcggaggaggtcgggcgctcggggcccgggaggcgggccgcgcagcgccgcagccccgggctcgccatgctcctggcctcggccgtggtggtctgggaatggctgaacgagcacggccgctggcgtccctacagcccagcggtgagccaccacatcgaggcggtggtccgcgccggcccccgcgcggggggcagcgtggtgctgggccaggtggacagccgtctcgcgccctacatcatcgacctgcagtccatgaaccagttccgccaagacacgggaactctccgcccagttcgccgcaactactacgacccctcctcggcccctgggaagggcgtggtgtgggagtgggagaacgacaatggctcctggacgccctacgacatggaagtgggcatcaccatccagcatgcctatgagaagcagcacccctggatcgacctcacttccattggctttagctacgtaattgacttcaacaccatgggccagatcaaccgtcagacccagcgccaacgccgcgtccgccggcgcctcgacctcatctaccccatggtcacagggaccttgcctaaggctcagtcctggccagtcagccctgggccagccacctcgccccccatgtccccctgctcctgtccccagtgtgtcttggtgatgagtgttaaggcagccgtggtcaatggcagcactgggcccctacagctgccagtgacccgcaagaacatgccgcctcctggagtggtcaagctacccccactgccaggctctggggccaagccactggacagcacaggcaccattcgaggcccactgaagaccgccccatcgcaggtgatccggagacaagcctccagcatgcccactgggacaaccatgggctctcctgccagtcccccaggacccaacagcaagaccggaagggtggccctggccaccttgaatcgtaccaacctgcagcgactggccattgcccagtcccgggtgctgatcgcctctggggtccccacagtcccagtgaagaacctaaatgggtccagtcctgtcaaccctgccttggcaggaatcactgggatcctcatgagtgcagcggggctgcctgtgtgtctcaccaggccaccaaagctggtcctacacccaccccccgtcagcaagagtgaaataaaatccatcccaggggtttccaacacaagccgcaagaccaccaaaaaacaagccaagaaaggtaaaaccccagaggaagtgctaaaaaaatatctacagaaagtccggcacccaccagatgaggactgcaccatctgtatggaacgcctcacggccccctcaggctacaagggcccgcagcctacggtaaaacctgacctggtagggaagctgtccagatgcggccacgtctaccacatctactgcttggttgccatgtacaacaatgggaacaaggatggaagtttgcagtgtccaacctgcaagaccatttatggggtgaagacaggcacccaacctccagggaagatggagtaccacctcatcccccactccttgcctggccacccagactgcaaaaccatccggatcatctacagcatcccccccggcattcagggaccggaacacccgaatcctgggaagagtttcagcgcccgaggcttcccacgacactgttaccttccggacagcgagaaagggagaaaagttctgaagctgctgctcgtggcctgggatcgccgcctcatttttgccattggcacctccagcaccacaggcgagtcagacaccgtcatctggaatgaggtccaccacaagacagagtttggctctaatctcactggccatggctacccagatgccaattacctggataatgtgctggctgaactggctgcccagggcatctctgaggacagcactgcccaggagaaggactgaggccagaaaagctttgaggtgggaggggccatggagactgcaggacaggaagtgaggagagtgagtcaatgtagaagaagttggtgtcctgccctcccaactttctatcctcccctcctgccctgtgtccatccctcatccctcccaaccacagtgggagccagactgaatatagcgacatcattcataaatctcatccaacacaaagggagatgggatgagggccatcctgggtctgttcccatggagtttttggtgctgggtaggcaggaatcccctccctaccccacctcccaagtaggggcatggtcagcacacctagggtatgggcagtgcttaggcactccatatcctggctttgggaagccggggtttcttgcctcagccggcttcttgctacttccactctgctttgagactggagtttctgctattctccctctgctggaggcagggagctctcactgtgcaaggttggggggtgggcaaaggggtgaatcactaaactgctgtgacatcagaaactgatgccttggtgtagagcaaggaagcacttcttcccaagagggtcggagaaggaaaagcctctgggagcacattctgctgtcatcacagtccttggcttctctgggccctcctctcctcctcacagctctcacctgtccaaagaggcatctggttctctcatgtggatggatggactctggggttcctctttggagtggcatcccatgatgctgtttctagaccctctctgatcaaaccagagcctgcatcccactgagcatctgaactgtcctcagggagaggagcccacagccttcttcccaactcattctagaccagctcaaagattccatgagtttcatcgagtcactgtgagtggagcccatgctgggctctgtgccctctgtgtctgtgcatgcgcgtgtgtgtgtgggcgtgtgtgcattgctgggccagcttgaagggaaggcccgtcatgtccctgcactctgttttgcaagatgccaaaccccagttctgatggggctccaacagccaggctgtggtcctttgacgttcctcacctgttgccaacctatcccgtagtgaactgaaaccccaatgaagacagaactgtgcctggggagatgcaatgaggtgagggctgaactcatccttttatatttcttttcaagattggatcagagctcatctccatccagtcttgtttctatgaaggcttcaatctgtttccatgcaaatttgctaatcagagcccagagctgctgggtccctcatctccctcatctattatagattgacttacagcagggagagaatctctttagctcattcctaatggggttgggatcacaatatggtctggtccaatctgcatcttgttgtgtcccaagaccctatctcctccccaacattcttattgcctttggctcccagtaaggaacgaattgggggccagggaggagaacaggggggatcaagaagggaaacccaattccccctttgaaagtgggttctttgaactatgtgtttgggggaagttcctctggatactaatttgaatttatatacctcatgttttgggggtttgacgtatatatatatatatatatatatgcatatatatttcataatatttggaaggtttttgatgctagaaaaatggaaacaagagaaccttcaaaaatggtacttagatgggaactggaggccaatctttcataaagccagccccatagctgcttgctgttaggcctccagccattttgacattggggtggatagtcgattcacctgcctgtcagtcgattcacctgcctgtcacccagttctgtggatgtgctggtgctgagcctttgctctctttccaaatggttacagggatgttgatcagctccaccagagggagctctgatgggaggaattgctctgccatccttgtccctgtgtctcctgtcggcaggcagccattgtatctcaccagcagaccaggagactggtcccaaggttactgcaccacagggcaatttcctgccatagttaggaaggaaacacctgaactaaatggaagagacatccctgcggtgtttaatatcacacccatgccctttgtcaggttaccatgtacagagattacttggagagcctcatgccgtctctaccttcgcacactggtcaagtatctgctgagcttcttggccgcaaggatgcagaaataggctgagggtccatgggaagaaagacacaatgaggcagtaggaggtggggaagaaaagaagacagactttcaaaatggaattaggcactggggagagatcagtttccccacatcagggagaagaaggtataggtggggaagggggtggccaggagcagaaggaagaagactcaagatggaaagggagccgctgtgcctgtggcaataccacttggagaggtcgacttcataccttcaagccttttcccctgggcttttgattgtgtctgtgccccctttcttgtcctctctgcagatgcccagtaggggctacctcatcctcgtgctgttcttgtgtggctttctgggcagtagggatcttgaatttcctttctaacactgtgcccggcaaggcggggagcattcctctgccctttgtcttgtgccaacctggaaaggtgcagtctagatttcagtgagaaccctgccagctgagccctgtgcatctactaccttgacacagagtgttttcccactagaagctctgctctgctctcctggcccaagtaggggattccatgccttccctttcatggtcttagcaccagcagcctagtttctcccttccagagtctccagggatgacaaattggattggagacaaacctcgtcagatgctcatcccctaaaaggttaattgtgtatttgtggctgcgtgtgcctttgtgttttcattctcttcccatttttgtacattttggtcttctctgtggttttatacttggtcaaaagtactcgtcttggtattgcactgttgtgtgcatgagaaaactgggggaaggctcactggtacaagaaaggacccctgacccctttccttctctgtggtccccggcattagattgggggttctgggagaggcaggtgaatgtcctaagtgaattgttctgtttgtaactggaatgtttttgaagtctttggtgttgctccgtgaaaggacatcgccacctggtgctcatgaggtgtctttgcagaacaataaatggcaaatgaacaaccacaaaa

SEQ ID NO: 442385 - DNA, 3730 bp, Homo sapiens
acattaccctaggaaggacactaggctagaaggatgcaattggggaccagaactagttccttgggtccccactccttgcctggccacccagactgcaaaaccatccggatcatctacagcatcccccccggcattcagggaccggaacacccgaatcctgggaagagtttcagcgcccgaggcttcccacgacactgttaccttccggacagcgagaaagggagaaaagttctgaagctgctgctcgtggcctgggatcgccgcctcatttttgccattggcacctccagcaccacaggcgagtcagacaccgtcatctggaatgaggtccaccacaagacagagtttggctctaatctcactggccatggctacccagatgccaattacctggataatgtgctggctgaactggctgcccagggcatctctgaggacagcactgcccaggagaaggactgaggccagaaaagctttgaggtgggaggggccatggagactgcaggacaggaagtgaggagagtgagtcaatgtagaagaagttggtgtcctgccctcccaactttctatcctcccctcctgccctgtgtccatccctcatccctcccaaccacagtgggagccagactgaatatagcgacatcattcataaatctcatccaacacaaagggagatgggatgagggccatcctgggtctgttcccatggagtttttggtgctgggtaggcaggaatcccctccctaccccacctcccaagtaggggcatggtcagcacacctagggtatgggcagtgcttaggcactccatatcctggctttgggaagccggggtttcttgcctcagccggcttcttgctacttccactctgctttgagactggagtttctgctattctccctctgctggaggcagggagctctcactgtgcaaggttggggggtgggcaaaggggtgaatcactaaactgctgtgacatcagaaactgatgccttggtgtagagcaaggaagcacttcttcccaagagggtcggagaaggaaaagcctctgggagcacattctgctgtcatcacagtccttggcttctctgggccctcctctcctcctcacagctctcacctgtccaaagaggcatctggttctctcatgtggatggatggactctggggttcctctttggagtggcatcccatgatgctgtttctagaccctctctgatcaaaccagagcctgcatcccactgagcatctgaactgtcctcagggagaggagcccacagccttcttcccaactcattctagaccagctcaaagattccatgagtttcatcgagtcactgtgagtggagcccatgctgggctctgtgccctctgtgtctgtgcatgcgcgtgtgtgtgtgggcgtgtgtgcattgctgggccagcttgaagggaaggcccgtcatgtccctgcactctgttttgcaagatgccaaaccccagttctgatggggctccaacagccaggctgtggtcctttgacgttcctcacctgttgccaacctatcccgtagtgaactgaaaccccaatgaagacagaactgtgcctggggagatgcaatgaggtgagggctgaactcatccttttatatttcttttcaagattggatcagagctcatctccatccagtcttgtttctatgaaggcttcaatctgtttccatgcaaatttgctaatcagagcccagagctgctgggtccctcatctccctcatctattatagattgacttacagcagggagagaatctctttagctcattcctaatggggttgggatcacaatatggtctggtccaatctgcatcttgttgtgtcccaagaccctatctcctccccaacattcttattgcctttggctcccagtaaggaacgaattgggggccagggaggagaacaggggggatcaagaagggaaacccaattccccctttgaaagtgggttctttgaactatgtgtttgggggaagttcctctggatactaatttgaatttatatacctcatgttttgggggtttgacgtatatatatatatatatatatatgcatatatatttcataatatttggaaggtttttgatgctagaaaaatggaaacaagagaaccttcaaaaatggtacttagatgggaactggaggccaatctttcataaagccagccccatagctgcttgctgttaggcctccagccattttgacattggggtggatagtcgattcacctgcctgtcagtcgattcacctgcctgtcacccagttctgtggatgtgctggtgctgagcctttgctctctttccaaatggttacagggatgttgatcagctccaccagagggagctctgatgggaggaattgctctgccatccttgtccctgtgtctcctgtcggcaggcagccattgtatctcaccagcagaccaggagactggtcccaaggttactgcaccacagggcaatttcctgccatagttaggaaggaaacacctgaactaaatggaagagacatccctgcggtgtttaatatcacacccatgccctttgtcaggttaccatgtacagagattacttggagagcctcatgccgtctctaccttcgcacactggtcaagtatctgctgagcttcttggccgcaaggatgcagaaataggctgagggtccatgggaagaaagacacaatgaggcagtaggaggtggggaagaaaagaagacagactttcaaaatggaattaggcactggggagagatcagtttccccacatcagggagaagaaggtataggtggggaagggggtggccaggagcagaaggaagaagactcaagatggaaagggagccgctgtgcctgtggcaataccacttggagaggtcgacttcataccttcaagccttttcccctgggcttttgattgtgtctgtgccccctttcttgtcctctctgcagatgcccagtaggggctacctcatcctcgtgctgttcttgtgtggctttctgggcagtagggatcttgaatttcctttctaacactgtgcccggcaaggcggggagcattcctctgccctttgtcttgtgccaacctggaaaggtgcagtctagatttcagtgagaaccctgccagctgagccctgtgcatctactaccttgacacagagtgttttcccactagaagctctgctctgctctcctggcccaagtaggggattccatgccttccctttcatggtcttagcaccagcagcctagtttctcccttccagagtctccagggatgacaaattggattggagacaaacctcgtcagatgctcatcccctaaaaggttaattgtgtatttgtggctgcgtgtgcctttgtgttttcattctcttcccatttttgtacattttggtcttctctgtggttttatacttggtcaaaagtactcgtcttggtattgcactgttgtgtgcatgagaaaactgggggaaggctcactggtacaagaaaggacccctgacccctttccttctctgtggtccccggcattagattgggggttctgggagaggcaggtgaatgtcctaagtgaattgttctgtttgtaactggaatgtttttgaagtctttggtgttgctccgtgaaaggacatcgccacctggtgctcatgaggtgtctttgcagaacaataaatggcaaatgaacaaccacaaaa

SEQ ID NO: 442386 - DNA, 3160 bp, Homo sapiens
ggatgttatcgtagctgaaggggaggcggggagcattcctctgccctttgtcttgtgccaacctggaaaggtgcagtctagatttcagtgagaaccctgccagctgagccctgtgcatctactaccttgacacagagtgttttcccactagaagctctgctctgctctcctggcccaagtaggggattccatgccttccctttcatggtcttagcaccagcagcctagtttctcccttccagagtctccagggatgacaaattggattggagacaaacctcgtcagatgctcatcccctaaaaggttaattgtgtatttgtggctgcgtgtgcctttgtgttttcattctcttcccatttttgtacattttggtcttctctgtggttttatacttggtcaaaagtactcgtcttggtattgcactgttgtgtgcatgagaaaactgggggaaggctcactggtacaagaaaggacccctgacccctttccttctctgtggtccccggcattagattgggggttctgggagaggcaggtgaatgtcctaagtgaattgttctgtttgtaactggaatgtttttgaagtctttggtgttgctccgtgaaaggacatcgccacctggtgctcatgaggtgtctttgcagaacaataaatggcaaatgaacaaccacaaaattgttactcttgttggccttctgctgtttgtagattagtgcacctatctgtgagggatttgggttacctccctgagtctgtaagcaaccacaagccctgccactgggtgggggaagtccctccccaaccacttaaaaacaaattttccacatattacccacccacacatttgacctggctagactctttgtttgcctaaaggaacagaccacattgctgggaaaatgagtaagtgaacgtgtgggagaaaaacacttttagaatcacgaatattcacttttaaaggtctctttgcctggctgcaatatagtgtgtgtttaaattatttacaggctgttgtttctcaaataaatgtttaatattaatcattcccaaactgacaagaacacaaaaataaaatgcaaatacagagccagctttgtcacccaaatctgtgtctatttctgatagtccatggaatgtggttttcttggaagccagggttggtctccccacagaccccaggctaaggtcaccagttaggaacccaggacttggaaggcagagcctgtgagctcttccatcagggatctgactccgcaaaacgacttgatgaatgcaattggcaaactcccatgttcggacttcatatgcatgagccgttggacagagggtttcttagtatatactttaatgcatgtttatgtgcaatcttgttagtgggtatacaagtttgtgaagaacttctcatttcaataggcagttaatgtaatgcattaaaagcctgggaatttggggctatatttttcctttctgactcaataatcttcaaagaattcataggaaagtcagtacttgcagacaagtggttagcttggctaaaatgtacaaaacacccagaacccacaaaacactcagaggtttaggagaatgttttaatgcttaagaggcaggatcaagtgaagaggttacagaaatcagtgtctctggctgggcagtcaagagagcgggctcaaattctgtgactcacttctctgtgtctcggttggaaatgaatgggtatcctggttcccaccttcccacacgctgtgatacttcaaactccttgggtgaagggcctcttctcagcccaagatcttgattgtgaacattaacaaagagaacagtcatcctccacagaagataactcattaatgacatttgattcagtgaataaatatatcatttaaaaaaatattgtagggggatcatgaaagtagtggaggtaattacaatcaggagagattggtattaaaattgagcaaagtcccaactctcaccagatgacaattatgcatcctgctagatgccccagggctgtcagcctggaactgaaataaatgtgttataagtggtgctggatgcctttttcagttcatttgaaaacatggatttgatcatgtcagctccctttctgctggaaaaaaaagtagtttgcataattggtgttaactactctgttttgattctacagagtaagtaatactcaaatgtggtcttactttaacttcttgcctttgttacccccagaaccatgcagacattgaaatgtggtgtgcgtgtgtgtgtgtgtgtgtgtgtgtgtgtgtgttcatataacaggaggacaggaaaggtaaggacccagaacaatgaagacttattgaaatgtggtatgtgtgtgcgtgtgtgtgtgtgtgtgtgtgtgtgtgtgtgtgtgtgttcatataacaggaggacaggaaaggtaatgaccatccatggaagatgaaggggtagtacttagcaccagaatcttttccagtttttacccatctttcattactccttgtctccaaatcatcccttccttaataacttaaaataacttaaaatattttctgaggacttgatgacaccagtcagaagtccaagagtggtctggtataagggagtgttcatcaaggggcagctggaaaaagtggaattggcacaggcaacatctttcttttcagatgtttgaggtcacccagaggagataacagtctgtcaacatagagccctcaaagttaaaaagcagtagccaggcaagacttgtgtcttttcagggctcttccaggctctaagagtgtgaaattcagacaggtttttaaaaatcaaaataaaaggagagtagttcttacaggcagaaactcttagagctcacaaattggaaacaactgcaaacttcagagtaaattcatagcttccaaatacaaatgttcacattgtccctccgctatttttacacaaatgcattcaggtgaagacagcaacacacattgggaaaggacatctgcttcctattttagtcccagaatcacttttgcttctagtcccaactgttccctctccccaatcccaaccttatccatgtaacagtatgaatttcctggcccagagacctaaacaagaagtcacgaatatacctacttttggttgcacttgccatttcaatgcttaggaaa

SEQ ID NO: 442387 - DNA, 4891 bp, Homo sapiens
caaggcgggggcctgtttgcagagagccgggcatttgcatgaagcgactcgaccccacggagcagcggcagcagcagcggaccccggcggcggcggcggcgcgcggtcccagccaggcggccccggtgtcccggccccggtggatgcacggctggggaggagcccatgggccggagctgaggctgcccggggcggcggggcgcggggcagggggcgcggtcgaggcccggaggcggcggcgcaggaggaagcggaggaggtcgggcgctcggggcccgggaggcgggccgcgcagcgccgcagccccgggctcgccatgctcctggcctcggccgtggtggtctgggaatggctgaacgagcacggccgctggcgtccctacagcccagcggtgagccaccacatcgaggcggtggtccgcgccggcccccgcgcggggggcagcgtggtgctgggccaggtggacagccgtctcgcgccctacatcatcgacctgcagtccatgaaccagttccgccaagacacgggaactctccgcccagttcgccgcaactactacgacccctcctcggcccctgggaagggcgtggtgtgggagtgggagaacgacaatggctcctggacgccctacgacatggaagtgggcatcaccatccagcatgcctatgagaagcagcacccctggatcgacctcacttccattggctttagctacgtaattgacttcaacaccatgggccagatcaaccgtcagacccagcgccaacgccgcgtccgccggcgcctcgacctcatctaccccatggtcacagggaccttgcctaaggctcagtcctggccagtcagccctgggccagccacctcgccccccatgtccccctgctcctgtccccagtgtgtcttggtgatgagtgttaaggcagccgtggtcaatggcagcactgggcccctacagctgccagtgacccgcaagaacatgccgcctcctggagtggtcaagctacccccactgccaggctctggggccaagccactggacagcacaggcaccattcgaggcccactgaagaccgccccatcgcaggtgatccggagacaagcctccagcatgcccactgggacaaccatgggctctcctgccagtcccccaggacccaacagcaagaccggaagggtggccctggccaccttgaatcgtaccaacctgcagcgactggccattgcccagtcccgggtgctgatcgcctctggggtccccacagtcccagtgaagaacctaaatgggtccagtcctgtcaaccctgccttggcaggaatcactgggatcctcatgagtgcagcggggctgcctgtgtgtctcaccaggccaccaaagctggtcctacacccaccccccgtcagcaagagtgaaataaaatccatcccaggggtttccaacacaagccgcaagaccaccaaaaaacaagccaagaaaggtaaaaccccagaggaagtgctaaaaaaatatctacagaaagtccggcacccaccagatgaggactgcaccatctgtatggaacgcctcacggccccctcaggctacaagggcccgcagcctacggtaaaacctgacctggtagggaagctgtccagatgcggccacgtctaccacatctactgcttggttgccatgtacaacaatgggaacaaggatggaagtttgcagtgtccaacctgcaagaccatttatggggtgaagacaggcacccaacctccagggaagatggagtaccacctcatcccccactccttgcctggccacccagactgcaaaaccatccggatcatctacagcatcccccccggcattcagggaccggaacacccgaatcctgggaagagtttcagcgcccgaggcttcccacgacactgttaccttccggacagcgagaaagggagaaaagttctgaagctgctgctcgtggcctgggatcgccgcctcatttttgccattggcacctccagcaccacaggcgagtcagacaccgtcatctggaatgaggtccaccacaagacagagtttggctctaatctcactggccatggctacccagatgccaattacctggataatgtgctggctgaactggctgcccagggcatctctgaggacagcactgcccaggagaaggactgaggccagaaaagctttgaggtgggaggggccatggagactgcaggacaggaagtgaggagagtgagtcaatgtagaagaagttggtgtcctgccctcccaactttctatcctcccctcctgccctgtgtccatccctcatccctcccaaccacagtgggagccagactgaatatagcgacatcattcataaatctcatccaacacaaagggagatgggatgagggccatcctgggtctgttcccatggagtttttggtgctgggtaggcaggaatcccctccctaccccacctcccaagtaggggcatggtcagcacacctagggtatgggcagtgcttaggcactccatatcctggctttgggaagccggggtttcttgcctcagccggcttcttgctacttccactctgctttgagactggagtttctgctattctccctctgctggaggcagggagctctcactgtgcaaggttggggggtgggcaaaggggtgaatcactaaactgctgtgacatcagaaactgatgccttggtgtagagcaaggaagcacttcttcccaagagggtcggagaaggaaaagcctctgggagcacattctgctgtcatcacagtccttggcttctctgggccctcctctcctcctcacagctctcacctgtccaaagaggcatctggttctctcatgtggatggatggactctggggttcctctttggagtggcatcccatgatgctgtttctagaccctctctgatcaaaccagagcctgcatcccactgagcatctgaactgtcctcagggagaggagcccacagccttcttcccaactcattctagaccagctcaaagattccatgagtttcatcgagtcactgtgagtggagcccatgctgggctctgtgccctctgtgtctgtgcatgcgcgtgtgtgtgtgggcgtgtgtgcattgctgggccagcttgaagggaaggcccgtcatgtccctgcactctgttttgcaagatgccaaaccccagttctgatggggctccaacagccaggctgtggtcctttgacgttcctcacctgttgccaacctatcccgtagtgaactgaaaccccaatgaagacagaactgtgcctggggagatgcaatgaggtgagggctgaactcatccttttatatttcttttcaagattggatcagagctcatctccatccagtcttgtttctatgaaggcttcaatctgtttccatgcaaatttgctaatcagagcccagagctgctgggtccctcatctccctcatctattatagattgacttacagcagggagagaatctctttagctcattcctaatggggttgggatcacaatatggtctggtccaatctgcatcttgttgtgtcccaagaccctatctcctccccaacattcttattgcctttggctcccagtaaggaacgaattgggggccagggaggagaacaggggggatcaagaagggaaacccaattccccctttgaaagtgggttctttgaactatgtgtttgggggaagttcctctggatactaatttgaatttatatacctcatgttttgggggtttgacgtatatatatatatatatatatatgcatatatatttcataatatttggaaggtttttgatgctagaaaaatggaaacaagagaaccttcaaaaatggtacttagatgggaactggaggccaatctttcataaagccagccccatagctgcttgctgttaggcctccagccattttgacattggggtggatagtcgattcacctgcctgtcagtcgattcacctgcctgtcacccagttctgtggatgtgctggtgctgagcctttgctctctttccaaatggttacagggatgttgatcagctccaccagagggagctctgatgggaggaattgctctgccatccttgtccctgtgtctcctgtcggcaggcagccattgtatctcaccagcagaccaggagactggtcccaaggttactgcaccacagggcaatttcctgccatagttaggaaggaaacacctgaactaaatggaagagacatccctgcggtgtttaatatcacacccatgccctttgtcaggttaccatgtacagagattacttggagagcctcatgccgtctctaccttcgcacactggtcaagtatctgctgagcttcttggccgcaaggatgcagaaataggctgagggtccatgggaagaaagacacaatgaggcagtaggaggtggggaagaaaagaagacagactttcaaaatggaattaggcactggggagagatcagtttccccacatcagggagaagaaggtataggtggggaagggggtggccaggagcagaaggaagaagactcaagatggaaagggagccgctgtgcctgtggcaataccacttggagaggtcgacttcataccttcaagccctctgcgccccctgtgctggtcagcacagaggaggcacagaggagtgatgaagcggatcccaatacggcagaagacagaaaatggggcatcggcgtgagcgccctggctacaggctggggttgggaggcctctctgggcctggaggtgggggtgggggcagccaagtccagccactcttcacctggctccctcctctgtgctgtcagcacagaggagggggggaagtatgtaggagttgaagattagtcc

SEQ ID NO: 442388 - DNA, 6876 bp, Homo sapiens
caaggcgggggcctgtttgcagagagccgggcatttgcatgaagcgactcgaccccacggagcagcggcagcagcagcggaccccggcggcggcggcggcgcgcggtcccagccaggcggccccggtgtcccggccccggtggatgcacggctggggaggagcccatgggccggagctgaggctgcccggggcggcggggcgcggggcagggggcgcggtcgaggcccggaggcggcggcgcaggaggaagcggaggaggtcgggcgctcggggcccgggaggcgggccgcgcagcgccgcagccccgggctcgccatgctcctggcctcggccgtggtggtctgggaatggctgaacgagcacggccgctggcgtccctacagcccagcggtgagccaccacatcgaggcggtggtccgcgccggcccccgcgcggggggcagcgtggtgctgggccaggtggacagccgtctcgcgccctacatcatcgacctgcagtccatgaaccagttccgccaagacacgggaactctccgcccagttcgccgcaactactacgacccctcctcggcccctgggaagggcgtggtgtgggagtgggagaacgacaatggctcctggacgccctacgacatggaagtgggcatcaccatccagcatgcctatgagaagcagcacccctggatcgacctcacttccattggctttagctacgtaattgacttcaacaccatgggccagatcaaccgtcagacccagcgccaacgccgcgtccgccggcgcctcgacctcatctaccccatggtcacagggaccttgcctaaggctcagtcctggccagtcagccctgggccagccacctcgccccccatgtccccctgctcctgtccccagtgtgtcttggtgatgagtgttaaggcagccgtggtcaatggcagcactgggcccctacagctgccagtgacccgcaagaacatgccgcctcctggagtggtcaagctacccccactgccaggctctggggccaagccactggacagcacaggcaccattcgaggcccactgaagaccgccccatcgcaggtgatccggagacaagcctccagcatgcccactgggacaaccatgggctctcctgccagtcccccaggacccaacagcaagaccggaagggtggccctggccaccttgaatcgtaccaacctgcagcgactggccattgcccagtcccgggtgctgatcgcctctggggtccccacagtcccagtgaagaacctaaatgggtccagtcctgtcaaccctgccttggcaggaatcactgggatcctcatgagtgcagcggggctgcctgtgtgtctcaccaggccaccaaagctggtcctacacccaccccccgtcagcaagagtgaaataaaatccatcccaggggtttccaacacaagccgcaagaccaccaaaaaacaagccaagaaaggtaaaaccccagaggaagtgctaaaaaaatatctacagaaagtccggcacccaccagatgaggactgcaccatctgtatggaacgcctcacggccccctcaggctacaagggcccgcagcctacggtaaaacctgacctggtagggaagctgtccagatgcggccacgtctaccacatctactgcttggttgccatgtacaacaatgggaacaaggatggaagtttgcagtgtccaacctgcaagaccatttatggggtgaagacaggcacccaacctccagggaagatggagtaccacctcatcccccactccttgcctggccacccagactgcaaaaccatccggatcatctacagcatcccccccggcattcagggaccggaacacccgaatcctgggaagagtttcagcgcccgaggcttcccacgacactgttaccttccggacagcgagaaagggagaaaagttctgaagctgctgctcgtggcctgggatcgccgcctcatttttgccattggcacctccagcaccacaggcgagtcagacaccgtcatctggaatgaggtccaccacaagacagagtttggctctaatctcactggccatggctacccagatgccaattacctggataatgtgctggctgaactggctgcccagggcatctctgaggacagcactgcccaggagaaggactgaggccagaaaagctttgaggtgggaggggccatggagactgcaggacaggaagtgaggagagtgagtcaatgtagaagaagttggtgtcctgccctcccaactttctatcctcccctcctgccctgtgtccatccctcatccctcccaaccacagtgggagccagactgaatatagcgacatcattcataaatctcatccaacacaaagggagatgggatgagggccatcctgggtctgttcccatggagtttttggtgctgggtaggcaggaatcccctccctaccccacctcccaagtaggggcatggtcagcacacctagggtatgggcagtgcttaggcactccatatcctggctttgggaagccggggtttcttgcctcagccggcttcttgctacttccactctgctttgagactggagtttctgctattctccctctgctggaggcagggagctctcactgtgcaaggttggggggtgggcaaaggggtgaatcactaaactgctgtgacatcagaaactgatgccttggtgtagagcaaggaagcacttcttcccaagagggtcggagaaggaaaagcctctgggagcacattctgctgtcatcacagtccttggcttctctgggccctcctctcctcctcacagctctcacctgtccaaagaggcatctggttctctcatgtggatggatggactctggggttcctctttggagtggcatcccatgatgctgtttctagaccctctctgatcaaaccagagcctgcatcccactgagcatctgaactgtcctcagggagaggagcccacagccttcttcccaactcattctagaccagctcaaagattccatgagtttcatcgagtcactgtgagtggagcccatgctgggctctgtgccctctgtgtctgtgcatgcgcgtgtgtgtgtgggcgtgtgtgcattgctgggccagcttgaagggaaggcccgtcatgtccctgcactctgttttgcaagatgccaaaccccagttctgatggggctccaacagccaggctgtggtcctttgacgttcctcacctgttgccaacctatcccgtagtgaactgaaaccccaatgaagacagaactgtgcctggggagatgcaatgaggtgagggctgaactcatccttttatatttcttttcaagattggatcagagctcatctccatccagtcttgtttctatgaaggcttcaatctgtttccatgcaaatttgctaatcagagcccagagctgctgggtccctcatctccctcatctattatagattgacttacagcagggagagaatctctttagctcattcctaatggggttgggatcacaatatggtctggtccaatctgcatcttgttgtgtcccaagaccctatctcctccccaacattcttattgcctttggctcccagtaaggaacgaattgggggccagggaggagaacaggggggatcaagaagggaaacccaattccccctttgaaagtgggttctttgaactatgtgtttgggggaagttcctctggatactaatttgaatttatatacctcatgttttgggggtttgacgtatatatatatatatatatatatgcatatatatttcataatatttggaaggtttttgatgctagaaaaatggaaacaagagaaccttcaaaaatggtacttagatgggaactggaggccaatctttcataaagccagccccatagctgcttgctgttaggcctccagccattttgacattggggtggatagtcgattcacctgcctgtcagtcgattcacctgcctgtcacccagttctgtggatgtgctggtgctgagcctttgctctctttccaaatggttacagggatgttgatcagctccaccagagggagctctgatgggaggaattgctctgccatccttgtccctgtgtctcctgtcggcaggcagccattgtatctcaccagcagaccaggagactggtcccaaggttactgcaccacagggcaatttcctgccatagttaggaaggaaacacctgaactaaatggaagagacatccctgcggtgtttaatatcacacccatgccctttgtcaggttaccatgtacagagattacttggagagcctcatgccgtctctaccttcgcacactggtcaagtatctgctgagcttcttggccgcaaggatgcagaaataggctgagggtccatgggaagaaagacacaatgaggcagtaggaggtggggaagaaaagaagacagactttcaaaatggaattaggcactggggagagatcagtttccccacatcagggagaagaaggtataggtggggaagggggtggccaggagcagaaggaagaagactcaagatggaaagggagccgctgtgcctgtggcaataccacttggagaggtcgacttcataccttcaagccttttcccctgggcttttgattgtgtctgtgccccctttcttgtcctctctgcagatgcccagtaggggctacctcatcctcgtgctgttcttgtgtggctttctgggcagtagggatcttgaatttcctttctaacactgtgcccggcaaggcggggagcattcctctgccctttgtcttgtgccaacctggaaaggtgcagtctagatttcagtgagaaccctgccagctgagccctgtgcatctactaccttgacacagagtgttttcccactagaagctctgctctgctctcctggcccaagtaggggattccatgccttccctttcatggtcttagcaccagcagcctagtttctcccttccagagtctccagggatgacaaattggattggagacaaacctcgtcagatgctcatcccctaaaaggttaattgtgtatttgtggctgcgtgtgcctttgtgttttcattctcttcccatttttgtacattttggtcttctctgtggttttatacttggtcaaaagtactcgtcttggtattgcactgttgtgtgcatgagaaaactgggggaaggctcactggtacaagaaaggacccctgacccctttccttctctgtggtccccggcattagattgggggttctgggagaggcaggtgaatgtcctaagtgaattgttctgtttgtaactggaatgtttttgaagtctttggtgttgctccgtgaaaggacatcgccacctggtgctcatgaggtgtctttgcagaacaataaatggcaaatgaacaaccacaaaattgttactcttgttggccttctgctgtttgtagattagtgcacctatctgtgagggatttgggttacctccctgagtctgtaagcaaccacaagccctgccactgggtgggggaagtccctccccaaccacttaaaaacaaattttccacatattacccacccacacatttgacctggctagactctttgtttgcctaaaggaacagaccacattgctgggaaaatgagtaagtgaacgtgtgggagaaaaacacttttagaatcacgaatattcacttttaaaggtctctttgcctggctgcaatatagtgtgtgtttaaattatttacaggctgttgtttctcaaataaatgtttaatattaatcattcccaaactgacaagaacacaaaaataaaatgcaaatacagagccagctttgtcacccaaatctgtgtctatttctgatagtccatggaatgtggttttcttggaagccagggttggtctccccacagaccccaggctaaggtcaccagttaggaacccaggacttggaaggcagagcctgtgagctcttccatcagggatctgactccgcaaaacgacttgatgaatgcaattggcaaactcccatgttcggacttcatatgcatgagccgttggacagagggtttcttagtatatactttaatgcatgtttatgtgcaatcttgttagtgggtatacaagtttgtgaagaacttctcatttcaataggcagttaatgtaatgcattaaaagcctgggaatttggggctatatttttcctttctgactcaataatcttcaaagaattcataggaaagtcagtacttgcagacaagtggttagcttggctaaaatgtacaaaacacccagaacccacaaaacactcagaggtttaggagaatgttttaatgcttaagaggcaggatcaagtgaagaggttacagaaatcagtgtctctggctgggcagtcaagagagcgggctcaaattctgtgactcacttctctgtgtctcggttggaaatgaatgggtatcctggttcccaccttcccacacgctgtgatacttcaaactccttgggtgaagggcctcttctcagcccaagatcttgattgtgaacattaacaaagagaacagtcatcctccacagaagataactcattaatgacatttgattcagtgaacccaaagaacactttatgatgcattgtattgggatcagtgcagaagcaggtgaaaatacgaacaggaggggttgggggtaaaggtcaaggcaatggccaatgggccaagagcccctcattgatccctgtgacattcccaggggcagataggatgttatttattttggttggaaaaaaaaagaaggaacagcaacaactaggcaatgcattggcttgacccatataatgagtgatacccgt

SEQ ID NO: 442389 - DNA, 4070 bp, Homo sapiens
tactgagtggctgaataatgactccctgtgtaggctcctgccctagagagctggtcccctcctcagggacaggggcttctcttacatatccctcagcatggagcatgggaccagttgtggaatttacctcctattactttggagaaagcagaaatagcctaggtgactgggctgggagggaaaaactaagatctatcactcaccagggtgcattttgttcccctggcccttcatctctggtaccttttgggactgggtgggaaagttattaccaaaactgtttcccaatctggctcttctggccttggcccctcaggatggaagtttgcagtgtccaacctgcaagaccatttatggggtgaagacaggcacccaacctccagggaagatggagtaccacctcatcccccactccttgcctggccacccagactgcaaaaccatccggatcatctacagcatcccccccggcattcagggaccggaacacccgaatcctgggaagagtttcagcgcccgaggcttcccacgacactgttaccttccggacagcgagaaagggagaaaagttctgaagctgctgctcgtggcctgggatcgccgcctcatttttgccattggcacctccagcaccacaggcgagtcagacaccgtcatctggaatgaggtccaccacaagacagagtttggctctaatctcactggccatggctacccagatgccaattacctggataatgtgctggctgaactggctgcccagggcatctctgaggacagcactgcccaggagaaggactgaggccagaaaagctttgaggtgggaggggccatggagactgcaggacaggaagtgaggagagtgagtcaatgtagaagaagttggtgtcctgccctcccaactttctatcctcccctcctgccctgtgtccatccctcatccctcccaaccacagtgggagccagactgaatatagcgacatcattcataaatctcatccaacacaaagggagatgggatgagggccatcctgggtctgttcccatggagtttttggtgctgggtaggcaggaatcccctccctaccccacctcccaagtaggggcatggtcagcacacctagggtatgggcagtgcttaggcactccatatcctggctttgggaagccggggtttcttgcctcagccggcttcttgctacttccactctgctttgagactggagtttctgctattctccctctgctggaggcagggagctctcactgtgcaaggttggggggtgggcaaaggggtgaatcactaaactgctgtgacatcagaaactgatgccttggtgtagagcaaggaagcacttcttcccaagagggtcggagaaggaaaagcctctgggagcacattctgctgtcatcacagtccttggcttctctgggccctcctctcctcctcacagctctcacctgtccaaagaggcatctggttctctcatgtggatggatggactctggggttcctctttggagtggcatcccatgatgctgtttctagaccctctctgatcaaaccagagcctgcatcccactgagcatctgaactgtcctcagggagaggagcccacagccttcttcccaactcattctagaccagctcaaagattccatgagtttcatcgagtcactgtgagtggagcccatgctgggctctgtgccctctgtgtctgtgcatgcgcgtgtgtgtgtgggcgtgtgtgcattgctgggccagcttgaagggaaggcccgtcatgtccctgcactctgttttgcaagatgccaaaccccagttctgatggggctccaacagccaggctgtggtcctttgacgttcctcacctgttgccaacctatcccgtagtgaactgaaaccccaatgaagacagaactgtgcctggggagatgcaatgaggtgagggctgaactcatccttttatatttcttttcaagattggatcagagctcatctccatccagtcttgtttctatgaaggcttcaatctgtttccatgcaaatttgctaatcagagcccagagctgctgggtccctcatctccctcatctattatagattgacttacagcagggagagaatctctttagctcattcctaatggggttgggatcacaatatggtctggtccaatctgcatcttgttgtgtcccaagaccctatctcctccccaacattcttattgcctttggctcccagtaaggaacgaattgggggccagggaggagaacaggggggatcaagaagggaaacccaattccccctttgaaagtgggttctttgaactatgtgtttgggggaagttcctctggatactaatttgaatttatatacctcatgttttgggggtttgacgtatatatatatatatatatatatgcatatatatttcataatatttggaaggtttttgatgctagaaaaatggaaacaagagaaccttcaaaaatggtacttagatgggaactggaggccaatctttcataaagccagccccatagctgcttgctgttaggcctccagccattttgacattggggtggatagtcgattcacctgcctgtcagtcgattcacctgcctgtcacccagttctgtggatgtgctggtgctgagcctttgctctctttccaaatggttacagggatgttgatcagctccaccagagggagctctgatgggaggaattgctctgccatccttgtccctgtgtctcctgtcggcaggcagccattgtatctcaccagcagaccaggagactggtcccaaggttactgcaccacagggcaatttcctgccatagttaggaaggaaacacctgaactaaatggaagagacatccctgcggtgtttaatatcacacccatgccctttgtcaggttaccatgtacagagattacttggagagcctcatgccgtctctaccttcgcacactggtcaagtatctgctgagcttcttggccgcaaggatgcagaaataggctgagggtccatgggaagaaagacacaatgaggcagtaggaggtggggaagaaaagaagacagactttcaaaatggaattaggcactggggagagatcagtttccccacatcagggagaagaaggtataggtggggaagggggtggccaggagcagaaggaagaagactcaagatggaaagggagccgctgtgcctgtggcaataccacttggagaggtcgacttcataccttcaagccttttcccctgggcttttgattgtgtctgtgccccctttcttgtcctctctgcagatgcccagtaggggctacctcatcctcgtgctgttcttgtgtggctttctgggcagtagggatcttgaatttcctttctaacactgtgcccggcaaggcggggagcattcctctgccctttgtcttgtgccaacctggaaaggtgcagtctagatttcagtgagaaccctgccagctgagccctgtgcatctactaccttgacacagagtgttttcccactagaagctctgctctgctctcctggcccaagtaggggattccatgccttccctttcatggtcttagcaccagcagcctagtttctcccttccagagtctccagggatgacaaattggattggagacaaacctcgtcagatgctcatcccctaaaaggttaattgtgtatttgtggctgcgtgtgcctttgtgttttcattctcttcccatttttgtacattttggtcttctctgtggttttatacttggtcaaaagtactcgtcttggtattgcactgttgtgtgcatgagaaaactgggggaaggctcactggtacaagaaaggacccctgacccctttccttctctgtggtccccggcattagattgggggttctgggagaggcaggtgaatgtcctaagtgaattgttctgtttgtaactggaatgtttttgaagtctttggtgttgctccgtgaaaggacatcgccacctggtgctcatgaggtgtctttgcagaacaataaatggcaaatgaacaaccacaaaa

SEQ ID NO: 442390 - DNA, 4868 bp, Homo sapiens
caaggcgggggcctgtttgcagagagccgggcatttgcatgaagcgactcgaccccacggagcagcggcagcagcagcggaccccggcggcggcggcggcgcgcggtcccagccaggcggccccggtgtcccggccccggtggatgcacggctggggaggagcccatgggccggagctgaggctgcccggggcggcggggcgcggggcagggggcgcggtcgaggcccggaggcggcggcgcaggaggaagcggaggaggtcgggcgctcggggcccgggaggcgggccgcgcagcgccgcagccccgggctcgccatgctcctggcctcggccgtggtggtctgggaatggctgaacgagcacggccgctggcgtccctacagcccagcggtgagccaccacatcgaggcggtggtccgcgccggcccccgcgcggggggcagcgtggtgctgggccaggtggacagccgtctcgcgccctacatcatcgacctgcagtccatgaaccagttccgccaagacacgggaactctccgcccagttcgccgcaactactacgacccctcctcggcccctgggaagggcgtggtgtgggagtgggagaacgacaatggctcctggacgccctacgacatggaagtgggcatcaccatccagcatgcctatgagaagcagcacccctggatcgacctcacttccattggctttagctacgtaattgacttcaacaccatgggccagatcaaccgtcagacccagcgccaacgccgcgtccgccggcgcctcgacctcatctaccccatggtcacagggaccttgcctaaggctcagtcctggccagtcagccctgggccagccacctcgccccccatgtccccctgctcctgtccccagtgtgtcttggtgatgagtgttaaggcagccgtggtcaatggcagcactgggcccctacagctgccagtgacccgcaagaacatgccgcctcctggagtggtcaagctacccccactgccaggctctggggccaagccactggacagcacaggcaccattcgaggcccactgaagaccgccccatcgcaggtgatccggagacaagcctccagcatgcccactgggacaaccatgggctctcctgccagtcccccaggacccaacagcaagaccggaagggtggccctggccaccttgaatcgtaccaacctgcagcgactggccattgcccagtcccgggtgctgatcgcctctggggtccccacagtcccagtgaagaacctaaatgggtccagtcctgtcaaccctgccttggcaggaatcactgggatcctcatgagtgcagcggggctgcctgtgtgtctcaccaggccaccaaagctggtcctacacccaccccccgtcagcaagagtgaaataaaatccatcccaggggtttccaacacaagccgcaagaccaccaaaaaacaagccaagaaaggtaaaaccccagaggaagtgctaaaaaaatatctacagaaagtccggcacccaccagatgaggactgcaccatctgtatggaacgcctcacggccccctcaggctacaagggcccgcagcctacggtaaaacctgacctggtagggaagctgtccagatgcggccacgtctaccacatctactgcttggttgccatgtacaacaatgggaacaaggatggaagtttgcagtgtccaacctgcaagaccatttatggggtgaagacaggcacccaacctccagggaagatggagtaccacctcatcccccactccttgcctggccacccagactgcaaaaccatccggatcatctacagcatcccccccggcattcagggaccggaacacccgaatcctgggaagagtttcagcgcccgaggcttcccacgacactgttaccttccggacagcgagaaagggagaaaagttctgaagctgctgctcgtggcctgggatcgccgcctcatttttgccattggcacctccagcaccacaggcgagtcagacaccgtcatctggaatgaggtccaccacaagacagagtttggctctaatctcactggccatggctacccagatgccaattacctggataatgtgctggctgaactggctgcccagggcatctctgaggacagcactgcccaggagaaggactgaggccagaaaagctttgaggtgggaggggccatggagactgcaggacaggaagtgaggagagtgagtcaatgtagaagaagttggtgtcctgccctcccaactttctatcctcccctcctgccctgtgtccatccctcatccctcccaaccacagtgggagccagactgaatatagcgacatcattcataaatctcatccaacacaaagggagatgggatgagggccatcctgggtctgttcccatggagtttttggtgctgggtaggcaggaatcccctccctaccccacctcccaagtaggggcatggtcagcacacctagggtatgggcagtgcttaggcactccatatcctggctttgggaagccggggtttcttgcctcagccggcttcttgctacttccactctgctttgagactggagtttctgctattctccctctgctggaggcagggagctctcactgtgcaaggttggggggtgggcaaaggggtgaatcactaaactgctgtgacatcagaaactgatgccttggtgtagagcaaggaagcacttcttcccaagagggtcggagaaggaaaagcctctgggagcacattctgctgtcatcacagtccttggcttctctgggccctcctctcctcctcacagctctcacctgtccaaagaggcatctggttctctcatgtggatggatggactctggggttcctctttggagtggcatcccatgatgctgtttctagaccctctctgatcaaaccagagcctgcatcccactgagcatctgaactgtcctcagggagaggagcccacagccttcttcccaactcattctagaccagctcaaagattccatgagtttcatcgagtcactgtgagtggagcccatgctgggctctgtgccctctgtgtctgtgcatgcgcgtgtgtgtgtgggcgtgtgtgcattgctgggccagcttgaagggaaggcccgtcatgtccctgcactctgttttgcaagatgccaaaccccagttctgatggggctccaacagccaggctgtggtcctttgacgttcctcacctgttgccaacctatcccgtagtgaactgaaaccccaatgaagacagaactgtgcctggggagatgcaatgaggtgagggctgaactcatccttttatatttcttttcaagattggatcagagctcatctccatccagtcttgtttctatgaaggcttcaatctgtttccatgcaaatttgctaatcagagcccagagctgctgggtccctcatctccctcatctattatagattgacttacagcagggagagaatctctttagctcattcctaatggggttgggatcacaatatggtctggtccaatctgcatcttgttgtgtcccaagaccctatctcctccccaacattcttattgcctttggctcccagtaaggaacgaattgggggccagggaggagaacaggggggatcaagaagggaaacccaattccccctttgaaagtgggttctttgaactatgtgtttgggggaagttcctctggatactaatttgaatttatatacctcatgttttgggggtttgacgtatatatatatatatatatatatgcatatatatttcataatatttggaaggtttttgatgctagaaaaatggaaacaagagaaccttcaaaaatggtacttagatgggaactggaggccaatctttcataaagccagccccatagctgcttgctgttaggcctccagccattttgacattggggtggatagtcgattcacctgcctgtcagtcgattcacctgcctgtcacccagttctgtggatgtgctggtgctgagcctttgctctctttccaaatggttacagggatgttgatcagctccaccagagggagctctgatgggaggaattgctctgccatccttgtccctgtgtctcctgtcggcaggcagccattgtatctcaccagcagaccaggagactggtcccaaggttactgcaccacagggcaatttcctgccatagttaggaaggaaacacctgaactaaatggaagagacatccctgcggtgtttaatatcacacccatgccctttgtcaggttaccatgtacagagattacttggagagcctcatgccgtctctaccttcgcacactggtcaagtatctgctgagcttcttggccgcaaggatgcagaaataggctgagggtccatgggaagaaagacacaatgaggcagtaggaggtggggaagaaaagaagacagactttcaaaatggaattaggcactggggagagatcagtttccccacatcagggagaagaaggtataggtggggaagggggtggccaggagcagaaggaagaagactcaagatggaaagggagccgctgtgcctgtggcaataccacttggagaggtcgacttcataccttcaagccttttcccctgggcttttgattgtgtctgtgccccctttccttctctgtggtccccggcattagattgggggttctgggagaggcaggtgaatgtcctaagtgaattgttctgtttgtaactggaatgtttttgaagtctttggtgttgctccgtgaaaggacatcgccacctggtgctcatgaggtgtctttgcagaacaataaatggcaaatgaacaaccacaaaa

SEQ ID NO: 442391 - DNA, 308 bp, Homo sapiens
cccccgtcagcaagagtgaaataaaatccatcccaggggtttccaacacaagccgcaagaccaccaaaaaacaagccaagaaaggtaccagcctcttgtctcgtggggtactgagagtcaaagacttggctgtcagccctgagtctgcctcaacctccaagggtcatagccacggcttcaccctctgtgcctcaatttctgcatctgtaagtgggcctaaccagtaaatcttgacgattataccacagctgatgtgtatggatcagatggaaacaccttgagaaataaaaatatacaatgcaaaagta

SEQ ID NO: 442392 - DNA, 184 bp, Homo sapiens
ccaaggttgtgcagggacatcttattgactgcctccttctctgccatcctgtagaggaccgaagcagagggtgctgtttcaacgccaccaccaggagagaggcagaggggctgtgccgtgctagagtcctcagggagggagtgacctcgaccctggctgtgctgcaagctgactccagccttgg

SEQ ID NO: 442393 - DNA, 3266 bp, Homo sapiens
tggggatcccgccgccgggccgcagcatggggcgcttccgcgggggcctgcggtgcatcaagtacctgctgcttggcttcaacctgctcttctggctggctggatcggccgtcattgcttttggactatggtttcggttcggaggtgccataaaggagttatcatcagaggacaagtccccagagtatttctatgtggggctgtatgttctggttggagccggggccctgatgatggccgtggggttcttcgggtgctgcggaccatgcgggagtcgcaatgtgtgcttggatcattttttacctgcctcctggtgatatttgctgctgaagtaaccactggagtatttgcttttataggcaagggggtagctatccgacatgttcagaccatgtatgaagaggcttacaatgattaccttaaagacaggggaaaaggcaatgggacactcatcaccttccactcaacatttcagtgctgtggaaaagaaagctccgaacaggtccaacctacatgcccaaaggagcttctaggacacaagaattgcatcgatgaaattgagaccataatcagtgttaagctccagctcattggaattgtcggtattggaattgcaggtctgacgatctttggcatgatattcagcatggtcctctgctgtgcgatacgaaactcacgagatgtgatatgaagctacttctacatgaaaattgcaatctaaagctttcataccaaatgtcacaggagctgtctcccagctcatttttaacactgaaatgacattaggatctaaaataatttgctgtcaattgtacatttgcatgagtacgtatgtttggctcattactggtttaccccttgagtgaatgcctgtttatgatgactgagagcatattcatgtgtgatctgcgtgtttctggaatatgctttatacgtaatgaaatctgtttgctgggaattcctgattcttgttatataagaagaacaacctatttcgctcccagaaaaaaaagatcaaagagctttcagaaactttgagaacttggctatttagaaaaagtgataatgggtcagtttctcagactgtagccattgaaaattagatgcagagaattcagagatttcttcttaatggaagtaataagctgtaagaattgagagatcacaatggagtgttaaaactgactgtgtctaagttgggtgtaagggtttcctgggtttttttatatacatgctctccccagaatacagtaaaccacagttttagaactaaacacatctgtaaaactaaatatagcatggaaaatccaatttgaataagtcatgctttcctagaatttaaaaataaaaaagtcttcctctggaaagagaagtcacacagacaatcatgtgccctataaaagtgagtgtttataggactaaaaaacttttaacaactttttaaggaaatatttttgttcttatacaaaaacatgtaaatattgctttattactttcattttctgaccctgctgtaaactactgcaaccctcacatcctcaaagggacttttatgtcaaactcttctgtttctccaaatataaggaaaaaagactaaagcaagagatctggcagttgaaaattgtgggaaagagaatttgtatgggcactgtatctatgaaatacctcataacttacgtttacatgttttcctaactttttgtatttttcttgtatagccacctagagaattcttcatagattaagaactacagttttcaccacttaacataagtaaaacaaagtccttcataatttaaccattagcatctttggccaaaccaaaataaagaaaagcatcttctcctagttgtgtgtgggcaacagaaacaagttaaggaaacaaaaatacttatatatacacagaacaaaaataatgttctttttatgcaaatcccctgtgaaaataaaattttcaatgtttttttggtcttaacgcttcattttaacttagtaaacccaaatttaggatttacattggcaaatttttcagtgatttttaacgtgttacatttagtaaaccatagattttttaaaaactacattttgtaaggccacacataagtgaaaatacggaaggctttggaaacccccagatgaacttctatacatgtgaaaacacaagtctttgagtgtgcactaaaagtgtcacactcccaaaaaactcacaaaacattttgctaaaaagatatgactgcttgaaatagtctctctcccatggagaaccacatttctctttctgccatacttgctactgctactgattttggaggaaatttttctagaagaacaaaggtcatatttgaggcaagctaaaaacttaattatacatggctactttactgtgtctgtagctaaagaaaaattattttacaaaaattacttcatgaaatatagtttgtaccccagtagttgagaaatgtgaccttttaggcaaagaacaggcagtccatctctcttagctttagtttatctctctgcctgaagacaggaaacaggcccaagtgcatactcgggttctttccaactcagaatcatctctgattccacaaaagtgagtttagtttcctatctgaattaacaactttaaaggagactataatagttaaaagtggaagaatagaaataaataaatttaaaatgaaattaattaaagtagaagagaagggttctgttccatgtacgattaatgtgccccttttggagataagctttccaaaatatgcgtatgagtaaaattagagaattccaccactaagcaacaatagattttatatgtgtgtgtggatatatatacacacacacacagaaagatgaatatatatatatatatatctgtataaatagacacacatataatatatatagatatataatccctatatatcttgaatctacaaatatctttatatgtatataatttgaatatatacatgtatgtatatacagatgtgtgtgtatatatatatatacatacacatatacataaattttcagctatttctgttcccctgaactaatttgagattagacccaaacatgcttttaaatgtctcatgccaaggcactgaattaagacttcttaatgttgaaatattttaagtgatttcatattaaattttctatatactgaaattgcttgtttgatttatcttaaagtcctattatatctttctacaaaccttcacgcaacttatctaaatgtcaaactaccaatcaaataatgt

SEQ ID NO: 442394 - DNA, 2994 bp, Homo sapiens
atgaagggtcacaggagatggctacactcccttctggaacattcagtgggactgtgctgtccgtggagtgctcagagctacatgcagttaatcacagaaggcttacagaggagatgggccaggccagagttattctgattttttagacactgtgatatgaagaagtagctgtgaattcctgggccaggtgttttcagtttcagtgctgtggaaaagaaagctccgaacaggtccaacctacatgcccaaaggagcttctaggacacaagaattgcatcgatgaaattgagaccataatcagtgttaagctccagctcattggaattgtcggtattggaattgcaggtctgacgatctttggcatgatattcagcatggtcctctgctgtgcgatacgaaactcacgagatgtgatatgaagctacttctacatgaaaattgcaatctaaagctttcataccaaatgtcacaggagctgtctcccagctcatttttaacactgaaatgacattaggatctaaaataatttgctgtcaattgtacatttgcatgagtacgtatgtttggctcattactggtttaccccttgagtgaatgcctgtttatgatgactgagagcatattcatgtgtgatctgcgtgtttctggaatatgctttatacgtaatgaaatctgtttgctgggaattcctgattcttgttatataagaagaacaacctatttcgctcccagaaaaaaaagatcaaagagctttcagaaactttgagaacttggctatttagaaaaagtgataatgggtcagtttctcagactgtagccattgaaaattagatgcagagaattcagagatttcttcttaatggaagtaataagctgtaagaattgagagatcacaatggagtgttaaaactgactgtgtctaagttgggtgtaagggtttcctgggtttttttatatacatgctctccccagaatacagtaaaccacagttttagaactaaacacatctgtaaaactaaatatagcatggaaaatccaatttgaataagtcatgctttcctagaatttaaaaataaaaaagtcttcctctggaaagagaagtcacacagacaatcatgtgccctataaaagtgagtgtttataggactaaaaaacttttaacaactttttaaggaaatatttttgttcttatacaaaaacatgtaaatattgctttattactttcattttctgaccctgctgtaaactactgcaaccctcacatcctcaaagggacttttatgtcaaactcttctgtttctccaaatataaggaaaaaagactaaagcaagagatctggcagttgaaaattgtgggaaagagaatttgtatgggcactgtatctatgaaatacctcataacttacgtttacatgttttcctaactttttgtatttttcttgtatagccacctagagaattcttcatagattaagaactacagttttcaccacttaacataagtaaaacaaagtccttcataatttaaccattagcatctttggccaaaccaaaataaagaaaagcatcttctcctagttgtgtgtgggcaacagaaacaagttaaggaaacaaaaatacttatatatacacagaacaaaaataatgttctttttatgcaaatcccctgtgaaaataaaattttcaatgtttttttggtcttaacgcttcattttaacttagtaaacccaaatttaggatttacattggcaaatttttcagtgatttttaacgtgttacatttagtaaaccatagattttttaaaaactacattttgtaaggccacacataagtgaaaatacggaaggctttggaaacccccagatgaacttctatacatgtgaaaacacaagtctttgagtgtgcactaaaagtgtcacactcccaaaaaactcacaaaacattttgctaaaaagatatgactgcttgaaatagtctctctcccatggagaaccacatttctctttctgccatacttgctactgctactgattttggaggaaatttttctagaagaacaaaggtcatatttgaggcaagctaaaaacttaattatacatggctactttactgtgtctgtagctaaagaaaaattattttacaaaaattacttcatgaaatatagtttgtaccccagtagttgagaaatgtgaccttttaggcaaagaacaggcagtccatctctcttagctttagtttatctctctgcctgaagacaggaaacaggcccaagtgcatactcgggttctttccaactcagaatcatctctgattccacaaaagtgagtttagtttcctatctgaattaacaactttaaaggagactataatagttaaaagtggaagaatagaaataaataaatttaaaatgaaattaattaaagtagaagagaagggttctgttccatgtacgattaatgtgccccttttggagataagctttccaaaatatgcgtatgagtaaaattagagaattccaccactaagcaacaatagattttatatgtgtgtgtggatatatatacacacacacacagaaagatgaatatatatatatatatatctgtataaatagacacacatataatatatatagatatataatccctatatatcttgaatctacaaatatctttatatgtatataatttgaatatatacatgtatgtatatacagatgtgtgtgtatatatatatatacatacacatatacataaattttcagctatttctgttcccctgaactaatttgagattagacccaaacatgcttttaaatgtctcatgccaaggcactgaattaagacttcttaatgttgaaatattttaagtgatttcatattaaattttctatatactgaaattgcttgtttgatttatcttaaagtcctattatatctttctacaaaccttcacgcaacttatctaaatgtcaaactaccaatcaaataatgt

SEQ ID NO: 442395 - DNA, 3182 bp, Homo sapiens
tggggatcccgccgccgggccgcagcatggggcgcttccgcgggggcctgcggtgcatcaagtacctgctgcttggcttcaacctgctcttctggctggctggatcggccgtcattgcttttggactatggtttcggttcggaggtgccataaaggagttatcatcagaggacaagtccccagagtatttctatgtggggctgtatgttctggttggagccggggccctgatgatggccgtggggttcttcgggtgctgcggaccatgcgggagtcgcaatgtgtgcttggatcattttttacctgcctcctggtgatatttgctgctgaagtaaccactggagtatttgcttttataggcaagggggtagctatccgacatgttcagaccatgtatgaagaggcttacaatgattaccttaaagacaggggaaaaggcaatgggacactcatcaccttccactcaacatttcagtgctgtggaaaagaaagctccgaacaggtccaacctacatgcccaaaggagcttctaggacacaagatctttggcatgatattcagcatggtcctctgctgtgcgatacgaaactcacgagatgtgatatgaagctacttctacatgaaaattgcaatctaaagctttcataccaaatgtcacaggagctgtctcccagctcatttttaacactgaaatgacattaggatctaaaataatttgctgtcaattgtacatttgcatgagtacgtatgtttggctcattactggtttaccccttgagtgaatgcctgtttatgatgactgagagcatattcatgtgtgatctgcgtgtttctggaatatgctttatacgtaatgaaatctgtttgctgggaattcctgattcttgttatataagaagaacaacctatttcgctcccagaaaaaaaagatcaaagagctttcagaaactttgagaacttggctatttagaaaaagtgataatgggtcagtttctcagactgtagccattgaaaattagatgcagagaattcagagatttcttcttaatggaagtaataagctgtaagaattgagagatcacaatggagtgttaaaactgactgtgtctaagttgggtgtaagggtttcctgggtttttttatatacatgctctccccagaatacagtaaaccacagttttagaactaaacacatctgtaaaactaaatatagcatggaaaatccaatttgaataagtcatgctttcctagaatttaaaaataaaaaagtcttcctctggaaagagaagtcacacagacaatcatgtgccctataaaagtgagtgtttataggactaaaaaacttttaacaactttttaaggaaatatttttgttcttatacaaaaacatgtaaatattgctttattactttcattttctgaccctgctgtaaactactgcaaccctcacatcctcaaagggacttttatgtcaaactcttctgtttctccaaatataaggaaaaaagactaaagcaagagatctggcagttgaaaattgtgggaaagagaatttgtatgggcactgtatctatgaaatacctcataacttacgtttacatgttttcctaactttttgtatttttcttgtatagccacctagagaattcttcatagattaagaactacagttttcaccacttaacataagtaaaacaaagtccttcataatttaaccattagcatctttggccaaaccaaaataaagaaaagcatcttctcctagttgtgtgtgggcaacagaaacaagttaaggaaacaaaaatacttatatatacacagaacaaaaataatgttctttttatgcaaatcccctgtgaaaataaaattttcaatgtttttttggtcttaacgcttcattttaacttagtaaacccaaatttaggatttacattggcaaatttttcagtgatttttaacgtgttacatttagtaaaccatagattttttaaaaactacattttgtaaggccacacataagtgaaaatacggaaggctttggaaacccccagatgaacttctatacatgtgaaaacacaagtctttgagtgtgcactaaaagtgtcacactcccaaaaaactcacaaaacattttgctaaaaagatatgactgcttgaaatagtctctctcccatggagaaccacatttctctttctgccatacttgctactgctactgattttggaggaaatttttctagaagaacaaaggtcatatttgaggcaagctaaaaacttaattatacatggctactttactgtgtctgtagctaaagaaaaattattttacaaaaattacttcatgaaatatagtttgtaccccagtagttgagaaatgtgaccttttaggcaaagaacaggcagtccatctctcttagctttagtttatctctctgcctgaagacaggaaacaggcccaagtgcatactcgggttctttccaactcagaatcatctctgattccacaaaagtgagtttagtttcctatctgaattaacaactttaaaggagactataatagttaaaagtggaagaatagaaataaataaatttaaaatgaaattaattaaagtagaagagaagggttctgttccatgtacgattaatgtgccccttttggagataagctttccaaaatatgcgtatgagtaaaattagagaattccaccactaagcaacaatagattttatatgtgtgtgtggatatatatacacacacacacagaaagatgaatatatatatatatatatctgtataaatagacacacatataatatatatagatatataatccctatatatcttgaatctacaaatatctttatatgtatataatttgaatatatacatgtatgtatatacagatgtgtgtgtatatatatatatacatacacatatacataaattttcagctatttctgttcccctgaactaatttgagattagacccaaacatgcttttaaatgtctcatgccaaggcactgaattaagacttcttaatgttgaaatattttaagtgatttcatattaaattttctatatactgaaattgcttgtttgatttatcttaaagtcctattatatctttctacaaaccttcacgcaacttatctaaatgtcaaactaccaatcaaataatgt

SEQ ID NO: 442396 - DNA, 1963 bp, Homo sapiens
tggggatcccgccgccgggccgcagcatggggcgcttccgcgggggcctgcggtgcatcaagtacctgctgcttggcttcaacctgctcttctggctggctggatcggccgtcattgcttttggactatggtttcggttcggaggtgccataaaggagttatcatcagaggacaagtccccagagtatttctatgtggggctgtatgttctggttggagccggggccctgatgatggccgtggggttcttcgggtgctgcggaccatgcgggagtcgcaatgtgtgcttggatcattttttacctgcctcctggtgatatttgctgctgaagtaaccactggagtatttgcttttataggcaagggggtagctatccgacatgttcagaccatgtatgaagaggcttacaatgattaccttaaagacaggggaaaaggcaatgggacactcatcaccttccactcaacatttcagtgctgtggaaaagaaagctccgaacaggtccaacctacatgcccaaaggagcttctaggacacaagaattgcatcgatgaaattgagaccataatcagtgttaagctccagctcattggaattgtcggtattggaattgcaggtctgacgatctttggcatgatattcagcatggtcctctgctgtgcgatacgaaactcacgagatgtgatatgaagctacttctacatgaaaattgcaatctaaagctttcataccaaatgtcacaggagctgtctcccagctcatttttaacactgaaatgacattaggatctaaaataatttgctgtcaattgtacatttgcatgagtacgtatgtttggctcattactggtttaccccttgagtgaatgcctgtttatgatgactgagagcatattcatgtgtgatctgcgtgtttctggaatatgctttatacgtaatgaaatctgtttgctgggaattcctgattcttgttatataagaagaacaacctatttcgctcccagaaaaaaaagatcaaagagctttcagaaactttgagaacttggctatttagaaaaagtgataatgggtcagtttctcagactgtagccattgaaaattagatgcagagaattcagagatttcttcttaatggaagtaataagctgtaagaattgagagatcacaatggagtgttaaaactgactgtgtctaagttgggtgtaagggtttcctgggtttttttatatacatgctctccccagaatacagtaaaccacagttttagaactaaacacatctgtaaaactaaatatagcatggaaaatccaatttgaataagtcatgctttcctagaatttaaaaataaaaaagtcttcctctggaaagagaagtcacacagacaatcatgtgccctataaaagtgagtgtttataggactaaaaaacttttaacaactttttaaggaaatatttttgttcttatacaaaaacatgtaaatattgctttattactttcattttctgaccctgctgtaaactactgcaaccctcacatcctcaaagggacttttatgtcaaactcttctgtttctccaaatataaggaaaaaagactaaagcaagagatctggcagttgaaaattgtgggaaagagaatttgtatgggcactgtatctatgaaatacctcataacttacgtttacatgttttcctaactttttgtatttttcttgtatagccacctagagaattcttcatagattaagaactacagttttcaccacttaacataagtaaaacaaagtccttcataatttaaccattagcatctttggccaaaccaaaataaagaaaagcatcttctcctagttgtgtgtgggcaacagaaacaagttaaggaaacaaaaatacttatatatacacagaacaaaaataatgttctttttatgcaaatcccctgtgaaaataaaattttcaatgttt

SEQ ID NO: 442397 - DNA, 1000 bp, Homo sapiens
agtgacaactgcagccgcacgtgggctcggcgcgatggaggaggagatgcatactgacgccaaaatccgtgctgaaaatggaacagggtccagccctcggggtcctggctgcagcctccggcactttgcctgcgaacagaacctgctgtcgcggccagatggctctgcttccttcctgcaaggtgacacctctgtcctggcgggtgtgtacgggccggccgaggtgaaggtcagcaaagagattttcaacaaggccacactcgaagtgatcctgaggccgaagattgggctgcctggtgttgcagagaagagccgggagcggctgatcaggaacacgtgcgaggcggtggtgctgggcacgttgcacccccgcacctccatcaccgtggtgctgcaggttgtcagcgatgccggctctctcctggcctgttgtctgaatgccgcctgcatggcattggtggatgcaggtgtgcccatgcgggctctcttctgtggggtcgcctgcgccctggactctgatgggaccctcgtgctggatcctacatccaagcaagaaaaggaggcccgggcagtcctgacctttgccctggacagcgtggaacggaagctgctgatgtccagcaccaaggggctctactcagacactgagctccagcagtgcctggctgcggcccaggccgcttcgcaacacgtcttccgtttctaccgggaatcgctgcagaggcgttactccaagagctgaggcaagctggggcaaggggccgctcccattgcctccacccactcaccccctacagcctgaagcaaaccagcagcccagccttgcctctctgacccatgggctccttgagcctgcagctctgtaaccacagggctcctgtggggaggccttggcctgtgacagcccccaggcctgggggcacagatccccccagcaaggataacattcaaaggagctcacatttatggaatggatgaatcaataaattaattcacttta

SEQ ID NO: 442398 - DNA, 983 bp, Homo sapiens
  misc_feature (883)..(883): n is a, c, g, or t
agtgacaactgcagccgcacgtgggctcggcgcgatggaggaggagatgcatactgacgccaaaatccgtgctgaaaatggaacagggtccagccctcggggtcctggctgcagcctccggcactttgcctgcgaacagaacctgctgtcgcggccagatggctctgcttccttcctgcaaggtgacacctctgtcctggcgggtgtgtacgggccggccgaggtgaaggtcagcaaagagattttcaacaaggccacactcgaagtgatcctgaggccgaagattgggctgcctggtgttgcagagaagagccgggagcggctgatcaggaacacgtgcgaggcggtggtgctgggcacgttgcacccccgcacctccatcaccgtggtgctgcaggttgtcagcgatgccggctctctcctggcctgttgtctgaatgccgcctgcatggcattggtggatgcaggtgtgcccatgcgggctctcttctgtggggtcgcctgcgccctggactctgatgggaccctcgtgctggatcctacatccaagcaagaaaaggaggcccgggcagtcctgacctttgccctggacagcgtggaacggaagctgctgatgtccagcaccaaggggctctactcagacactgagctccagcagtgcctggctgcggcccaggccgcttcgcaacacgtcttccgtttctaccgggaatcgctgcagaggcgttactccaagagctgaggcaagctggggcaaggggccgctcccattgcctccacccactcaccccctacagcctgaagcaaaccagcagcccagccttgcctctctgacccatgggctccttgagcctgcagctctgtacaaggtcgggggggctgntgtgagcccagctggggcatcccagagtatcaggccttggggggtcaataatctaaaaaaaaccggttctgggaaaggaaaggggttgtccttgaagatg

SEQ ID NO: 442399 - DNA, 886 bp, Homo sapiens
agtgacaactgcagccgcacgtgggctcggcgcgatggaggaggagatgcatactgacgccaaaatccgtgctgaaaatggaacagggtccagccctcggggtcctggctgcagcctccggcactttgcctgcgaacagaacctgctgtcgcggccagatggctctgcttccttcctgcaaggtgttgcagagaagagccgggagcggctgatcaggaacacgtgcgaggcggtggtgctgggcacgttgcacccccgcacctccatcaccgtggtgctgcaggttgtcagcgatgccggctctctcctggcctgttgtctgaatgccgcctgcatggcattggtggatgcaggtgtgcccatgcgggctctcttctgtggggtcgcctgcgccctggactctgatgggaccctcgtgctggatcctacatccaagcaagaaaaggaggcccgggcagtcctgacctttgccctggacagcgtggaacggaagctgctgatgtccagcaccaaggggctctactcagacactgagctccagcagtgcctggctgcggcccaggccgcttcgcaacacgtcttccgtttctaccgggaatcgctgcagaggcgttactccaagagctgaggcaagctggggcaaggggccgctcccattgcctccacccactcaccccctacagcctgaagcaaaccagcagcccagccttgcctctctgacccatgggctccttgagcctgcagctctgtaaccacagggctcctgtggggaggccttggcctgtgacagcccccaggcctgggggcacagatccccccagcaaggataacattcaaaggagctcacatttatggaatggatgaatcaataaattaattcacttta

SEQ ID NO: 442400 - DNA, 852 bp, Homo sapiens
agtgacaactgcagccgcacgtgggctcggcgcgatggaggaggagatgcatactgacgccaaaatccgtgctgaaaatggaacagggtccagccctcggggtcctggctgcagcctccggcactttgcctgcgaacagaacctgctgtcgcggccagatggctctgcttccttcctgcaaggtgacacctctgtcctggcgggtgtgtacgggccggccgaggtgaaggtcagcaaagagattttcaacaaggccacactcgaagtgatcctgaggccgaagattgggctgcctgctgcatggcattggtggatgcaggtgtgcccatgcgggctctcttctgtggggtcgcctgcgccctggactctgatgggaccctcgtgctggatcctacatccaagcaagaaaaggaggcccgggcagtcctgacctttgccctggacagcgtggaacggaagctgctgatgtccagcaccaaggggctctactcagacactgagctccagcagtgcctggctgcggcccaggccgcttcgcaacacgtcttccgtttctaccgggaatcgctgcagaggcgttactccaagagctgaggcaagctggggcaaggggccgctcccattgcctccacccactcaccccctacagcctgaagcaaaccagcagcccagccttgcctctctgacccatgggctccttgagcctgcagctctgtaaccacagggctcctgtggggaggccttggcctgtgacagcccccaggcctgggggcacagatccccccagcaaggataacattcaaaggagctcacatttatggaatggatgaatcaataaattaattcacttta

SEQ ID NO: 442401 - DNA, 481 bp, Homo sapiens
agtgacaactgcagccgcacgtgggctcggcgcgatggaggaggagatgcatactgacgccaaaatccgtgctgaaaatggaacagggtccagccctcggggtcctggctgcagcctccggcactttgcctgcgaacagaacctgctgtcgcggccagatggctctgcttccttcctgcaaggtgacacctctgtcctggcgggtgtgtacgggccggccgaggtgaaggtcagcaaagagattttcaacaaggccacactcgaagtgatcctgaggccgaagattgggctgcctgcccagccttgcctctctgacccatgggctccttgagcctgcagctctgtaaccacagggctcctgtggggaggccttggcctgtgacagcccccaggcctgggggcacagatccccccagcaaggataacattcaaaggagctcacatttatggaatggatgaatcaataaattaattcacttta

SEQ ID NO: 442402 - DNA, 230 bp, Homo sapiens
gtgagtgaggccctccctgctgtctcctcaggtgacacctctgtcctggcgggtgtgtacgggccggccgaggtgaaggtcagcaaagagattttcaacaaggccacactcgaagtgatcctgaggccgaagattgggctgcctgcctggtaattgggccctgctgaacctctgagtggtgcccagtttgtcaaaatcacccccccagctcctccctaccagctgccccg

SEQ ID NO: 442403 - DNA, 363 bp, Homo sapiens
gcggggagggactgctattttccccattttacaaatgagagaaatgaagtgagtgctcaaagaatcagtaccaacaaatggcgggggtgacgtggggagccctggccgtcaggctcagtgccacaaatggggccccaggagcagggaagctgtgagtgaggccctccctgctgtctcctcaggtgacacctctgtcctggcgggtgtgtacgggccggccgaggtgaaggtcagcaaagagattttcaacaaggccacactcgaagtgatcctgaggccgaagattgggctgcctgcctggtaattgggccctgctgaacctctgagtggtgcccagtttgtcaaaatcacccccccagctcc

SEQ ID NO: 442404 - DNA, 310 bp, Homo sapiens
tctgagatggggtctccctctgttgcccagattggtcttgagtttctggcctcaagcagtgccctgccttggcctcccaaagtggtgagattatggtcatgagccactgtgcctggccaaaggactggctgagattttatctgaggggaaggtcctaggtcccccaccgccttctaccccttgtccctaggaggcccgggcagtcctgacctttgccctggacagcgtggaacggaagctgctgatgtccagcaccaaggggctctactcagacactgaggtaccagcatggggatgaggggaaaagcca

SEQ ID NO: 442405 - DNA, 986 bp, Homo sapiens
tcaaggcgcttcagtgggctggcgttggattggcatttcgtggccggcggtttgaccatgaaaatggaacagggtccagccctcggggtcctggctgcagcctccggcactttgcctgcgaacagaacctgctgtcgcggccagatggctctgcttccttcctgcaaggtgacacctctgtcctggcgggtgtgtacgggccggccgaggtgaaggtcagcaaagagattttcaacaaggccacactcgaagtgatcctgaggccgaagattgggctgcctggtgttgcagagaagagccgggagcggctgatcaggaacacgtgcgaggcggtggtgctgggcacgttgcacccccgcacctccatcaccgtggtgctgcaggttgtcagcgatgccggctctctcctggcctgttgtctgaatgccgcctgcatggcattggtggatgcaggtgtgcccatgcgggctctcttctgtggggtcgcctgcgccctggactctgatgggaccctcgtgctggatcctacatccaagcaagaaaaggaggcccgggcagtcctgacctttgccctggacagcgtggaacggaagctgctgatgtccagcaccaaggggctctactcagacactgagctccagcagtgcctggctgcggcccaggccgcttcgcaacacgtcttccgtttctaccgggaatcgctgcagaggcgttactccaagagctgaggcaagctggggcaaggggccgctcccattgcctccacccactcaccccctacagcctgaagcaaaccagcagcccagccttgcctctctgacccatgggctccttgagcctgcagctctgtaaccacagggctcctgtggggaggccttggcctgtgacagcccccaggcctgggggcacagatccccccagcaaggataacattcaaaggagctcacatttatggaatggatgaatcaataaattaattcacttta

SEQ ID NO: 442406 - DNA, 1066 bp, Homo sapiens
agtgacaactgcagccgcacgtgggctcggcgcgatggaggaggagatgcatactgacgccaaaatccgtgctgaaaatggaacagggtccagccctcggggtcctggctgcagcctccggcactttgcctgcgaacagaacctgctgtcgcggccagatggctctgcttccttcctgcaaggtgacacctctgtcctggcgggtgtgtacgggccggccgaggtgaaggtcagcaaagagattttcaacaaggccacactcgaagtgatcctgaggccgaagattgggctgcctgcaggggtcagtggatggcagtcaggccttgccttcttcccactggaatcttccatcatccctgcaggtgttgcagagaagagccgggagcggctgatcaggaacacgtgcgaggcggtggtgctgggcacgttgcacccccgcacctccatcaccgtggtgctgcaggttgtcagcgatgccggctctctcctggcctgttgtctgaatgccgcctgcatggcattggtggatgcaggtgtgcccatgcgggctctcttctgtggggtcgcctgcgccctggactctgatgggaccctcgtgctggatcctacatccaagcaagaaaaggaggcccgggcagtcctgacctttgccctggacagcgtggaacggaagctgctgatgtccagcaccaaggggctctactcagacactgagctccagcagtgcctggctgcggcccaggccgcttcgcaacacgtcttccgtttctaccgggaatcgctgcagaggcgttactccaagagctgaggcaagctggggcaaggggccgctcccattgcctccacccactcaccccctacagcctgaagcaaaccagcagcccagccttgcctctctgacccatgggctccttgagcctgcagctctgtaaccacagggctcctgtggggaggccttggcctgtgacagcccccaggcctgggggcacagatccccccagcaaggataacattcaaaggagctcacatttatggaatggatgaatcaataaattaattcacttta

SEQ ID NO: 442407 - DNA, 942 bp, Homo sapiens
  misc_feature (942)..(942): n is a, c, g, or t
agtgacaactgcagccgcacgtgggctcggcgcgatggaggaggagatgcatactgacgccaaaatccgtgctgaaaatggaacagggtccagccctcggggtcctggctgcagcctccggcactttgcctgcgaacagaacctgctgtcgcggccagatggctctgcttccttcctgcaaggtgacacctctgtcctggcgggtgtgtacgggccggccgaggtgaaggtcagcaaagagattttcaacaaggccacactcgaagtgatcctgaggccgaagattgggctgcctggtgttgcagagaagagccgggagcggctgatcaggaacacgtgcgaggcggtggtgctgggcacgttgcacccccgcacctccatcaccgtggtgctgcaggttgtcagcgatgccggctctctcctggcctgttgtctgaatgccgcctgcatggcattggtggatgcaggtgtgcccatgcgggctctcttctgtggggtcgcctgcgccctggactctgatgggaccctcgtgctggatcctacatccaagcaagaaaaggaggcccgggcagtcctgacctttgccctggacagcgtggaacggaagctgctgatgtccagcaccaaggggctctactcagacactgagctccagcagtgcctggctgcggcccaggccgcttcgcaacacgtcttccgtttctaccgggaatcgctgcagaggcgttactccaagagctgaggcaagctggggcaaggggccgctcccattgcctccacccactcacccctaagctggaaagaggagatcctctcaaaaaaaaaatccaaattccggcttgggcacccttggtccccctggagcgagggggggacctgcccgaagagtcggccaacggcccgccccggtcgggccttcccaaaaaaaaaagggggttcggn

SEQ ID NO: 442408 - DNA, 1207 bp, Homo sapiens
tataaacagactctgtgcagtgatggctaagggctcagattctagactcatacaaatctggtttatgtccagccctgctacttagaagctatgtgaccttggtcacaggggtttagggaagtgctgaggcaaggaagggcatttccagcagaggagctcttctgagaagcagaattagtgagaggttggtggcctgggtacatttaaggtgtggtgggaccttgtctggcatcatctaataaggctaccaggagtattatgggtttgttctggagtagttttcaaacgtggcatttggagtgaaggcaggcagcattgggcctcagattcagagtttctctatggaaattagatcaaaacctacaagagtcccagggaaaggtagggaggggcaagtgggaaagctgggagccctggagtcaggttgttctggctttgaaccccagcaatcccgatgcatagttgagaataggtactttgagtctctgttttctcatcggaaaatgggttggtcatgtcagtattgcatactgtgaagaccagaaacgatttatgtcaggggctttgcacacacaaataaggcactcaacaaatgtgggttgttatgaacccacagtggatggggaaacacatctgcctttgtggaagatgagagcagaatccctcctgaccattgttaagccatcagccttgctccttcccttggtttgtcactgctggagggactactgccagtactgcagtggggaaaatgagctttcaaaggtacgtttcttttatagagtgtccggtaggaattccctggggacatttatctcatggaaataggagaaggactgactgggtatctcaaaaggtgactcttagtgactgagtctcttttctagaagaaaaggatgtttggattctcagcagccacatctgcttttgaactctgtgcggtttgtgccctggcctcttaccactcccaacactcccccttttattcaaacagaggacagttgtgtttgttgaccactctttcagggtgggaaaggaatgtaatgtatgcatagactgcccagaatttcctgttagacacccattccaaaccacggccctgggatgcattccagagattacggcccaattctcaaagagaagaaatggcgcattcatttaaatgtccctggccttcagaaagagttcctcctctccccagttaaaa

SEQ ID NO: 442409 - DNA, 437 bp, Homo sapiens
aaaataccatatttgggctgtaattgtatcaactcactaggatgacactggtcatcttccacggatgaagaactcattgacaattataaatggttttctttgcgtggttgcttagtaaatgcccttttttggtgcagtcttttaaagcgtgatgcagtgggagaaaacttaacccatgtagtccttgtggaggaaaagattaggaactattggtctacacagctgagtcctctcctggctgtccaagagaccctgacagagtgcagttgttttagattcagaagtctcagtgactctttggtggtcacccagttgccctgtgtcctttaacacagctctgttagtccctccttcccactctgacagaggggaaagtgccctccttggaagcctcagctgttctttaacggcaggcgccgtctctgtcacactgcaga

SEQ ID NO: 442410 - DNA, 2035 bp, Homo sapiens
  misc_feature (890)..(890): n is a, c, g, or t
  misc_feature (941)..(941): n is a, c, g, or t
gcgcggagctctgtgggcgggtggctgttgttggggccgtcgaggcggcggcgactctgcgtccccggctcctgatggaggcggggccgcatccccggccggggcactgctgcaagcctggggggcggctggacatgaaccacggcttcgtgcaccatatccgacggaaccagatcgctcggtaccgccccgccctgcgccgccgccgccaccactcctggcctggcctggcccggcccgacagtccctgactcccgctcggctccccgcagggacgactatgacaagaaggtgaagcaggcggccaaggagaaggtgaggaggcggcacacgcccgcgccgacgcggccccgcaagccagacctgcaggtgtacctgccgcgacaccgaggtgaggccgcccgccccgcctgcctccagcccgcgcgctcttcctgcaacgcactccccttctctatagggaaaaaccacttcttactcctaaggttcagctcatctcgtctctttccggaacctccacctcagcgctcccaaatctccgctgaatgattctcaccaagaactgggacgactcataagcccccagttaagcatcgctgtcagagtatcggggagccagcaagaagtttatctgccggtttgccccaccgtgctgtattttagtaaggtgctccgctacctagcaaagagaaagtctggcacagcgatgagcgaccagcacataattgcggaatgaacccagtaaatggcctttccccagcttctctgctacctagagatcacactggttaatatatgacggtcaatttttgttaagcattattactttttttaaaatgtttttattttatttttgagactaggtctctgtcgcccaggctggagtgcantggtgcgatctgggcttactgcagccttagcctcccgagtacctgggaccncaggcgtgtgccaccacaccggttaattttggtatttcttgtagagaaggggtttccccggctgggcgcggtggctctcgcctgtaatcccagcactttgggaggccgaggcgggcggatcacgaggtcaggagatcgagaccatcctggctaacatggtgaaaccccgtctctactaaaaatacaaaaaattagccgggcgtggtggtgggcgcctgtagtcccagctactcgggaggctgaggcaggagaatggcgtgaacccgggaggcggagcttgcagtgagccgagatcgcgccactgcactccagcctgggcaacacagcaagactcggtctcaaaaaaaaaaaaaaaaagagagagagagaaggggtttctccacgttgtccaggctgatctcgaactcctgagctcaggtgatctgcccgcatcggcctcccaaagtgctgggattataggtgtgtgccactacctttgttaggcattagtgaaagtgcttttagatcttacgtatattaattcattgagtctttatacaacctcataagaaagcttctgtctgtttcacagtcaggaaacaggcacagagaggttaaacaacttgcccaagatctcagctagtaaatggcagagcctggatttgaacccaggcagagctctatccacccttctgctttccagtactttttgctagacaaatgtgcattgtgtacctactgtgtgacaggattgtgctggcctcagagcagggatgcaaaggtaaataagtccttgattggcagcacaccaaatgcttacactggtccgggcgcggtgattcatgcctgtgatcctagcagtttgggaggccgaggtgggcggatcccttgaggccaggagttcgaaattaacctggacaacatggtgaaaccccatctctactaaaaatacaaaaattagccaggcatgatggcaggcggctgtaatcccagctacttgggaggctgaggaaggagaattgcttgaacctgggaggcagaggttgcggtgagccgagatttagccactgcactccagcctgggcaacagagcaagactccgtctcaaaaaaaaa

SEQ ID NO: 442411 - DNA, 841 bp, Homo sapiens
gcgcggagctctgtgggcgggtggctgttgttggggccgtcgaggcggcggcgactctgcgtccccggctcctgatggaggcggggccgcatccccggccggggcactgctgcaagcctggggggcggctggacatgaaccacggcttcgtgcaccatatccgacggaaccagatcgctcgggacgactatgacaagaaggtgaagcaggcggccaaggagaaggtgaggaggcggcacacgcccgcgccgacgcggccccgcaagccagacctgcaggtgtacctgccgcgacaccgagatgtctctgcccacccacgcaacccagactatgaagagtccggtgaaagcagcagtagtggaggctctgagctggagccttctggccatcagctcttctgcttagaatacgaggcagacagtggagaggtcacatcagttatcgtctatcagggtgatgacccaggaaaggtgagtgagaaggtgtcggcacacacgcctctggatccacccatgcgagaagccctcaagttgcgtatccaggaggagattgcaaagcgccagagccaacactgaccatgttgaaggcgttctctccaggctggattcactgcactcggaagaattctgcccagggaatttagtgtgggggtaccaggaccagtttgtctgatcttgagacccccagagctgctgcatccatagggtgttgcaggactacacctggcctgccttgcaggtcattctttcttatatgttgacccatttgcccagcctgatatgcctggagtctcttgcttctagaaacacctttagccaagacaagaatctcgagcagaaac

SEQ ID NO: 442412 - DNA, 1850 bp, Homo sapiens
  misc_feature (705)..(705): n is a, c, g, or t
  misc_feature (756)..(756): n is a, c, g, or t
gcgcggagctctgtgggcgggtggctgttgttggggccgtcgaggcggcggcgactctgcgtccccggctcctgatggaggcggggccgcatccccggccggggcactgctgcaagcctggggggcggctggacatgaaccacggcttcgtgcaccatatccgacggaaccagatcgctcgggacgactatgacaagaaggtgaagcaggcggccaaggagaaggtgaggaggcggcacacgcccgcgccgacgcggccccgcaagccagacctgcaggtgtacctgccgcgacaccgaggttcagctcatctcgtctctttccggaacctccacctcagcgctcccaaatctccgctgaatgattctcaccaagaactgggacgactcataagcccccagttaagcatcgctgtcagagtatcggggagccagcaagaagtttatctgccggtttgccccaccgtgctgtattttagtaaggtgctccgctacctagcaaagagaaagtctggcacagcgatgagcgaccagcacataattgcggaatgaacccagtaaatggcctttccccagcttctctgctacctagagatcacactggttaatatatgacggtcaatttttgttaagcattattactttttttaaaatgtttttattttatttttgagactaggtctctgtcgcccaggctggagtgcantggtgcgatctgggcttactgcagccttagcctcccgagtacctgggaccncaggcgtgtgccaccacaccggttaattttggtatttcttgtagagaaggggtttccccggctgggcgcggtggctctcgcctgtaatcccagcactttgggaggccgaggcgggcggatcacgaggtcaggagatcgagaccatcctggctaacatggtgaaaccccgtctctactaaaaatacaaaaaattagccgggcgtggtggtgggcgcctgtagtcccagctactcgggaggctgaggcaggagaatggcgtgaacccgggaggcggagcttgcagtgagccgagatcgcgccactgcactccagcctgggcaacacagcaagactcggtctcaaaaaaaaaaaaaaaaagagagagagagaaggggtttctccacgttgtccaggctgatctcgaactcctgagctcaggtgatctgcccgcatcggcctcccaaagtgctgggattataggtgtgtgccactacctttgttaggcattagtgaaagtgcttttagatcttacgtatattaattcattgagtctttatacaacctcataagaaagcttctgtctgtttcacagtcaggaaacaggcacagagaggttaaacaacttgcccaagatctcagctagtaaatggcagagcctggatttgaacccaggcagagctctatccacccttctgctttccagtactttttgctagacaaatgtgcattgtgtacctactgtgtgacaggattgtgctggcctcagagcagggatgcaaaggtaaataagtccttgattggcagcacaccaaatgcttacactggtccgggcgcggtgattcatgcctgtgatcctagcagtttgggaggccgaggtgggcggatcccttgaggccaggagttcgaaattaacctggacaacatggtgaaaccccatctctactaaaaatacaaaaattagccaggcatgatggcaggcggctgtaatcccagctacttgggaggctgaggaaggagaattgcttgaacctgggaggcagaggttgcggtgagccgagatttagccactgcactccagcctgggcaacagagcaagactccgtctcaaaaaaaaa

SEQ ID NO: 442413 - DNA, 566 bp, Homo sapiens
ttcttactgtggttcatccttccagatgtctctgcccacccacgcaacccagactatgaagagtccggtgaaagcagcagtagtggaggctctgagctggagccttctggccatcagctcttctgcttagaatacgaggcagacagtggagaggtcacatcagttatcgtctatcagggtgatgacccaggaaaggtgagtgagaaggtgtcggcacacacgcctctggatccacccatgcgagaagccctcaagttgcgtatccaggaggagattgcaaagcgccagagccaacactgaccatgttgaaggcgttctctccaggctggattcactgcactcggaagaattctgcccagggaatttagtgtgggggtaccaggaccagtttgtctgatcttgagacccccagagctgctgcatccatagggtgttgcaggactacacctggcctgccttgcaggtcattctttcttatatgttgacccatttgcccagcctgatatgcctggagtctcttgcttctagaaacacctttagccaagacaagaatctcgagcagaaac

SEQ ID NO: 442414 - DNA, 1944 bp, Homo sapiens
  misc_feature (799)..(799): n is a, c, g, or t
  misc_feature (850)..(850): n is a, c, g, or t
gcgcggagctctgtgggcgggtggctgttgttggggccgtcgaggcggcggcgactctgcgtccccggctcctgatggaggcggggccgcatccccggccggggcactgctgcaagcctggggggcggctggacatgaaccacggcttcgtgcaccatatccgacggaaccagatcgctcgggacgactatgacaagaaggtgaagcaggcggccaaggagaaggtgaggaggcggcacacgcccgcgccgacgcggccccgcaagccagacctgcaggtgtacctgccgcgacaccgaggtgaggccgcccgccccgcctgcctccagcccgcgcgctcttcctgcaacgcactccccttctctatagggaaaaaccacttcttactcctaaggttcagctcatctcgtctctttccggaacctccacctcagcgctcccaaatctccgctgaatgattctcaccaagaactgggacgactcataagcccccagttaagcatcgctgtcagagtatcggggagccagcaagaagtttatctgccggtttgccccaccgtgctgtattttagtaaggtgctccgctacctagcaaagagaaagtctggcacagcgatgagcgaccagcacataattgcggaatgaacccagtaaatggcctttccccagcttctctgctacctagagatcacactggttaatatatgacggtcaatttttgttaagcattattactttttttaaaatgtttttattttatttttgagactaggtctctgtcgcccaggctggagtgcantggtgcgatctgggcttactgcagccttagcctcccgagtacctgggaccncaggcgtgtgccaccacaccggttaattttggtatttcttgtagagaaggggtttccccggctgggcgcggtggctctcgcctgtaatcccagcactttgggaggccgaggcgggcggatcacgaggtcaggagatcgagaccatcctggctaacatggtgaaaccccgtctctactaaaaatacaaaaaattagccgggcgtggtggtgggcgcctgtagtcccagctactcgggaggctgaggcaggagaatggcgtgaacccgggaggcggagcttgcagtgagccgagatcgcgccactgcactccagcctgggcaacacagcaagactcggtctcaaaaaaaaaaaaaaaaagagagagagagaaggggtttctccacgttgtccaggctgatctcgaactcctgagctcaggtgatctgcccgcatcggcctcccaaagtgctgggattataggtgtgtgccactacctttgttaggcattagtgaaagtgcttttagatcttacgtatattaattcattgagtctttatacaacctcataagaaagcttctgtctgtttcacagtcaggaaacaggcacagagaggttaaacaacttgcccaagatctcagctagtaaatggcagagcctggatttgaacccaggcagagctctatccacccttctgctttccagtactttttgctagacaaatgtgcattgtgtacctactgtgtgacaggattgtgctggcctcagagcagggatgcaaaggtaaataagtccttgattggcagcacaccaaatgcttacactggtccgggcgcggtgattcatgcctgtgatcctagcagtttgggaggccgaggtgggcggatcccttgaggccaggagttcgaaattaacctggacaacatggtgaaaccccatctctactaaaaatacaaaaattagccaggcatgatggcaggcggctgtaatcccagctacttgggaggctgaggaaggagaattgcttgaacctgggaggcagaggttgcggtgagccgagatttagccactgcactccagcctgggcaacagagcaagactccgtctcaaaaaaaaa

SEQ ID NO: 442415 - DNA, 1890 bp, Homo sapiens
  misc_feature (745)..(745): n is a, c, g, or t
  misc_feature (796)..(796): n is a, c, g, or t
gcgcggagctctgtgggcgggtggctgttgttggggccgtcgaggcggcggcgactctgcgtccccggctcctgatggaggcggggccgcatccccggccggggcactgctgcaagcctggggggcggctggacatgaaccacggcttcgtgcaccatatccgacggaaccagatcgctcggtaccgccccgccctgcgccgccgccgccaccactcctggcctggcctggcccggcccgacagtccctgactcccgctcggctccccgcagggacgactatgacaagaaggtgaagcaggcggccaaggagaagggaaaaaccacttcttactcctaaggttcagctcatctcgtctctttccggaacctccacctcagcgctcccaaatctccgctgaatgattctcaccaagaactgggacgactcataagcccccagttaagcatcgctgtcagagtatcggggagccagcaagaagtttatctgccggtttgccccaccgtgctgtattttagtaaggtgctccgctacctagcaaagagaaagtctggcacagcgatgagcgaccagcacataattgcggaatgaacccagtaaatggcctttccccagcttctctgctacctagagatcacactggttaatatatgacggtcaatttttgttaagcattattactttttttaaaatgtttttattttatttttgagactaggtctctgtcgcccaggctggagtgcantggtgcgatctgggcttactgcagccttagcctcccgagtacctgggaccncaggcgtgtgccaccacaccggttaattttggtatttcttgtagagaaggggtttccccggctgggcgcggtggctctcgcctgtaatcccagcactttgggaggccgaggcgggcggatcacgaggtcaggagatcgagaccatcctggctaacatggtgaaaccccgtctctactaaaaatacaaaaaattagccgggcgtggtggtgggcgcctgtagtcccagctactcgggaggctgaggcaggagaatggcgtgaacccgggaggcggagcttgcagtgagccgagatcgcgccactgcactccagcctgggcaacacagcaagactcggtctcaaaaaaaaaaaaaaaaagagagagagagaaggggtttctccacgttgtccaggctgatctcgaactcctgagctcaggtgatctgcccgcatcggcctcccaaagtgctgggattataggtgtgtgccactacctttgttaggcattagtgaaagtgcttttagatcttacgtatattaattcattgagtctttatacaacctcataagaaagcttctgtctgtttcacagtcaggaaacaggcacagagaggttaaacaacttgcccaagatctcagctagtaaatggcagagcctggatttgaacccaggcagagctctatccacccttctgctttccagtactttttgctagacaaatgtgcattgtgtacctactgtgtgacaggattgtgctggcctcagagcagggatgcaaaggtaaataagtccttgattggcagcacaccaaatgcttacactggtccgggcgcggtgattcatgcctgtgatcctagcagtttgggaggccgaggtgggcggatcccttgaggccaggagttcgaaattaacctggacaacatggtgaaaccccatctctactaaaaatacaaaaattagccaggcatgatggcaggcggctgtaatcccagctacttgggaggctgaggaaggagaattgcttgaacctgggaggcagaggttgcggtgagccgagatttagccactgcactccagcctgggcaacagagcaagactccgtctcaaaaaaaaa

SEQ ID NO: 442416 - DNA, 690 bp, Homo sapiens
gcgcggagctctgtgggcgggtggctgttgttggggccgtcgaggcggcggcgactctgcgtccccggctcctgatggaggcggggccgcatccccggccggggcactgctgcaagcctggggggcggctggacatgaaccacggcttcgtgcaccatatccgacggaaccagatcgctcgggacgactatgacaagaaggtgaagcaggcggccaaggagaaggtgaggaggcggcacacgcccgcgccgacgcggccccgcaagccagacctgcaggtgtacctgccgcgacaccgagatgtctctgcccacccacgcaacccagactatgaagagtccggtgaaagcagcagtagtggaggctctgagctggagccttctggccatcagctcttctgcttagaatacgaggcagacagtggagaggtcacatcagttatcgtctatcagggtgatgacccaggaaaggtgagtgagaaggtgtcggcacacacgcctctggatccacccatgcgagaagccctcaagttgcgtatccaggaggagattgcaaagcgccagagccaacactgaccatgttgaaggcgttctctccaggctggattcacacgaccctccatgcaattaaccgccagggctcatacttggtgcaatgtccatttacataattcctgcggaagtatgtagt

SEQ ID NO: 442417 - DNA, 301 bp, Homo sapiens
ttgcaacgcctatgttaagcattatggggaaagttgaaaacgggaagttacacagtagtttctattatggcactccaactgcctttaaagactaaagagcaatagttttgattatggaaagcaaaagtgagttataaacaatagcatattttctatcatatcatctataattcattatttgagagaggaaaatatgagcagtaagtttatgttgcaagctttcttcacatggtaataattaaaatacaatggattgatcagccttctaatttccaaaatgcaattctttgctcgtacagcc

SEQ ID NO: 442418 - DNA, 546 bp, Homo sapiens
ttaattaaatgttgatgaacagttgaacaaaaggatgtttataccctgtattggccacgttaaatttatgttcagcttctgtatccattttttcttgtagctatttgtcgtagatgtccagacaagccagatcaccaagatccccattctgaaagaccgggagcctggaggtgtgacccagcagggctgtggtatccatgccatcgagctgaatccttctagaacactgctagccactggaggagacaaccccaacagtcttgccatctatcgactacctacgctggatcctgtgtgtgtaggagatgtaagttttcccagtagttgtagttggagggagccttgtttttaaacgggtctcagtgattaacatggaccctcctctcatcagcccagagtggggactggactccccatagggcacagtgtatatttgataaaggggcaagcagcacacctcaggggccaacagtattgggttgctgtttgaatccatagtgtccacatacttcccactgcccatagtcagagagtagccagtttact

SEQ ID NO: 442419 - DNA, 3384 bp, Homo sapiens
aacggtcattgatgatgcatccctggaagacctgggagccaggtctggctccttggactgtatcttccgtgctccagtgggagtacagactgagagggagaagggggctgggtagagatgcagcccatgtcgtttggctgggatcactcgcttcacaaaaggaaaagacttcctcctgtgaagagatccttagtatactacttgaagaaccgggaagtcaggctacagaatgaaaccagctactctcgagtgttgcatggttatgcagcacagcaacttcccagtctcctgaaggagagagagtttcaccttgggacccttaataaagtgtttgcatctcagtggttgaatcataggcaagtggtgtgtggcacaaaatgcaacacgctatttgtcgtagatgtccagacaagccagatcaccaagatccccattctgaaagaccgggagcctggaggtgtgacccagcagggctgtggtatccatgccatcgagctgaatccttctagaacactgctagccactggaggagacaaccccaacagtcttgccatctatcgactacctacgctggatcctgtgtgtgtaggagatgatggacacaaggactggatcttttccatcgcatggatcagcgacactatggcagtgtctggctcacgtgatggttctatgggactctgggaggtgacagatgatgttttgaccaaaagtgatgcgagacacaatgtgtcacgggtccctgtgtatgcacacatcactcacaaggccttaaaggacatccccaaagaagacacaaaccctgacaactgcaaggttcgggctctggccttcaacaacaagaacaaggaactgggagcagtgtctctggatggctactttcatctctggaaggctgaaaatacactatctaagctcctctccaccaaactgccatattgccgtgagaatgtgtgtctggcttatggtagtgaatggtcagtttatgcagtgggctcccaagctcatgtctccttcttggatccacggcagccatcatacaacgtcaagtctgtctgttccagggagcgaggcagtggaatccggtcagtgagtttctacgagcacatcatcactgtgggaacagggcagggctccctgctgttctatgacatccgagctcagagatttctggaagagaggctctcagcttgttatgggtccaagcccagactagcaggggagaatctgaaactaaccactggcaaaggctggctgaatcatgatgaaacctggaggaattacttttcagacattgacttcttccccaatgctgtttacacccactgctacgactcgtctggaacgaaactctttgtggcaggaggtcccctcccttcagggctccatggaaactatgctgggctctggagttaatgacaactccccaaatgcagagatttacactaacttccattctcagtttccttgtttcttttgattttttttttcctaattgtgtgaggctcttgtgttttagtgggaacaccaaagtttgcctatagtttaggcacttaataggaagaagctctgtacagaaatctgaaagttgttttgctttttgttttcccctttggtaatcaaaattttactatcttttattatttctggcttttcaaccaaacattgttgctaatccctatttttctttaagtgacacacattctcctgtctctggcttcttcaggctgaaatgacatagtctttctcacccttacttcactcttgagaggtagggctcctttataattacatggttgctctcagactttctgtgaaagtttgggagctgtgtgtgtctgtgtgtgtgtgagagagagatcttgtctgcgtgtgtgtgtgtgatcttgtgtgcctgtaggtactgtgtgtcactgaaattacctggagtgaggattacttgtaattaaaatatttataaaagaaacaactttattcacagagtccagctttgggactagtctgtatcttgttttttaagtctaacaacactgataataggaagtaaaaacagaaaggaaaagaaattaccactgggaaaatctttttagttagattgtaggcttcctggggcctcccatgccaggactgcaaagtgatccagccctacctgtcttcccacctgtgtgtcccccgtgtgggaagttggtgtcacttccccttcccaccctcacatctgcttagccagtagccacacccctaaaacatcagactcaccatccaggtgcagctccagaggctacaaaaggcttcatgggacttgaatccccatcctagcttctctctccttcccctcaagacctgatctggttttaaggggcctggagctgggagtctcaagtctgctaagattcacatccatagcccccgtggctttgaggagaatcctctctgccattcttccaatctccccagtgggttttgctattattttctaaattgggttaagtctaagaaggtgggggtgagcagggggtttatctgtgtgtagtgagtgcttcatgtgtggaatattcattttcttactgcagtgggacttggggttgaagccacccctcctactctgttggcttagccctgagatggtgacaggctggcctgcagtcagcatcattgtgcatgtgacagcatcaatgtgattagtaatttgtctgttcctcccttgaactgtctgtttagtctgaggtttttaaacttgcaggcagctgactgtgatgtccacttgttccctgatttttacacatcatgtcaaagataacagctgttcccacccaccagttcctctaagcacatactctgcttttctgtcaacatcccattttggggaaaggaaaagtcatatttattcctgcaccccagttttttaacttgttctcccagttgtccccctcttctctgggtgtaagaagggaaattggaaaaaaaattatatatatattctccttttaatggtggggggctactggagaggagagacagcaagtccaccctaacttgttacacagcacataccacaggttctggaattctcatcttcgaacctagagaaataggtgctataaacagggaattaagcaaaatgctggatgctatagatcttttaattgtcttaattttttttctattattaaactacaggctgtagatttcttagttctcacagaacttctatcattttaaactgacttgtatatttaaaaaaaaaatcttcagtaggatgttttgtactattgctagaccctcttctgtaatgggtaatgcgtttgattgtttgagattttctgtttttaaaaatgtagcacttgactttttgccaaggaaaaaaataaaaattattccagtgca

SEQ ID NO: 442420 - DNA, 3507 bp, Homo sapiens
aacggtcattgatgatgcatccctggaagacctgggagccaggtctggctccttggactgtatcttccgtgctccagtgggagtacagactgagagggagaagggggctgggtagagatgcagcccatgtcggtatgggaatcactctacctctcatttccttcaatctttcactcctaaaatgtctagtaaaccttttagtctgttctattctgcattcattcccttgactttcagcccttgtaattcacattgtttggctgggatcactcgcttcacaaaaggaaaagacttcctcctgtgaagagatccttagtatactacttgaagaaccgggaagtcaggctacagaatgaaaccagctactctcgagtgttgcatggttatgcagcacagcaacttcccagtctcctgaaggagagagagtttcaccttgggacccttaataaagtgtttgcatctcagtggttgaatcataggcaagtggtgtgtggcacaaaatgcaacacgctatttgtcgtagatgtccagacaagccagatcaccaagatccccattctgaaagaccgggagcctggaggtgtgacccagcagggctgtggtatccatgccatcgagctgaatccttctagaacactgctagccactggaggagacaaccccaacagtcttgccatctatcgactacctacgctggatcctgtgtgtgtaggagatgatggacacaaggactggatcttttccatcgcatggatcagcgacactatggcagtgtctggctcacgtgatggttctatgggactctgggaggtgacagatgatgttttgaccaaaagtgatgcgagacacaatgtgtcacgggtccctgtgtatgcacacatcactcacaaggccttaaaggacatccccaaagaagacacaaaccctgacaactgcaaggttcgggctctggccttcaacaacaagaacaaggaactgggagcagtgtctctggatggctactttcatctctggaaggctgaaaatacactatctaagctcctctccaccaaactgccatattgccgtgagaatgtgtgtctggcttatggtagtgaatggtcagtttatgcagtgggctcccaagctcatgtctccttcttggatccacggcagccatcatacaacgtcaagtctgtctgttccagggagcgaggcagtggaatccggtcagtgagtttctacgagcacatcatcactgtgggaacagggcagggctccctgctgttctatgacatccgagctcagagatttctggaagagaggctctcagcttgttatgggtccaagcccagactagcaggggagaatctgaaactaaccactggcaaaggctggctgaatcatgatgaaacctggaggaattacttttcagacattgacttcttccccaatgctgtttacacccactgctacgactcgtctggaacgaaactctttgtggcaggaggtcccctcccttcagggctccatggaaactatgctgggctctggagttaatgacaactccccaaatgcagagatttacactaacttccattctcagtttccttgtttcttttgattttttttttcctaattgtgtgaggctcttgtgttttagtgggaacaccaaagtttgcctatagtttaggcacttaataggaagaagctctgtacagaaatctgaaagttgttttgctttttgttttcccctttggtaatcaaaattttactatcttttattatttctggcttttcaaccaaacattgttgctaatccctatttttctttaagtgacacacattctcctgtctctggcttcttcaggctgaaatgacatagtctttctcacccttacttcactcttgagaggtagggctcctttataattacatggttgctctcagactttctgtgaaagtttgggagctgtgtgtgtctgtgtgtgtgtgagagagagatcttgtctgcgtgtgtgtgtgtgatcttgtgtgcctgtaggtactgtgtgtcactgaaattacctggagtgaggattacttgtaattaaaatatttataaaagaaacaactttattcacagagtccagctttgggactagtctgtatcttgttttttaagtctaacaacactgataataggaagtaaaaacagaaaggaaaagaaattaccactgggaaaatctttttagttagattgtaggcttcctggggcctcccatgccaggactgcaaagtgatccagccctacctgtcttcccacctgtgtgtcccccgtgtgggaagttggtgtcacttccccttcccaccctcacatctgcttagccagtagccacacccctaaaacatcagactcaccatccaggtgcagctccagaggctacaaaaggcttcatgggacttgaatccccatcctagcttctctctccttcccctcaagacctgatctggttttaaggggcctggagctgggagtctcaagtctgctaagattcacatccatagcccccgtggctttgaggagaatcctctctgccattcttccaatctccccagtgggttttgctattattttctaaattgggttaagtctaagaaggtgggggtgagcagggggtttatctgtgtgtagtgagtgcttcatgtgtggaatattcattttcttactgcagtgggacttggggttgaagccacccctcctactctgttggcttagccctgagatggtgacaggctggcctgcagtcagcatcattgtgcatgtgacagcatcaatgtgattagtaatttgtctgttcctcccttgaactgtctgtttagtctgaggtttttaaacttgcaggcagctgactgtgatgtccacttgttccctgatttttacacatcatgtcaaagataacagctgttcccacccaccagttcctctaagcacatactctgcttttctgtcaacatcccattttggggaaaggaaaagtcatatttattcctgcaccccagttttttaacttgttctcccagttgtccccctcttctctgggtgtaagaagggaaattggaaaaaaaattatatatatattctccttttaatggtggggggctactggagaggagagacagcaagtccaccctaacttgttacacagcacataccacaggttctggaattctcatcttcgaacctagagaaataggtgctataaacagggaattaagcaaaatgctggatgctatagatcttttaattgtcttaattttttttctattattaaactacaggctgtagatttcttagttctcacagaacttctatcattttaaactgacttgtatatttaaaaaaaaaatcttcagtaggatgttttgtactattgctagaccctcttctgtaatgggtaatgcgtttgattgtttgagattttctgtttttaaaaatgtagcacttgactttttgccaaggaaaaaaataaaaattattccagtgca

SEQ ID NO: 442421 - DNA, 3097 bp, Homo sapiens
ttaattaaatgttgatgaacagttgaacaaaaggatgtttataccctgtattggccacgttaaatttatgttcagcttctgtatccattttttcttgtagctatttgtcgtagatgtccagacaagccagatcaccaagatccccattctgaaagaccgggagcctggaggtgtgacccagcagggctgtggtatccatgccatcgagctgaatccttctagaacactgctagccactggaggagacaaccccaacagtcttgccatctatcgactacctacgctggatcctgtgtgtgtaggagatgatggacacaaggactggatcttttccatcgcatggatcagcgacactatggcagtgtctggctcacgtgatggttctatgggactctgggaggtgacagatgatgttttgaccaaaagtgatgcgagacacaatgtgtcacgggtccctgtgtatgcacacatcactcacaaggccttaaaggacatccccaaagaagacacaaaccctgacaactgcaaggttcgggctctggccttcaacaacaagaacaaggaactgggagcagtgtctctggatggctactttcatctctggaaggctgaaaatacactatctaagctcctctccaccaaactgccatattgccgtgagaatgtgtgtctggcttatggtagtgaatggtcagtttatgcagtgggctcccaagctcatgtctccttcttggatccacggcagccatcatacaacgtcaagtctgtctgttccagggagcgaggcagtggaatccggtcagtgagtttctacgagcacatcatcactgtgggaacagggcagggctccctgctgttctatgacatccgagctcagagatttctggaagagaggctctcagcttgttatgggtccaagcccagactagcaggggagaatctgaaactaaccactggcaaaggctggctgaatcatgatgaaacctggaggaattacttttcagacattgacttcttccccaatgctgtttacacccactgctacgactcgtctggaacgaaactctttgtggcaggaggtcccctcccttcagggctccatggaaactatgctgggctctggagttaatgacaactccccaaatgcagagatttacactaacttccattctcagtttccttgtttcttttgattttttttttcctaattgtgtgaggctcttgtgttttagtgggaacaccaaagtttgcctatagtttaggcacttaataggaagaagctctgtacagaaatctgaaagttgttttgctttttgttttcccctttggtaatcaaaattttactatcttttattatttctggcttttcaaccaaacattgttgctaatccctatttttctttaagtgacacacattctcctgtctctggcttcttcaggctgaaatgacatagtctttctcacccttacttcactcttgagaggtagggctcctttataattacatggttgctctcagactttctgtgaaagtttgggagctgtgtgtgtctgtgtgtgtgtgagagagagatcttgtctgcgtgtgtgtgtgtgatcttgtgtgcctgtaggtactgtgtgtcactgaaattacctggagtgaggattacttgtaattaaaatatttataaaagaaacaactttattcacagagtccagctttgggactagtctgtatcttgttttttaagtctaacaacactgataataggaagtaaaaacagaaaggaaaagaaattaccactgggaaaatctttttagttagattgtaggcttcctggggcctcccatgccaggactgcaaagtgatccagccctacctgtcttcccacctgtgtgtcccccgtgtgggaagttggtgtcacttccccttcccaccctcacatctgcttagccagtagccacacccctaaaacatcagactcaccatccaggtgcagctccagaggctacaaaaggcttcatgggacttgaatccccatcctagcttctctctccttcccctcaagacctgatctggttttaaggggcctggagctgggagtctcaagtctgctaagattcacatccatagcccccgtggctttgaggagaatcctctctgccattcttccaatctccccagtgggttttgctattattttctaaattgggttaagtctaagaaggtgggggtgagcagggggtttatctgtgtgtagtgagtgcttcatgtgtggaatattcattttcttactgcagtgggacttggggttgaagccacccctcctactctgttggcttagccctgagatggtgacaggctggcctgcagtcagcatcattgtgcatgtgacagcatcaatgtgattagtaatttgtctgttcctcccttgaactgtctgtttagtctgaggtttttaaacttgcaggcagctgactgtgatgtccacttgttccctgatttttacacatcatgtcaaagataacagctgttcccacccaccagttcctctaagcacatactctgcttttctgtcaacatcccattttggggaaaggaaaagtcatatttattcctgcaccccagttttttaacttgttctcccagttgtccccctcttctctgggtgtaagaagggaaattggaaaaaaaattatatatatattctccttttaatggtggggggctactggagaggagagacagcaagtccaccctaacttgttacacagcacataccacaggttctggaattctcatcttcgaacctagagaaataggtgctataaacagggaattaagcaaaatgctggatgctatagatcttttaattgtcttaattttttttctattattaaactacaggctgtagatttcttagttctcacagaacttctatcattttaaactgacttgtatatttaaaaaaaaaatcttcagtaggatgttttgtactattgctagaccctcttctgtaatgggtaatgcgtttgattgtttgagattttctgtttttaaaaatgtagcacttgactttttgccaaggaaaaaaataaaaattattccagtgca

SEQ ID NO: 442422 - DNA, 4223 bp, Homo sapiens
atccgaagtgcggctgcgcaagggtgacggcgcgcgagcaagggggagggggtgtttgggttctagccgctcgccgtccttgcaggctctgccgtcggaaagccgctcattctcgcttccccttccctttcccggctcaagtccttcctctctctttcctttctttccgcctatcttttttctgctgccgctccgggtccgggccattttccgggccgggcgcactaaggtgcgcggccccggggcccagtatatgacccgccgtcctgctatccttcgcttcccccgccccatgtggctgcggggccgcggcggcgctgcccactatggcccggaaagtagttagcaggaagcggaaagcgcccgcctcgccgggagctgggagcgacgctcagggcccgcagtttggctgggatcactcgcttcacaaaaggaaaagacttcctcctgtgaagagatccttagtatactacttgaagaaccgggaagtcaggctacagaatgaaaccagctactctcgagtgttgcatggttatgcagcacagcaacttcccagtctcctgaaggagagagagtttcaccttgggacccttaataaagtgtttgcatctcagtggttgaatcataggcaagtggtgtgtggcacaaaatgcaacacgctatttgtcgtagatgtccagacaagccagatcaccaagatccccattctgaaagaccgggagcctggaggtgtgacccagcagggctgtggtatccatgccatcgagctgaatccttctagaacactgctagccactggaggagacaaccccaacagtcttgccatctatcgactacctacgctggatcctgtgtgtgtaggagatgatggacacaaggactggatcttttccatcgcatggatcagcgacactatggcagtgtctggctcacgtgatggttctatgggactctgggaggtgacagatgatgttttgaccaaaagtgatgcgagacacaatgtgtcacgggtccctgtgtatgcacacatcactcacaaggccttaaaggacatccccaaagaagacacaaaccctgacaactgcaaggttcgggctctggccttcaacaacaagaacaaggaactgggagcagtgtctctggatggctactttcatctctggaaggctgaaaatacactatctaagctcctctccaccaaactgccatattgccgtgagaatgtgtgtctggcttatggtagtgaatggtcagtttatgcagtgggctcccaagctcatgtctccttcttggatccacggcagccatcatacaacgtcaagtctgtctgttccagggagcgaggcagtggaatccggtcagtgagtttctacgagcacatcatcactgtgggaacagggcagggctccctgctgttctatgacatccgagctcagagatttctggaagagaggctctcagcttgttatgggtccaagcccagactagcaggggagaatctgaaactaaccactggcaaaggctggctgaatcatgatgaaacctggaggaattacttttcagacattgacttcttccccaatgctgtttacacccactgctacgactcgtctggaacgaaactctttgtggcaggaggtcccctcccttcagggctccatggaaactatgctgggctctggagttaatgacaactccccaaatgcagagatttacactaacttccattctcagtttccttgtttcttttgattttttttttcctaattgtgtgaggctcttgtgttttagtgggaacaccaaagtttgcctatagtttaggcacttaataggaagaagctctgtacagaaatctgaaagttgttttgctttttgttttcccctttggtaatcaaaattttactatcttttattatttctggcttttcaaccaaacattgttgctaatccctatttttctttaagtgacacacattctcctgtctctggcttcttcaggctgaaatgacatagtctttctcacccttacttcactcttgagaggtagggctcctttataattacatggttgctctcagactttctgtgaaagtttgggagctgtgtgtgtctgtgtgtgtgtgagagagagatcttgtctgcgtgtgtgtgtgtgatcttgtgtgcctgtaggtactgtgtgtcactgaaattacctggagtgaggattacttgtaattaaaatatttataaaagaaacaactttattcacagagtccagctttgggactagtctgtatcttgttttttaagtctaacaacactgataataggaagtaaaaacagaaaggaaaagaaattaccactgggaaaatctttttagttagattgtaggcttcctggggcctcccatgccaggactgcaaagtgatccagccctacctgtcttcccacctgtgtgtcccccgtgtgggaagttggtgtcacttccccttcccaccctcacatctgcttagccagtagccacacccctaaaacatcagactcaccatccaggtgcagctccagaggctacaaaaggcttcatgggacttgaatccccatcctagcttctctctccttcccctcaagacctgatctggttttaaggggcctggagctgggagtctcaagtctgctaagattcacatccatagcccccgtggctttgaggagaatcctctctgccattcttccaatctccccagtgggttttgctattattttctaaattgggttaagtctaagaaggtgggggtgagcagggggtttatctgtgtgtagtgagtgcttcatgtgtggaatattcattttcttactgcagtgggacttggggttgaagccacccctcctactctgttggcttagccctgagatggtgacaggctggcctgcagtcagcatcattgtgcatgtgacagcatcaatgtgattagtaatttgtctgttcctcccttgaactgtctgtttagtctgaggtttttaaacttgcaggcagctgactgtgatgtccacttgttccctgatttttacacatcatgtcaaagataacagctgttcccacccaccagttcctctaagcacatactctgcttttctgtcaacatcccattttggggaaaggaaaagtcatatttattcctgcaccccagttttttaacttgttctcccagttgtccccctcttctctgggtgtaagaagggaaattggaaaaaaaattatatatatattctccttttaatggtggggggctactggagaggagagacagcaagtccaccctaacttgttacacagcacataccacaggttctggaattctcatcttcgaacctagagaaataggtgctataaacagggaattaagcaaaatgctggatgctatagatcttttaattgtcttaattttttttctattattaaactacaggctgtagatttcttagttctcacagaacttctatcattttaaactgacttgtatatttaaaaaaaaaatcttcagtaggatgttttgtactattgctagaccctcttctgtaatgggtaatgcgtttgattgtttgagattttctgtttttaaaaatgtagcacttgactttttgccaaggaaaaaaataaaaattattccagtgcaaaaaaaaaaaaaaaaaaaaaaaaaaaaaaaaaaaaaaaaaaaaaaaaaaaaaaaaaaaaaaaaaaaaaaaaaaaaaaaaaaaaaaaaaaaaaaaagaaagaaaataaaaaaaaaagaaaaaaacaaaaaaaacaaagaaagaagcaggaggaggcggcgagacaatcaacatagatgccaggatagcgaaggcaaaacaaaccacagcaccccccatcattattttctattaaccgaccagcgacggcagacgagcgtggcggaatcgaataatcacagagcacatcggcggtacggcagcaaataaaaaaaggaggtagcaaaagagaagacagactacctaagagttagatagtagtcttgtataagaaacagaaaacttaccgtatgggagggtgaggaggagatgtaaaggtttgtcagagccacaatcaatagaatagtagtataaaaggccctagcgggatagtgtatcaattgaattgttggcgtaggtgagagtagtcgtgcaacaagttagattctgagggtgaagaaagataacaatacatgagagtgttagaaaac

SEQ ID NO: 442423 - DNA, 3001 bp, Homo sapiens
atccgaagtgcggctgcgcaagggtgacggcgcgcgagcaagggggagggggtgtttgggttctagccgctcgccgtccttgcaggctctgccgtcggaaagccgctcattctcgcttccccttccctttcccggctcaagtccttcctctctctttcctttctttccgcctatcttttttctgctgccgctccgggtccgggccattttccgggccgggcgcactaaggtgcgcggccccggggcccagtatatgacccgccgtcctgctatccttcgcttcccccgccccatgtggctgcggggccgcggcggcgctgcccactatggcccggaaagtagttagcaggaagcggaaagcgcccgcctcgccgggagctgggagcgacgctcagggcccgcagtttggctgggatcactcgcttcacaaaaggaaaagacttcctcctgtgaagagatccttagtatactacttgaagaaccgggaagtcaggctacagaatgaaaccagctactctcgagtgttgcatggttatgcagcacagcaacttcccagtctcctgaaggagagagagtttcaccttgggacccttaataaagtgtttgcatctcagtggttgaatcataggcaagtggtgtgtggcacaaaatgcaacacgctatttgtcgtagatgtccagacaagccagatcaccaagatccccattctgaaagaccgggagcctggaggtgtgacccagcagggctgtggtatccatgccatcgagctgaatccttctagaacactgctagccactggaggagacaaccccaacagtcttgccatctatcgactacctacgctggatcctgtgtgtgtaggagatgatggacacaaggactggatcttttccatcgcatggatcagcgacactatggcagtgtctggctcacgtgatggttctatgggactctgggaggtgacagatgatgttttgaccaaaagtgatgcgagacacaatgtgtcacgggtccctgtgtatgcacacatcactcacaaggccttaaaggacatccccaaagaagacacaaaccctgacaactgcaaggttcgggctctggccttcaacaacaagaacaaggaactgggagcagtgtctctggatggctactttcatctctggaaggctgaaaatacactatctaagctcctctccaccaaactgccatattgccgtgagaatgtgtgtctggcttatggtagtgaatggtcagtttatgcagtgggctcccaagctcatgtctccttcttggatccacggcagccatcatacaacgtcaagtctgtctgttccagggagcgaggcagtggaatccggtcagtgagtttctacgagcacatcatcactgtgggaacagggcagggctccctgctgttctatgacatccgagctcagagatttctggaagagaggctctcagcttgttatgggtccaagcccagactagcaggggagaatctgaaactaaccactggcaaaggctggctgaatcatgatgaaacctggaggaattacttttcagacattgacttcttccccaatgctgtttacacccactgctacgactcgtctggaacgaaactctttgtggcaggaggtcccctcccttcagggctccatggaaactatgctgggctctggagttaatgacaactccccaaatgcagagatttacactaacttccattctcagtttccttgtttcttttgattttttttttcctaattgtgtgaggctcttgtgttttagtgggaacaccaaagtttgcctatagtttaggcacttaataggaagaagctctgtacagaaatctgaaagttgttttgctttttgttttcccctttggtaatcaaaattttactatcttttattatttctggcttttcaaccaaacattgttgctaatccctatttttctttaagtgacacacattctcctgtctctggcttcttcaggctgaaatgacatagtctttctcacccttacttcactcttgagaggtagggctcctttataattacatggttgctctcagactttctgtgaaagtttgggagctgtgtgtgtctgtgtgtgtgtgagagagagatcttgtctgcgtgtgtgtgtgtgatcttgtgtgcctgtaggtactgtgtgtcactgaaattacctggagtgaggattacttgtaattaaaatatttataaaagaaacaactttattcacagagtccagctttgggactagtctgtatcttgttttttaagtctaacaacactgataataggaagtaaaaacagaaaggaaaagaaattaccactgggaaaatctttttagttagattgtaggcttcctggggcctcccatgccaggactgcaaagtgatccagccctacctgtcttcccacctgtgtgtcccccgtgtgggaagttggtgtcacttccccttcccaccctcacatctgcttagccagtagccacacccctaaaacatcagactcaccatccaggtgcagctccagaggctacaaaaggcttcatgggacttgaatccccatcctagcttctctctccttcccctcaagacctgatctggttttaaggggcctggagctgggagtctcaagtctgctaagattcacatccatagcccccgtggctttgaggagaatcctctctgccattcttccaatctccccagtgggttttgctattattttctaaattgggttaagtctaagaaggtgggggtgagcagggggtttatctgtgtgtagtgagtgcttcatgtgtggaatattcattttcttactgcagtgggacttggggttgaagccacccctcctactctgttggcttagccctgagatggtggaaggaatcgaattcctgcagcccgggggaccactagttctagagcggcccgcaacgcggtggagctccagcttttgttccctttactgagggtaattgcgc

SEQ ID NO: 442424 - DNA, 1105 bp, Homo sapiens
atccgaagtgcggctgcgcaagggtgacggcgcgcgagcaagggggagggggtgtttgggttctagccgctcgccgtccttgcaggctctgccgtcggaaagccgctcattctcgcttccccttccctttcccggctcaagtccttcctctctctttcctttctttccgcctatcttttttctgctgccgctccgggtccgggccattttccgggccgggcgcactaaggtgcgcggccccggggcccagtatatgacccgccgtcctgctatccttcgcttcccccgccccatgtggctgcggggccgcggcggcgctgcccactatggcccggaaagtagttagcaggaagcggaaagcgcccgcctcgccgggagctgggagcgacgctcagggcccgcagtttggctgggatcactcgcttcacaaaaggaaaagacttcctcctgtgaagagatccttagtatactacttgaagaaccgggaagtcaggctacagaatgaaaccagctactctcgagtgttgcatggttatgcagcacagcaacttcccagtctcctgaaggagagagagtttcaccttgggacccttaataaagtgtttgcatctcagtggttgaatcataggcaagtggtgtgtggcacaaaatgcaacacgctatttgtcgtagatgtccagacaagccagatcaccaagatccccattctgaaagaccgggagcctggaggtgtgacccagcagggctgtggtatccatgccatcgagctgaatccttctagaacactgctagccactggaggagacaaccccaacagtcttgccatctatcgactacctacgctggatcctgtgtgtgtaggagatgtaagttttcccagtagttgtagttggagggagccttgtttttaaacgggtctcagtgattaacatggaccctcctctcatcagcccagagtggggactggactccccatagggcacagtgtatatttgataaaggggcaagcagcacacctcaggggccaacagtattgggttgctgtttgaatccatagtgtccacatacttcccactgcccatagtcagagagtagccagtttact

SEQ ID NO: 442425 - DNA, 3656 bp, Homo sapiens
atccgaagtgcggctgcgcaagggtgacggcgcgcgagcaagggggagggggtgtttgggttctagccgctcgccgtccttgcaggctctgccgtcggaaagccgctcattctcgcttccccttccctttcccggctcaagtccttcctctctctttcctttctttccgcctatcttttttctgctgccgctccgggtccgggccattttccgggccgggcgcactaaggtgcgcggccccggggcccagtatatgacccgccgtcctgctatccttcgcttcccccgccccatgtggctgcggggccgcggcggcgctgcccactatggcccggaaagtagttagcaggaagcggaaagcgcccgcctcgccgggagctgggagcgacgctcagggcccgcagtttggctgggatcactcgcttcacaaaaggaaaagacttcctcctgtgaagagatccttagtatactacttgaagaaccgggaagtcaggctacagaatgaaaccagctactctcgagtgttgcatggttatgcagcacagcaacttcccagtctcctgaaggagagagagtttcaccttgggacccttaataaagtgtttgcatctcagtggttgaatcataggcaagtggtgtgtggcacaaaatgcaacacgctatttgtcgtagatgtccagacaagccagatcaccaagatccccattctgaaagaccgggagcctggaggtgtgacccagcagggctgtggtatccatgccatcgagctgaatccttctagaacactgctagccactggaggagacaaccccaacagtcttgccatctatcgactacctacgctggatcctgtgtgtgtaggagatgatggacacaaggactggatcttttccatcgcatggatcagcgacactatggcagtgtctggctcacgtgatggttctatgggactctgggaggtgacagatgatgttttgaccaaaagtgatgcgagacacaatgtgtcacgggtccctgtgtatgcacacatcactcacaaggccttaaaggacatccccaaagaagacacaaaccctgacaactgcaaggttcgggctctggccttcaacaacaagaacaaggaactgggagcagtgtctctggatggctactttcatctctggaaggctgaaaatacactatctaagctcctctccaccaaactgccatattgccgtgagaatgtgtgtctggcttatggtagtgaatggtcagtttatgcagtgggctcccaagctcatgtctccttcttggatccacggcagccatcatacaacgtcaagtctgtctgttccagggagcgaggcagtggaatccggtcagtgagtttctacgagcacatcatcactgtgggaacagggcagggctccctgctgttctatgacatccgagctcagagatttctggaagagaggctctcagcttgttatgggtccaagcccagactagcaggggagaatctgaaactaaccactggcaaaggctggctgaatcatgatgaaacctggaggaattacttttcagacattgacttcttccccaatgctgtttacacccactgctacgactcgtctggaacgaaactctttgtggcaggaggtcccctcccttcagggctccatggaaactatgctgggctctggagttaatgacaactccccaaatgcagagatttacactaacttccattctcagtttccttgtttcttttgattttttttttcctaattgtgtgaggctcttgtgttttagtgggaacaccaaagtttgcctatagtttaggcacttaataggaagaagctctgtacagaaatctgaaagttgttttgctttttgttttcccctttggtaatcaaaattttactatcttttattatttctggcttttcaaccaaacattgttgctaatccctatttttctttaagtgacacacattctcctgtctctggcttcttcaggctgaaatgacatagtctttctcacccttacttcactcttgagaggtagggctcctttataattacatggttgctctcagactttctgtgaaagtttgggagctgtgtgtgtctgtgtgtgtgtgagagagagatcttgtctgcgtgtgtgtgtgtgatcttgtgtgcctgtaggtactgtgtgtcactgaaattacctggagtgaggattacttgtaattaaaatatttataaaagaaacaactttattcacagagtccagctttgggactagtctgtatcttgttttttaagtctaacaacactgataataggaagtaaaaacagaaaggaaaagaaattaccactgggaaaatctttttagttagattgtaggcttcctggggcctcccatgccaggactgcaaagtgatccagccctacctgtcttcccacctgtgtgtcccccgtgtgggaagttggtgtcacttccccttcccaccctcacatctgcttagccagtagccacacccctaaaacatcagactcaccatccaggtgcagctccagaggctacaaaaggcttcatgggacttgaatccccatcctagcttctctctccttcccctcaagacctgatctggttttaaggggcctggagctgggagtctcaagtctgctaagattcacatccatagcccccgtggctttgaggagaatcctctctgccattcttccaatctccccagtgggttttgctattattttctaaattgggttaagtctaagaaggtgggggtgagcagggggtttatctgtgtgtagtgagtgcttcatgtgtggaatattcattttcttactgcagtgggacttggggttgaagccacccctcctactctgttggcttagccctgagatggtgacaggctggcctgcagtcagcatcattgtgcatgtgacagcatcaatgtgattagtaatttgtctgttcctcccttgaactgtctgtttagtctgaggtttttaaacttgcaggcagctgactgtgatgtccacttgttccctgatttttacacatcatgtcaaagataacagctgttcccacccaccagttcctctaagcacatactctgcttttctgtcaacatcccattttggggaaaggaaaagtcatatttattcctgcaccccagttttttaacttgttctcccagttgtccccctcttctctgggtgtaagaagggaaattggaaaaaaaattatatatatattctccttttaatggtggggggctactggagaggagagacagcaagtccaccctaacttgttacacagcacataccacaggttctggaattctcatcttcgaacctagagaaataggtgctataaacagggaattaagcaaaatgctggatgctatagatcttttaattgtcttaattttttttctattattaaactacaggctgtagatttcttagttctcacagaacttctatcattttaaactgacttgtatatttaaaaaaaaaatcttcagtaggatgttttgtactattgctagaccctcttctgtaatgggtaatgcgtttgattgtttgagattttctgtttttaaaaatgtagcacttgactttttgccaaggaaaaaaataaaaattattccagtgca

SEQ ID NO: 442426 - DNA, 3265 bp, Homo sapiens
gctaggaagcctgggttgagatcggccgagggctcacaaaaggaaaagacttcctcctgtgaagagatccttagtatactacttgaagaaccgggaagtcaggctacagaatgaaaccagctactctcgagtgttgcatggttatgcagcacagcaacttcccagtctcctgaaggagagagagtttcaccttgggacccttaataaagtgtttgcatctcagtggttgaatcataggcaagtggtgtgtggcacaaaatgcaacacgctatttgtcgtagatgtccagacaagccagatcaccaagatccccattctgaaagaccgggagcctggaggtgtgacccagcagggctgtggtatccatgccatcgagctgaatccttctagaacactgctagccactggaggagacaaccccaacagtcttgccatctatcgactacctacgctggatcctgtgtgtgtaggagatgatggacacaaggactggatcttttccatcgcatggatcagcgacactatggcagtgtctggctcacgtgatggttctatgggactctgggaggtgacagatgatgttttgaccaaaagtgatgcgagacacaatgtgtcacgggtccctgtgtatgcacacatcactcacaaggccttaaaggacatccccaaagaagacacaaaccctgacaactgcaaggttcgggctctggccttcaacaacaagaacaaggaactgggagcagtgtctctggatggctactttcatctctggaaggctgaaaatacactatctaagctcctctccaccaaactgccatattgccgtgagaatgtgtgtctggcttatggtagtgaatggtcagtttatgcagtgggctcccaagctcatgtctccttcttggatccacggcagccatcatacaacgtcaagtctgtctgttccagggagcgaggcagtggaatccggtcagtgagtttctacgagcacatcatcactgtgggaacagggcagggctccctgctgttctatgacatccgagctcagagatttctggaagagaggctctcagcttgttatgggtccaagcccagactagcaggggagaatctgaaactaaccactggcaaaggctggctgaatcatgatgaaacctggaggaattacttttcagacattgacttcttccccaatgctgtttacacccactgctacgactcgtctggaacgaaactctttgtggcaggaggtcccctcccttcagggctccatggaaactatgctgggctctggagttaatgacaactccccaaatgcagagatttacactaacttccattctcagtttccttgtttcttttgattttttttttcctaattgtgtgaggctcttgtgttttagtgggaacaccaaagtttgcctatagtttaggcacttaataggaagaagctctgtacagaaatctgaaagttgttttgctttttgttttcccctttggtaatcaaaattttactatcttttattatttctggcttttcaaccaaacattgttgctaatccctatttttctttaagtgacacacattctcctgtctctggcttcttcaggctgaaatgacatagtctttctcacccttacttcactcttgagaggtagggctcctttataattacatggttgctctcagactttctgtgaaagtttgggagctgtgtgtgtctgtgtgtgtgtgagagagagatcttgtctgcgtgtgtgtgtgtgatcttgtgtgcctgtaggtactgtgtgtcactgaaattacctggagtgaggattacttgtaattaaaatatttataaaagaaacaactttattcacagagtccagctttgggactagtctgtatcttgttttttaagtctaacaacactgataataggaagtaaaaacagaaaggaaaagaaattaccactgggaaaatctttttagttagattgtaggcttcctggggcctcccatgccaggactgcaaagtgatccagccctacctgtcttcccacctgtgtgtcccccgtgtgggaagttggtgtcacttccccttcccaccctcacatctgcttagccagtagccacacccctaaaacatcagactcaccatccaggtgcagctccagaggctacaaaaggcttcatgggacttgaatccccatcctagcttctctctccttcccctcaagacctgatctggttttaaggggcctggagctgggagtctcaagtctgctaagattcacatccatagcccccgtggctttgaggagaatcctctctgccattcttccaatctccccagtgggttttgctattattttctaaattgggttaagtctaagaaggtgggggtgagcagggggtttatctgtgtgtagtgagtgcttcatgtgtggaatattcattttcttactgcagtgggacttggggttgaagccacccctcctactctgttggcttagccctgagatggtgacaggctggcctgcagtcagcatcattgtgcatgtgacagcatcaatgtgattagtaatttgtctgttcctcccttgaactgtctgtttagtctgaggtttttaaacttgcaggcagctgactgtgatgtccacttgttccctgatttttacacatcatgtcaaagataacagctgttcccacccaccagttcctctaagcacatactctgcttttctgtcaacatcccattttggggaaaggaaaagtcatatttattcctgcaccccagttttttaacttgttctcccagttgtccccctcttctctgggtgtaagaagggaaattggaaaaaaaattatatatatattctccttttaatggtggggggctactggagaggagagacagcaagtccaccctaacttgttacacagcacataccacaggttctggaattctcatcttcgaacctagagaaataggtgctataaacagggaattaagcaaaatgctggatgctatagatcttttaattgtcttaattttttttctattattaaactacaggctgtagatttcttagttctcacagaacttctatcattttaaactgacttgtatatttaaaaaaaaaatcttcagtaggatgttttgtactattgctagaccctcttctgtaatgggtaatgcgtttgattgtttgagattttctgtttttaaaaatgtagcacttgactttttgccaaggaaaaaaataaaaattattccagtgca

SEQ ID NO: 442427 - DNA, 3477 bp, Homo sapiens
atccgaagtgcggctgcgcaagggtgacggcgcgcgagcaagggggagggggtgtttgggttctagccgctcgccgtccttgcaggctctgccgtcggaaagccgctcattctcgcttccccttccctttcccggctcaagtccttcctctctctttcctttctttccgcctatcttttttctgctgccgctccgggtccgggccattttccgggccgggcgcactaaggtgcgcggccccggggcccagtatatgacccgccgtcctgctatccttcgcttcccccgccccatgtggctgcggggccgcggcggcgctgcccactatggcccggaaagtagttagcaggaagcggaaagcgcccgcctcgccgggagctgggagcgacgctcagggcccgcagtttggctgggatcactcgcttcacaaaaggaaaagacttcctcctgtgaagagatccttagtatactacttgaagaaccgggaagtcaggctacagaatgaaaccagctactctcgagtgttgcatggttatgcagcacagcaacttcccagtctcctgaaggagagagagtttcaccttgggacccttaataaagtgtttgcatctcagtggttgaatcataggcaagtggtgtgtggcacaaaatgcaacacgctatttgtcgtagatgtccagacaagccagatcaccaagatccccattctgaaagaccgggagcctggaggtgtgacccagcagggctgtggtatccatgccatcgagctgaatccttctagaacactgctagccactggaggagacaaccccaacagtcttgccatctatcgactacctacgctggatcctgtgtgtgtaggagatgatggacacaaggactggatcttttccatcgcatggatcagcgacactatggcagtgtctggctcacgtgatggttctatgggactctgggaggtgacagatgatgttttgaccaaaagtgatgcgagacacaatgtgtcacgggtccctgtgtatgcacacatcactcacaaggccttaaaggacatccccaaagaagacacaaaccctgacaactgcaaggttcgggctctggccttcaacaacaagaacaaggaactgggagcagtgtctctggatggctactttcatctctggaaggctgaaaatacactatctaagctcctctccaccaaactgccatattgccgtgagaatgtgtgtctggcttatggtagtgaatggtcagtttatgcagtgggctcccaagctcatgtctccttcttggatccacggcagccatcatacaacgtcaagtctgtctgttccagggagcgaggcagtgaatcatgatgaaacctggaggaattacttttcagacattgacttcttccccaatgctgtttacacccactgctacgactcgtctggaacgaaactctttgtggcaggaggtcccctcccttcagggctccatggaaactatgctgggctctggagttaatgacaactccccaaatgcagagatttacactaacttccattctcagtttccttgtttcttttgattttttttttcctaattgtgtgaggctcttgtgttttagtgggaacaccaaagtttgcctatagtttaggcacttaataggaagaagctctgtacagaaatctgaaagttgttttgctttttgttttcccctttggtaatcaaaattttactatcttttattatttctggcttttcaaccaaacattgttgctaatccctatttttctttaagtgacacacattctcctgtctctggcttcttcaggctgaaatgacatagtctttctcacccttacttcactcttgagaggtagggctcctttataattacatggttgctctcagactttctgtgaaagtttgggagctgtgtgtgtctgtgtgtgtgtgagagagagatcttgtctgcgtgtgtgtgtgtgatcttgtgtgcctgtaggtactgtgtgtcactgaaattacctggagtgaggattacttgtaattaaaatatttataaaagaaacaactttattcacagagtccagctttgggactagtctgtatcttgttttttaagtctaacaacactgataataggaagtaaaaacagaaaggaaaagaaattaccactgggaaaatctttttagttagattgtaggcttcctggggcctcccatgccaggactgcaaagtgatccagccctacctgtcttcccacctgtgtgtcccccgtgtgggaagttggtgtcacttccccttcccaccctcacatctgcttagccagtagccacacccctaaaacatcagactcaccatccaggtgcagctccagaggctacaaaaggcttcatgggacttgaatccccatcctagcttctctctccttcccctcaagacctgatctggttttaaggggcctggagctgggagtctcaagtctgctaagattcacatccatagcccccgtggctttgaggagaatcctctctgccattcttccaatctccccagtgggttttgctattattttctaaattgggttaagtctaagaaggtgggggtgagcagggggtttatctgtgtgtagtgagtgcttcatgtgtggaatattcattttcttactgcagtgggacttggggttgaagccacccctcctactctgttggcttagccctgagatggtgacaggctggcctgcagtcagcatcattgtgcatgtgacagcatcaatgtgattagtaatttgtctgttcctcccttgaactgtctgtttagtctgaggtttttaaacttgcaggcagctgactgtgatgtccacttgttccctgatttttacacatcatgtcaaagataacagctgttcccacccaccagttcctctaagcacatactctgcttttctgtcaacatcccattttggggaaaggaaaagtcatatttattcctgcaccccagttttttaacttgttctcccagttgtccccctcttctctgggtgtaagaagggaaattggaaaaaaaattatatatatattctccttttaatggtggggggctactggagaggagagacagcaagtccaccctaacttgttacacagcacataccacaggttctggaattctcatcttcgaacctagagaaataggtgctataaacagggaattaagcaaaatgctggatgctatagatcttttaattgtcttaattttttttctattattaaactacaggctgtagatttcttagttctcacagaacttctatcattttaaactgacttgtatatttaaaaaaaaaatcttcagtaggatgttttgtactattgctagaccctcttctgtaatgggtaatgcgtttgattgtttgagattttctgtttttaaaaatgtagcacttgactttttgccaaggaaaaaaataaaaattattccagtgca

SEQ ID NO: 442428 - DNA, 2800 bp, Homo sapiens
tgccctggaacgattcccagaaacaacctgaatagttgaaacagcctaccaagaaaggccttggcctttccagctacttctgattatttattccagatttaccttttccccaacctatctccttcagtatctaggtcttaccgtttattaacattcacctcctctttctcctgtatacctaggggtggaacagagtgttatttctgtaatcagggcttgattttatgtggcttttatatgagggaagcccatcaaggtgggagtccagaaacaatatccctgccttaccctctctgctgatgccatggttatatctctcctctattttcagctcctctccaccaaactgccatattgccgtgagaatgtgtgtctggcttatggtagtgaatggtcagtttatgcagtgggctcccaagctcatgtctccttcttggatccacggcagccatcatacaacgtcaagtctgtctgttccagggagcgaggcagtggaatccggtcagtgagtttctacgagcacatcatcactgtgggaacagggcagggctccctgctgttctatgacatccgagctcagagatttctggaagagaggctctcagcttgttatgggtccaagcccagactagcaggggagaatctgaaactaaccactggcaaaggctggctgaatcatgatgaaacctggaggaattacttttcagacattgacttcttccccaatgctgtttacacccactgctacgactcgtctggaacgaaactctttgtggcaggaggtcccctcccttcagggctccatggaaactatgctgggctctggagttaatgacaactccccaaatgcagagatttacactaacttccattctcagtttccttgtttcttttgattttttttttcctaattgtgtgaggctcttgtgttttagtgggaacaccaaagtttgcctatagtttaggcacttaataggaagaagctctgtacagaaatctgaaagttgttttgctttttgttttcccctttggtaatcaaaattttactatcttttattatttctggcttttcaaccaaacattgttgctaatccctatttttctttaagtgacacacattctcctgtctctggcttcttcaggctgaaatgacatagtctttctcacccttacttcactcttgagaggtagggctcctttataattacatggttgctctcagactttctgtgaaagtttgggagctgtgtgtgtctgtgtgtgtgtgagagagagatcttgtctgcgtgtgtgtgtgtgatcttgtgtgcctgtaggtactgtgtgtcactgaaattacctggagtgaggattacttgtaattaaaatatttataaaagaaacaactttattcacagagtccagctttgggactagtctgtatcttgttttttaagtctaacaacactgataataggaagtaaaaacagaaaggaaaagaaattaccactgggaaaatctttttagttagattgtaggcttcctggggcctcccatgccaggactgcaaagtgatccagccctacctgtcttcccacctgtgtgtcccccgtgtgggaagttggtgtcacttccccttcccaccctcacatctgcttagccagtagccacacccctaaaacatcagactcaccatccaggtgcagctccagaggctacaaaaggcttcatgggacttgaatccccatcctagcttctctctccttcccctcaagacctgatctggttttaaggggcctggagctgggagtctcaagtctgctaagattcacatccatagcccccgtggctttgaggagaatcctctctgccattcttccaatctccccagtgggttttgctattattttctaaattgggttaagtctaagaaggtgggggtgagcagggggtttatctgtgtgtagtgagtgcttcatgtgtggaatattcattttcttactgcagtgggacttggggttgaagccacccctcctactctgttggcttagccctgagatggtgacaggctggcctgcagtcagcatcattgtgcatgtgacagcatcaatgtgattagtaatttgtctgttcctcccttgaactgtctgtttagtctgaggtttttaaacttgcaggcagctgactgtgatgtccacttgttccctgatttttacacatcatgtcaaagataacagctgttcccacccaccagttcctctaagcacatactctgcttttctgtcaacatcccattttggggaaaggaaaagtcatatttattcctgcaccccagttttttaacttgttctcccagttgtccccctcttctctgggtgtaagaagggaaattggaaaaaaaattatatatatattctccttttaatggtggggggctactggagaggagagacagcaagtccaccctaacttgttacacagcacataccacaggttctggaattctcatcttcgaacctagagaaataggtgctataaacagggaattaagcaaaatgctggatgctatagatcttttaattgtcttaattttttttctattattaaactacaggctgtagatttcttagttctcacagaacttctatcattttaaactgacttgtatatttaaaaaaaaaatcttcagtaggatgttttgtactattgctagaccctcttctgtaatgggtaatgcgtttgattgtttgagattttctgtttttaaaaatgtagcacttgactttttgccaaggaaaaaaataaaaattattccagtgca

SEQ ID NO: 442429 - DNA, 2863 bp, Homo sapiens
tggcgcggcgctgggtgacttcgcgtagcaggcagggaactggccgcggcgagcgggactggccattggagtgctccgctgcggagggaggggaccccgactcgagtaagtttgcgagagcactacgcagtcagtcgggggcagcagcaagatgcgaagcgagccgtacagatcccgggctctccgaacgcaacttcgccctgcttgagcgaggctgcggtttccgaggccctctccagccaaggaaaagctacacaaaaagcctggatcactcatcgaaccacccctgaagccagtgaaggctctctcgcctcgccctctagcgttcgtctggagtagcgccaccccggcttcctggggacacagggttggcaccatggggcccaccagcgtcccgctggtcaaggcccaccgcagctcggtctctgactacgtcaactatgatatcatcgtccggcattacaactacacgggaaagctgaatatcagcgcggacaaggagaacagcattaaactgacctcggtggtgttcattctcatctgctgctttatcatcctggagaacatctttgtcttgctgaccatttggaaaaccaagaaattccaccgacccatgtactattttattggcaatctggccctctcagacctgttggcaggagtagcctacacagctaacctgctcttgtctggggccaccacctacaagctcactcccgcccagtggtttctgcgggaagggagtatgtttgtggccctgtcagcctccgtgttcagtctcctcgccatcgccattgagcgctatatcacaatgctgaaaatgaaactccacaacgggagcaataacttccgcctcttcctgctaatcagcgcctgctgggtcatctccctcatcctgggtggcctgcctatcatgggctggaactgcatcagtgcgctgtccagctgctccaccgtgctgccgctctaccacaagcactatatcctcttctgcaccacggtcttcactctgcttctgctctccatcgtcattctgtactgcagaatctactccttggtcaggactcggagccgccgcctgacgttccgcaagaacatttccaaggccagccgcagctctgagaagtcgctggcgctgctcaagaccgtaattatcgtcctgagcgtcttcatcgcctgctgggcaccgctcttcatcctgctcctgctggatgtgggctgcaaggtgaagacctgtgacatcctcttcagagcggagtacttcctggtgttagctgtgctcaactccggcaccaaccccatcatttacactctgaccaacaaggagatgcgtcgggccttcatccggatcatgtcctgctgcaagtgcccgagcggagactctgctggcaaattcaagcgacccatcatcgccggcatggaattcagccgcagcaaatcggacaattcctcccacccccagaaagacgaaggggacaacccagagaccattatgtcttctggaaacgtcaactcttcttcctagaactggaagctgtccacccaccggaagcgctctttacttggtcgctggccaccccagtgtttggaaaagaagggggagaatacgaacagcctggtggtgtcgggtgttggtgggtagagttagttcctgtgaacaatgcactgggaagggtggagatcaggtcccggcctggaatatattttctacccccctggagctttgattttgcactgagccaaaggtctagcattgtcaagctcctaaagggttcatttggcccctcctcaaagactaatgtccccatgtgaaagcgtctctttgtctggagctttgaggagatgttttccttcactttagtttcaaacccaagtgagtgtgtgcacttctgcttctttagggatgccctgtacatcccacaccccaccctcccttcccttcatacccctcctcaacgttcttttactttatactttaactacctgagagttatcagagctggggttgtggaatgatcgatcatctatagcaaataggctatgttgagtacgtaggctgtgggaagatgaagatggtttggaggtgtaaaacaatgtccttcgctgaggccaaagtttccatgtaagcgggatccgttttttggaatttggttgaagtcactttgatttctttaaaaaacatcttttcaatgaaatgtgttaccatttcatatccattgaagccgaaatctgcataaggaagcccactttatctaaatgatattagccaggatccttggtgtcctaggagaaacagacaagcaaaacaaagtgaaaaccgaatggattaacttttgcaaaccaagggagatttcttagcaaatgagtctaacaaatatgacatctgtctttggcacttttgttgatgtttatttcagaatgttgtgtgattcatttcaagcaacaacatggttgtattttgttgtgttaaaagtacttttcttgatttttgaatgtatttgtttcagcagaagtcattttattggatttttctaacccgtgttaacaccattgaatgtgtatttcttaagaaaataccaccctcttgtgcccttaaaagcattactttaactggtagggaacgccagaaacttttcagtccagctattcattagatagtaattgaagatatgtataaatattacaaagaataaaaatatattactgtctctttagtatggttttcagtgcaattaaaccgagagatgtcttgtttttttaaaaagaatagtatttaataggtttctgacttttgtggatcattttgcacatagctttatcaacttttaaacattaataaactgatttttttaaagaaaaattt

SEQ ID NO: 442430 - DNA, 2867 bp, Homo sapiens
tacagcaaggcggggcgggcctggctgcccacacctcactgcgccctcggaccctaagcacacctgctcctagagagttattaatagagcccccaaatggcttacgctttcaaatgattttcctgcaaatctgatttcttgcatggcacatggcaattaggaggctgcggtttccgaggccctctccagccaaggaaaagctacacaaaaagcctggatcactcatcgaaccacccctgaagccagtgaaggctctctcgcctcgccctctagcgttcgtctggagtagcgccaccccggcttcctggggacacagggttggcaccatggggcccaccagcgtcccgctggtcaaggcccaccgcagctcggtctctgactacgtcaactatgatatcatcgtccggcattacaactacacgggaaagctgaatatcagcgcggacaaggagaacagcattaaactgacctcggtggtgttcattctcatctgctgctttatcatcctggagaacatctttgtcttgctgaccatttggaaaaccaagaaattccaccgacccatgtactattttattggcaatctggccctctcagacctgttggcaggagtagcctacacagctaacctgctcttgtctggggccaccacctacaagctcactcccgcccagtggtttctgcgggaagggagtatgtttgtggccctgtcagcctccgtgttcagtctcctcgccatcgccattgagcgctatatcacaatgctgaaaatgaaactccacaacgggagcaataacttccgcctcttcctgctaatcagcgcctgctgggtcatctccctcatcctgggtggcctgcctatcatgggctggaactgcatcagtgcgctgtccagctgctccaccgtgctgccgctctaccacaagcactatatcctcttctgcaccacggtcttcactctgcttctgctctccatcgtcattctgtactgcagaatctactccttggtcaggactcggagccgccgcctgacgttccgcaagaacatttccaaggccagccgcagctctgagaagtcgctggcgctgctcaagaccgtaattatcgtcctgagcgtcttcatcgcctgctgggcaccgctcttcatcctgctcctgctggatgtgggctgcaaggtgaagacctgtgacatcctcttcagagcggagtacttcctggtgttagctgtgctcaactccggcaccaaccccatcatttacactctgaccaacaaggagatgcgtcgggccttcatccggatcatgtcctgctgcaagtgcccgagcggagactctgctggcaaattcaagcgacccatcatcgccggcatggaattcagccgcagcaaatcggacaattcctcccacccccagaaagacgaaggggacaacccagagaccattatgtcttctggaaacgtcaactcttcttcctagaactggaagctgtccacccaccggaagcgctctttacttggtcgctggccaccccagtgtttggaaaaaaatctctgggcttcgactgctgccagggaggagctgctgcaagccagagggaggaagggggagaatacgaacagcctggtggtgtcgggtgttggtgggtagagttagttcctgtgaacaatgcactgggaagggtggagatcaggtcccggcctggaatatattttctacccccctggagctttgattttgcactgagccaaaggtctagcattgtcaagctcctaaagggttcatttggcccctcctcaaagactaatgtccccatgtgaaagcgtctctttgtctggagctttgaggagatgttttccttcactttagtttcaaacccaagtgagtgtgtgcacttctgcttctttagggatgccctgtacatcccacaccccaccctcccttcccttcatacccctcctcaacgttcttttactttatactttaactacctgagagttatcagagctggggttgtggaatgatcgatcatctatagcaaataggctatgttgagtacgtaggctgtgggaagatgaagatggtttggaggtgtaaaacaatgtccttcgctgaggccaaagtttccatgtaagcgggatccgttttttggaatttggttgaagtcactttgatttctttaaaaaacatcttttcaatgaaatgtgttaccatttcatatccattgaagccgaaatctgcataaggaagcccactttatctaaatgatattagccaggatccttggtgtcctaggagaaacagacaagcaaaacaaagtgaaaaccgaatggattaacttttgcaaaccaagggagatttcttagcaaatgagtctaacaaatatgacatctgtctttggcacttttgttgatgtttatttcagaatgttgtgtgattcatttcaagcaacaacatggttgtattttgttgtgttaaaagtacttttcttgatttttgaatgtatttgtttcagcagaagtcattttattggatttttctaacccgtgttaacaccattgaatgtgtatttcttaagaaaataccaccctcttgtgcccttaaaagcattactttaactggtagggaacgccagaaacttttcagtccagctattcattagatagtaattgaagatatgtataaatattacaaagaataaaaatatattactgtctctttagtatggttttcagtgcaattaaaccgagagatgtcttgtttttttaaaaagaatagtatttaataggtttctgacttttgtggatcattttgcacatagctttatcaacttttaaacattaataaactgatttttttaaagaaaaattt

SEQ ID NO: 442431 - DNA, 1279 bp, Homo sapiens
aaattaggctaggtacgaggcctggtgtgtaatcggccgaggcggtgttggtgggtagagttagttcctgtgaacaatgcactgggaagggtggagatcaggtcccggcctggaatatattttctacccccctggagctttgattttgcactgagccaaaggtctagcattgtcaagctcctaaagggttcatttggcccctcctcaaagactaatgtccccatgtgaaagcgtctctttgtctggagctttgaggagatgttttccttcactttagtttcaaacccaagtgagtgtgtgcacttctgcttctttagggatgccctgtacatcccacaccccaccctcccttcccttcatacccctcctcaacgttcttttactttatactttaactacctgagagttatcagagctggggttgtggaatgatcgatcatctatagcaaataggctatgttgagtacgtaggctgtgggaagatgaagatggtttggaggtgtaaaacaatgtccttcgctgaggccaaagtttccatgtaagcgggatccgttttttggaatttggttgaagtcactttgatttctttaaaaaacatcttttcaatgaaatgtgttaccatttcatatccattgaagccgaaatctgcataaggaagcccactttatctaaatgatattagccaggatccttggtgtcctaggagaaacagacaagcaaaacaaagtgaaaaccgaatggattaacttttgcaaaccaagggagatttcttagcaaatgagtctaacaaatatgacatctgtctttggcacttttgttgatgtttatttcagaatgttgtgtgattcatttcaagcaacaacatggttgtattttgttgtgttaaaagtacttttcttgatttttgaatgtatttgtttcagcagaagtcattttattggatttttctaacccgtgttaacaccattgaatgtgtatttcttaagaaaataccaccctcttgtgcccttaaaagcattactttaactggtagggaacgccagaaacttttcagtccagctattcattagatagtaattgaagatatgtataaatattacaaagaataaaaatatattactgtctctttagtatggttttcagtgcaattaaaccgagagatgtcttgtttttttaaaaagaatagtatttaataggtttctgacttttgtggatcattttgcacatagctttatcaacttttaaacattaataaactgatttttttaaagaaaaattt

SEQ ID NO: 442432 - DNA, 1105 bp, Homo sapiens
gagagagagagagagagagagagagagagagagagagagagagagagagagagagagcgtctctttgtctggagctttgaggagatgttttccttcactttagtttcaaacccaagtgagtgtgtgcacttctgcttctttagggatgccctgtacatcccacaccccaccctcccttcccttcatacccctcctcaacgttcttttactttatactttaactacctgagagttatcagagctggggttgtggaatgatcgatcatctatagcaaataggctatgttgagtacgtaggctgtgggaagatgaagatggtttggaggtgtaaaacaatgtccttcgctgaggccaaagtttccatgtaagcgggatccgttttttggaatttggttgaagtcactttgatttctttaaaaaacatcttttcaatgaaatgtgttaccatttcatatccattgaagccgaaatctgcataaggaagcccactttatctaaatgatattagccaggatccttggtgtcctaggagaaacagacaagcaaaacaaagtgaaaaccgaatggattaacttttgcaaaccaagggagatttcttagcaaatgagtctaacaaatatgacatctgtctttggcacttttgttgatgtttatttcagaatgttgtgtgattcatttcaagcaacaacatggttgtattttgttgtgttaaaagtacttttcttgatttttgaatgtatttgtttcagcagaagtcattttattggatttttctaacccgtgttaacaccattgaatgtgtatttcttaagaaaataccaccctcttgtgcccttaaaagcattactttaactggtagggaacgccagaaacttttcagtccagctattcattagatagtaattgaagatatgtataaatattacaaagaataaaaatatattactgtctctttagtatggttttcagtgcaattaaaccgagagatgtcttgtttttttaaaaagaatagtatttaataggtttctgacttttgtggatcattttgcacatagctttatcaacttttaaacattaataaactgatttttttaaagaaaaattt

SEQ ID NO: 442433 - DNA, 995 bp, Homo sapiens
  misc_feature (60)..(60): n is a, c, g, or t
gtgaacacagtcattatggaaataatgctctgaggtatcgaaaaagtatttgggattaancctcccttcccttcatacccctcctcaacgttcttttactttatactttaactacctgagagttatcagagctggggttgtggaatgatcgatcatctatagcaaataggctatgttgagtacgtaggctgtgggaagatgaagatggtttggaggtgtaaaacaatgtccttcgctgaggccaaagtttccatgtaagcgggatccgttttttggaatttggttgaagtcactttgatttctttaaaaaacatcttttcaatgaaatgtgttaccatttcatatccattgaagccgaaatctgcataaggaagcccactttatctaaatgatattagccaggatccttggtgtcctaggagaaacagacaagcaaaacaaagtgaaaaccgaatggattaacttttgcaaaccaagggagatttcttagcaaatgagtctaacaaatatgacatctgtctttggcacttttgttgatgtttatttcagaatgttgtgtgattcatttcaagcaacaacatggttgtattttgttgtgttaaaagtacttttcttgatttttgaatgtatttgtttcagcagaagtcattttattggatttttctaacccgtgttaacaccattgaatgtgtatttcttaagaaaataccaccctcttgtgcccttaaaagcattactttaactggtagggaacgccagaaacttttcagtccagctattcattagatagtaattgaagatatgtataaatattacaaagaataaaaatatattactgtctctttagtatggttttcagtgcaattaaaccgagagatgtcttgtttttttaaaaagaatagtatttaataggtttctgacttttgtggatcattttgcacatagctttatcaacttttaaacattaataaactgatttttttaaagaaaaattt

SEQ ID NO: 442434 - DNA, 2917 bp, Homo sapiens
tggcgcggcgctgggtgacttcgcgtagcaggcagggaactggccgcggcgagcgggactggccattggagtgctccgctgcggagggaggggaccccgactcgagtaagtttgcgagagcactacgcagtcagtcgggggcagcagcaagatgcgaagcgagccgtacagatcccgggctctccgaacgcaacttcgccctgcttgagcgaggctgcggtttccgaggccctctccagccaaggaaaagctacacaaaaagcctggatcactcatcgaaccacccctgaagccagtgaaggctctctcgcctcgccctctagcgttcgtctggagtagcgccaccccggcttcctggggacacagggttggcaccatggggcccaccagcgtcccgctggtcaaggcccaccgcagctcggtctctgactacgtcaactatgatatcatcgtccggcattacaactacacgggaaagctgaatatcagcgcggacaaggagaacagcattaaactgacctcggtggtgttcattctcatctgctgctttatcatcctggagaacatctttgtcttgctgaccatttggaaaaccaagaaattccaccgacccatgtactattttattggcaatctggccctctcagacctgttggcaggagtagcctacacagctaacctgctcttgtctggggccaccacctacaagctcactcccgcccagtggtttctgcgggaagggagtatgtttgtggccctgtcagcctccgtgttcagtctcctcgccatcgccattgagcgctatatcacaatgctgaaaatgaaactccacaacgggagcaataacttccgcctcttcctgctaatcagcgcctgctgggtcatctccctcatcctgggtggcctgcctatcatgggctggaactgcatcagtgcgctgtccagctgctccaccgtgctgccgctctaccacaagcactatatcctcttctgcaccacggtcttcactctgcttctgctctccatcgtcattctgtactgcagaatctactccttggtcaggactcggagccgccgcctgacgttccgcaagaacatttccaaggccagccgcagctctgagaagtcgctggcgctgctcaagaccgtaattatcgtcctgagcgtcttcatcgcctgctgggcaccgctcttcatcctgctcctgctggatgtgggctgcaaggtgaagacctgtgacatcctcttcagagcggagtacttcctggtgttagctgtgctcaactccggcaccaaccccatcatttacactctgaccaacaaggagatgcgtcgggccttcatccggatcatgtcctgctgcaagtgcccgagcggagactctgctggcaaattcaagcgacccatcatcgccggcatggaattcagccgcagcaaatcggacaattcctcccacccccagaaagacgaaggggacaacccagagaccattatgtcttctggaaacgtcaactcttcttcctagaactggaagctgtccacccaccggaagcgctctttacttggtcgctggccaccccagtgtttggaaaaaaatctctgggcttcgactgctgccagggaggagctgctgcaagccagagggaggaagggggagaatacgaacagcctggtggtgtcgggtgttggtgggtagagttagttcctgtgaacaatgcactgggaagggtggagatcaggtcccggcctggaatatattttctacccccctggagctttgattttgcactgagccaaaggtctagcattgtcaagctcctaaagggttcatttggcccctcctcaaagactaatgtccccatgtgaaagcgtctctttgtctggagctttgaggagatgttttccttcactttagtttcaaacccaagtgagtgtgtgcacttctgcttctttagggatgccctgtacatcccacaccccaccctcccttcccttcatacccctcctcaacgttcttttactttatactttaactacctgagagttatcagagctggggttgtggaatgatcgatcatctatagcaaataggctatgttgagtacgtaggctgtgggaagatgaagatggtttggaggtgtaaaacaatgtccttcgctgaggccaaagtttccatgtaagcgggatccgttttttggaatttggttgaagtcactttgatttctttaaaaaacatcttttcaatgaaatgtgttaccatttcatatccattgaagccgaaatctgcataaggaagcccactttatctaaatgatattagccaggatccttggtgtcctaggagaaacagacaagcaaaacaaagtgaaaaccgaatggattaacttttgcaaaccaagggagatttcttagcaaatgagtctaacaaatatgacatctgtctttggcacttttgttgatgtttatttcagaatgttgtgtgattcatttcaagcaacaacatggttgtattttgttgtgttaaaagtacttttcttgatttttgaatgtatttgtttcagcagaagtcattttattggatttttctaacccgtgttaacaccattgaatgtgtatttcttaagaaaataccaccctcttgtgcccttaaaagcattactttaactggtagggaacgccagaaacttttcagtccagctattcattagatagtaattgaagatatgtataaatattacaaagaataaaaatatattactgtctctttagtatggttttcagtgcaattaaaccgagagatgtcttgtttttttaaaaagaatagtatttaataggtttctgacttttgtggatcattttgcacatagctttatcaacttttaaacattaataaactgatttttttaaagaaaaattt

SEQ ID NO: 442435 - DNA, 2809 bp, Homo sapiens
tggcgcggcgctgggtgacttcgcgtagcaggcagggaactggccgcggcgagcgggactggccattggagtgctccgctgcggagggaggggaccccgactcgagctgcggtttccgaggccctctccagccaaggaaaagctacacaaaaagcctggatcactcatcgaaccacccctgaagccagtgaaggctctctcgcctcgccctctagcgttcgtctggagtagcgccaccccggcttcctggggacacagggttggcaccatggggcccaccagcgtcccgctggtcaaggcccaccgcagctcggtctctgactacgtcaactatgatatcatcgtccggcattacaactacacgggaaagctgaatatcagcgcggacaaggagaacagcattaaactgacctcggtggtgttcattctcatctgctgctttatcatcctggagaacatctttgtcttgctgaccatttggaaaaccaagaaattccaccgacccatgtactattttattggcaatctggccctctcagacctgttggcaggagtagcctacacagctaacctgctcttgtctggggccaccacctacaagctcactcccgcccagtggtttctgcgggaagggagtatgtttgtggccctgtcagcctccgtgttcagtctcctcgccatcgccattgagcgctatatcacaatgctgaaaatgaaactccacaacgggagcaataacttccgcctcttcctgctaatcagcgcctgctgggtcatctccctcatcctgggtggcctgcctatcatgggctggaactgcatcagtgcgctgtccagctgctccaccgtgctgccgctctaccacaagcactatatcctcttctgcaccacggtcttcactctgcttctgctctccatcgtcattctgtactgcagaatctactccttggtcaggactcggagccgccgcctgacgttccgcaagaacatttccaaggccagccgcagctctgagaagtcgctggcgctgctcaagaccgtaattatcgtcctgagcgtcttcatcgcctgctgggcaccgctcttcatcctgctcctgctggatgtgggctgcaaggtgaagacctgtgacatcctcttcagagcggagtacttcctggtgttagctgtgctcaactccggcaccaaccccatcatttacactctgaccaacaaggagatgcgtcgggccttcatccggatcatgtcctgctgcaagtgcccgagcggagactctgctggcaaattcaagcgacccatcatcgccggcatggaattcagccgcagcaaatcggacaattcctcccacccccagaaagacgaaggggacaacccagagaccattatgtcttctggaaacgtcaactcttcttcctagaactggaagctgtccacccaccggaagcgctctttacttggtcgctggccaccccagtgtttggaaaaaaatctctgggcttcgactgctgccagggaggagctgctgcaagccagagggaggaagggggagaatacgaacagcctggtggtgtcgggtgttggtgggtagagttagttcctgtgaacaatgcactgggaagggtggagatcaggtcccggcctggaatatattttctacccccctggagctttgattttgcactgagccaaaggtctagcattgtcaagctcctaaagggttcatttggcccctcctcaaagactaatgtccccatgtgaaagcgtctctttgtctggagctttgaggagatgttttccttcactttagtttcaaacccaagtgagtgtgtgcacttctgcttctttagggatgccctgtacatcccacaccccaccctcccttcccttcatacccctcctcaacgttcttttactttatactttaactacctgagagttatcagagctggggttgtggaatgatcgatcatctatagcaaataggctatgttgagtacgtaggctgtgggaagatgaagatggtttggaggtgtaaaacaatgtccttcgctgaggccaaagtttccatgtaagcgggatccgttttttggaatttggttgaagtcactttgatttctttaaaaaacatcttttcaatgaaatgtgttaccatttcatatccattgaagccgaaatctgcataaggaagcccactttatctaaatgatattagccaggatccttggtgtcctaggagaaacagacaagcaaaacaaagtgaaaaccgaatggattaacttttgcaaaccaagggagatttcttagcaaatgagtctaacaaatatgacatctgtctttggcacttttgttgatgtttatttcagaatgttgtgtgattcatttcaagcaacaacatggttgtattttgttgtgttaaaagtacttttcttgatttttgaatgtatttgtttcagcagaagtcattttattggatttttctaacccgtgttaacaccattgaatgtgtatttcttaagaaaataccaccctcttgtgcccttaaaagcattactttaactggtagggaacgccagaaacttttcagtccagctattcattagatagtaattgaagatatgtataaatattacaaagaataaaaatatattactgtctctttagtatggttttcagtgcaattaaaccgagagatgtcttgtttttttaaaaagaatagtatttaataggtttctgacttttgtggatcattttgcacatagctttatcaacttttaaacattaataaactgatttttttaaagaaaaattt

SEQ ID NO: 442436 - DNA, 481 bp, Homo sapiens
tactactactaaattcgcggccgcgtcgaccgacagaaggggagcctgttaataaaggctttgtgacaagctctcaaaaaatgcatttctaaataggaggacatcaatgtattgatgaagagaaaaaactagtacttagttgccacactcatgcttacatagaaagagagcccaagaatattagatttcctcatgatacaagatactacagtaacaggctttaatttaggatccttaagattttggggtattatttgtgactctcctgaaattgtaaacttgtgcttctgtgtccagttttctaatgagtaggttcgtagcttgattgaattaataattgtgagcccatagacacaagggaagtgagaaacagtgctctggtgacatgataaatatatgtgtcaaccaccatttcagctattaaaaactcctgttatctccttgtttgaatttcaggtcattaaattgtataaccatcatt

SEQ ID NO: 442437 - DNA, 468 bp, Homo sapiens
taggtaaatagctataagccaaggcaactgagctaagaacagtatccacttatatcagtcatttattgatgccccctatggtttcatcttaatgttattttcctagaagtagttatgtgaagggccaaataacagcatagaaaaacactgctcagtgtttttctcttttttgattgtcaaattatcaagccgtattgaatattgtttttcaggtttccctagaaagagaacgacaacatgatcaaacacatgttcagagccaacttgaaaaattggatcttcttgaacaggagtataacaaacttaccacaatgcaggcccttgcagaagtcagtgcatgtgtctttttattgttaacatatatcagggtggtttttttttaatgttaattattttacatcactggatatttatagcattaaaagtgatcttataatgaagaaatatattggagttttaaaaagaaaa

SEQ ID NO: 442438 - DNA, 448 bp, Homo sapiens
agagccggcctgtaaccccggcgttgtctgccccagcggccccgttacgcgctaccttgtgacgtcaccagggaagaggcggattctctcctactacagaaagacgtctgctgttttgattggctaggaaagacgtccgttaggacgtgttgccctttctgtgggttcagcctagggtccccgctggtgggcggctcccgagtcttggagaagagcacgagaacctagaccgcccccgaagtgcggagaccccctgggcaggctgaaagatggcggcggcgtctgtctctgcggcttctggttctcacttgtcggtcctttgaccaagctgcacagtagctccatattaatttcccttaaaaatgttttatggctatcatacattttataatattaaatataagatttactttttgagaataataaaatgaataccttcatgttcctc

SEQ ID NO: 442439 - DNA, 3125 bp, Homo sapiens
tactactactaaattcgcggccgcgtcgaccgacagaaggggagacgtccgttaggacgtgttgccctttctgtgtaagctgtgagcgtaggcggccctgagggggtgtgttgcaggggtttccaagcccagcaccagcacccttgcccttttccatcaggggttcagcctagggtccccgctggtgggcggctcccgagtcttggagaagagcacgagaacctagaccgcccccgaagtgcggagaccccctgggcaggctgaaagatggcggcggcgtctgtctctgcggcttctggttctcacttgtcgaacagctttgctgagccatcaaggtctaatggaagcatggttcggcattcttcatctccatatgtagtatatccttcggataagcctttccttaatagtgatctacgacgctccccaagtaagcctacacttgcctatccagaaagcaacagcagagccatattttctgctcttaagaatcttcaagataagattcgacgcttggaacttgagaggattcaggcagaagaaagtgtgaaaaccttgtctagagaaacaattgaatataagaaagtactggatgaacagatacaagaaagggagaattcaaagaatgaggaatcaaagcacaatcaagaactgacatctcagttgttagctgcagaaaataaatgcaatctattagaaaaacaattggaatacatgcgaaatatgataaagcatgccgaaatggagaggacatctgtcttagagaaacaagtttccctagaaagagaacgacaacatgatcaaacacatgttcagagccaacttgaaaaattggatcttcttgaacaggagtataacaaacttaccacaatgcaggcccttgcagaaaaaaaaatgcaagagttggaagcaaaactccatgaagaagaacaggaaaggaaacgcatgcaagctaaggcagctgagttgcagactggtctagaaacaaatagacttatctttgaagataaggcaactccgtgtgttcccaatgcaagaagaattaaaaaaaagaagtcaaaaccaccagaaaagtccacaagccctagccatgccgtggtagccaatgttcagcttgtcttgcatctaatgaagcaacacagtaaagctttgtgcaatgatcgagtcatcaacagtattcctttggcaaagcaagtatcttcacgaggtggtaaaagtaagaagttgtcagtaacacctccctcctccaacggtattaatgaggagttgtcagaagtcttacagactttacaggatgaatttgggcaaatgagctttgatcaccagcagcttgcaaaacttatccaggagtcgccaaccgttgaactgaaagacaagttggagtgtgaattggaggcattagtgggaaggatggaagcaaaagccaaccaaataactaaagttcgaaaataccaagcccagctggagaaacagaagttagagaagcagaagaaggaattaaaagctaccaaaaagactcttgatgaagaaagaaacagcagcagccgttctggaatcacagggaccacaaataagaaagattttatgaaactgagacctggagaaaaaaggagaaaaaatcttcagttattgaaggacatgcaaagcatacagaattcattacaaagcagtagtttgtgttgggattactgactcataaccaggtcagaaattttattcagataatctgtacctcatcaatcagatgatgacaatttacttcccaggtctcatactcacttatgttggaattaattaatagcaggtgttaaaggacccaggcttcattacacaggcttttcatgtatgcaggatgactcaatgttaaagcatttaaatggaaaccaggggagttttaaagcccgagaaaccacacataatcttttgttgagatgagtttgctgtactgacgctgcactttgtaaacagattaccagttttttacttgtgggtgtgattttttaaaatagttctttatatataattaaaattaggtttaaattttcaaaatatgagactatgctataggcagtgcttgcttgaaaagtctcatttttaaatctccctggcatgaggtgcccacttcccctttccaaagcaaccattaaacatactttgtttctactattggtggagtttttctatatttaaaaatacatatatatttcagaggatttttattttgctttttggcatttcagactttgatcagtgttaagtgcacttgtattgctttttaatctgttaattttttaaagacccaagcagtcattttgagttatatctataaaaattataaaaggatttttgaaagtataaacaaattgtcagtgaaataaatgagattttggaataaagtgagaatgggagaagggatatgttgtgagcatataccttcacagttcttaatacctgttttgtaatcatgatattcagtcaaggcattatggtttttaatcttgaaacttagagaaccctttgaatatttgcttttactggtgtacagtatgagtggaatatgaactgtacacataattatcatgttgatataaatcataatttcaactagatcaagacatgttaaccttttataaatttaaagtcaataaagcacctttttaaaggaaacactgcaactttccttaacagcctgttaataaaggctttgtgacaagctctcaaaaaatgcatttctaaataggaggacatcaatgtattgatgaagagaaaaaactagtacttagttgccacactcatgcttacatagaaagagagcccaagaatattagatttcctcatgatacaagatactacagtaacaggctttaatttaggatccttaagattttggggtattatttgtgactctcctgaaattgtaaacttgtgcttctgtgtccagttttctaatgagtaggttcgtagcttgattgaattaataattgtgagcccatagacacaagggaagtgagaaacagtgctctggtgacatgataaatatatgtgtcaaccaccatttcagctattaaaaactcctgttatctccttgtttgaatttcaggtcattaaattgtataaccatcatt

SEQ ID NO: 442440 - DNA, 3203 bp, Homo sapiens
tactactactaaattcgcggccgcgtcgaccgacagaaggggagacgtccgttaggacgtgttgccctttctgtgtaagctgtgagcgtaggcggccctgagggggtgtgttgcaggggtttccaagcccagcaccagcacccttgcccttttccatcaggggttcagcctagggtccccgctggtgggcggctcccgagtcttggagaagagcacgagaacctagaccgcccccgaagtgcggagaccccctgggcaggctgaaagatggcggcggcgtctgtctctgcggcttctggttctcacttgtcgaacagctttgctgagccatcaaggtctaatggaagcatggttcggcattcttcatctccatatgtagtatatccttcggataagcctttccttaatagtgatctacgacgctccccaagtaagcctacacttgcctatccagaaagcaacagcagagccatattttctgctcttaagaatcttcaagataagattcgacgcttggaacttgagaggattcaggcagaagaaagtgtgaaaaccttgtctagagaaacaattgaatataagaaagtactggatgaacagatacaagaaagggagaattcaaagaatgaggaatcaaagcacaatcaagaactgacatctcagttgttagctgcagaaaataaatgcaatctattagaaaaacaattggaatacatgcgaaatatgataaagcatgccgaaatggagaggacatctgtcttagagaaacaagtttccctagaaagagaacgacaacatgatcaaacacatgttcagagccaacttgaaaaattggatcttcttgaacaggagtataacaaacttaccacaatgcaggcccttgcagaaaaaaaaatgcaagagttggaagcaaaactccatgaagaagaacaggaaaggaaacgcatgcaagctaaggcagctgagttgcagactggtctagaaacaaatagacttatctttgaagataaggcaactccgtgtgttcccaatgcaagaagaattaaaaaaaagaagtcaaaaccaccagaaaagaaaagttctaggaactattttggtgcacaaccacattatagattatgcttgggtgatatgccatttgtagctgggaagtccacaagccctagccatgccgtggtagccaatgttcagcttgtcttgcatctaatgaagcaacacagtaaagctttgtgcaatgatcgagtcatcaacagtattcctttggcaaagcaagtatcttcacgaggtggtaaaagtaagaagttgtcagtaacacctccctcctccaacggtattaatgaggagttgtcagaagtcttacagactttacaggatgaatttgggcaaatgagctttgatcaccagcagcttgcaaaacttatccaggagtcgccaaccgttgaactgaaagacaagttggagtgtgaattggaggcattagtgggaaggatggaagcaaaagccaaccaaataactaaagttcgaaaataccaagcccagctggagaaacagaagttagagaagcagaagaaggaattaaaagctaccaaaaagactcttgatgaagaaagaaacagcagcagccgttctggaatcacagggaccacaaataagaaagattttatgaaactgagacctggagaaaaaaggagaaaaaatcttcagttattgaaggacatgcaaagcatacagaattcattacaaagcagtagtttgtgttgggattactgactcataaccaggtcagaaattttattcagataatctgtacctcatcaatcagatgatgacaatttacttcccaggtctcatactcacttatgttggaattaattaatagcaggtgttaaaggacccaggcttcattacacaggcttttcatgtatgcaggatgactcaatgttaaagcatttaaatggaaaccaggggagttttaaagcccgagaaaccacacataatcttttgttgagatgagtttgctgtactgacgctgcactttgtaaacagattaccagttttttacttgtgggtgtgattttttaaaatagttctttatatataattaaaattaggtttaaattttcaaaatatgagactatgctataggcagtgcttgcttgaaaagtctcatttttaaatctccctggcatgaggtgcccacttcccctttccaaagcaaccattaaacatactttgtttctactattggtggagtttttctatatttaaaaatacatatatatttcagaggatttttattttgctttttggcatttcagactttgatcagtgttaagtgcacttgtattgctttttaatctgttaattttttaaagacccaagcagtcattttgagttatatctataaaaattataaaaggatttttgaaagtataaacaaattgtcagtgaaataaatgagattttggaataaagtgagaatgggagaagggatatgttgtgagcatataccttcacagttcttaatacctgttttgtaatcatgatattcagtcaaggcattatggtttttaatcttgaaacttagagaaccctttgaatatttgcttttactggtgtacagtatgagtggaatatgaactgtacacataattatcatgttgatataaatcataatttcaactagatcaagacatgttaaccttttataaatttaaagtcaataaagcacctttttaaaggaaacactgcaactttccttaacagcctgttaataaaggctttgtgacaagctctcaaaaaatgcatttctaaataggaggacatcaatgtattgatgaagagaaaaaactagtacttagttgccacactcatgcttacatagaaagagagcccaagaatattagatttcctcatgatacaagatactacagtaacaggctttaatttaggatccttaagattttggggtattatttgtgactctcctgaaattgtaaacttgtgcttctgtgtccagttttctaatgagtaggttcgtagcttgattgaattaataattgtgagcccatagacacaagggaagtgagaaacagtgctctggtgacatgataaatatatgtgtcaaccaccatttcagctattaaaaactcctgttatctccttgtttgaatttcaggtcattaaattgtataaccatcatt

SEQ ID NO: 442441 - DNA, 3149 bp, Homo sapiens
tactactactaaattcgcggccgcgtcgaccgacagaaggggagacgtccgttaggacgtgttgccctttctgtgtaagctgtgagcgtaggcggccctgagggggtgtgttgcaggggtttccaagcccagcaccagcacccttgcccttttccatcaggggttcagcctagggtccccgctggtgggcggctcccgagtcttggagaagagcacgagaacctagaccgcccccgaagtgcggagaccccctgggcaggctgaaagatggcggcggcgtctgtctctgcggcttctggttctcacttgtcgaacagctttgctgagccatcaaggtctaatggaagcatggttcggcattcttcatctccatatgtagtatatccttcggataagcctttccttaatagtgatctacgacgctccccaagtaagcctacacttgcctatccagaaagcaacagcagagccatattttctgctcttaagaatcttcaagataagattcgacgcttggaacttgagaggattcaggcagaagaaagtgtgaaaaccttgtctagagaaacaattgaatataagaaagtactggatgaacagatacaagaaagggagaattcaaagaatgaggaatcaaagcacaatcaagaactgacatctcagttgttagctgcagaaaataaatgcaatctattagaaaaacaattggaatacatgcgaaatatgataaagcatgccgaaatggagaggacatctgtcttagagaaacaagtttccctagaaagagaacgacaacatgatcaaacacatgttcagagccaacttgaaaaattggatcttcttgaacaggagtataacaaacttaccacaatgcaggcccttgcagaaaaaaaaatgcaagagttggaagcaaaactccatgaagaagaacaggaaaggaaacgcatgcaagctaaggcagctgagttgcagactggtctagaaacaaatagacttatctttgaagataaggcaactccgtgtgttcccaatgcaagaagaattaaaaaaaagaagtcaaaaccaccagaaaagaaaagttctaggaactattttggtgcacaaccacattatagattatgcttgggtgatatgccatttgtagctgggaagtccacaagccctagccatgccgtggtagccaatgttcagcttgtcttgcatctaatgaagcaacacagtaaagctttgtgcaatgatcgagtcatcaacagtattcctttggcaaagcaagtatcttcacgaggtggtaaaagtaagaagttgtcagtaacacctccctcctccaacggtattaatgaggagttgtcagaagtcttacagactttacaggatgaatttgggcaaatgagctttgatcaccagcagcttgcaaaacttatccaggagtcgccaaccgttgaactgaaagacaagttggagtgtgaattggaggcattagtgggaaggatggaagcaaaagccaaccaaataactaaagttcgaaaataccaagcccagctggagaaacagaagttagagaagcagaagaaggaattaaaagctaccaaaaagactcttgatgaagaaagaaacagcagcagccgttctggaatcacagggaccacaaataagaaagattttatgaaactgagacctggagaaaaaaggagaaaaaatcttcagttattgaaggacatgcaaagcatacagaattcattacaaagcagtagtttgtgttgggattactgactcataaccaggtcagaaattttattcagataatctgtacctcatcaatcagatgatgacaatttacttcccaggtctcatactcacttatgttggaattaattaatagcaggtgttaaaggacccaggcttcattacacaggcttttcatgtatgcaggatgactcaatgttaaagcatttaaatggaaaccaggggagttttaaagcccgagaaaccacacataatcttttgttgagatgagtttgctgtactgacgctgcactttgtaaacagattaccagttttttacttgtgggtgtgattttttaaaatagttctttatatataattaaaattaggtttaaattttcaaaatatgagactatgctataggcagtgcttgcttgaaaagtctcatttttaaatctccctggcatgaggtgcccacttcccctttccaaagcaaccattaaacatactttgtttctactattggtggagtttttctatatttaaaaatacatatatatttcagaggatttttattttgctttttggcatttcagactttgatcagtgttaagtgcacttgtattgctttttaatctgttaattttttaaagacccaagcagtcattttgagttatatctataaaaattataataaagtgagaatgggagaagggatatgttgtgagcatataccttcacagttcttaatacctgttttgtaatcatgatattcagtcaaggcattatggtttttaatcttgaaacttagagaaccctttgaatatttgcttttactggtgtacagtatgagtggaatatgaactgtacacataattatcatgttgatataaatcataatttcaactagatcaagacatgttaaccttttataaatttaaagtcaataaagcacctttttaaaggaaacactgcaactttccttaacagcctgttaataaaggctttgtgacaagctctcaaaaaatgcatttctaaataggaggacatcaatgtattgatgaagagaaaaaactagtacttagttgccacactcatgcttacatagaaagagagcccaagaatattagatttcctcatgatacaagatactacagtaacaggctttaatttaggatccttaagattttggggtattatttgtgactctcctgaaattgtaaacttgtgcttctgtgtccagttttctaatgagtaggttcgtagcttgattgaattaataattgtgagcccatagacacaagggaagtgagaaacagtgctctggtgacatgataaatatatgtgtcaaccaccatttcagctattaaaaactcctgttatctccttgtttgaatttcaggtcattaaattgtataaccatcatt

SEQ ID NO: 442442 - DNA, 2241 bp, Homo sapiens
tactactactaaattcgcggccgcgtcgaccgacagaaggggagacgtccgttaggacgtgttgccctttctgtgtaagctgtgagcgtaggcggccctgagggggtgtgttgcaggggtttccaagcccagcaccagcacccttgcccttttccatcaggggttcagcctagggtccccgctggtgggcggctcccgagtcttggagaagagcacgagaacctagaccgcccccgaagtgcggagaccccctgggcaggctgaaagatggcggcggcgtctgtctctgcggcttctggttctcacttgtcgaacagctttgctgagccatcaaggtctaatggaagcatggttcggcattcttcatctccatatgtagtatatccttcggataagcctttccttaatagtgatctacgacgctccccaagtaagcctacacttgcctatccagaaagcaacagcagagccatattttctgctcttaagaatcttcaagataagattcgacgcttggaacttgagaggattcaggcagaagaaagtgtgaaaaccttgtctagagaaacaattgaatataagaaagtactggatgaacagatacaagaaagggagaattcaaagaatgaggaatcaaagcacaatcaagaactgacatctcagttgttagctgcagaaaataaatgcaatctattagaaaaacaattggaatacatgcgaaatatgataaagcatgccgaaatggagaggacatctgtcttagagaaacaagtttccctagaaagagaacgacaacatgatcaaacacatgttcagagccaacttgaaaaattggatcttcttgaacaggagtataacaaacttaccacaatgcaggcccttgcagaaaaaaaaatgcaagagttggaagcaaaactccatgaagaagaacaggaaaggaaacgcatgcaagctaaggcagctgagttgcagactggtctagaaacaaatagacttatctttgaagataaggcaactccgtgtgttcccaatgcaagaagaattaaaaaaaagaagtcaaaaccaccagaaaagaaaagttctaggaactattttggtgcacaaccacattatagattatgcttgggtgatatgccatttgtagctgggaagtccacaagccctagccatgccgtggtagccaatgttcagcttgtcttgcatctaatgaagcaacacagtaaagctttgtgcaatgatcgagtcatcaacagtattcctttggcaaagcaagtatcttcacgaggtggtaaaagtaagaagttgtcagtaacacctccctcctccaacggtattaatgaggagttgtcagaagtcttacagactttacaggatgaatttgggcaaatgagctttgatcaccagcagcttgcaaaacttatccaggagtcgccaaccgttgaactgaaagacaagttggagtgtgaattggaggcattagtgggaaggatggaagcaaaagccaaccaaataactaaagttcgaaaataccaagcccagctggagaaacagaagttagagaagcagaagaaggaattaaaagctaccaaaaagactcttgatgaagaaagaaacagcagcagccgttctggaatcacagggaccacaaataagaaagattttatgaaactgagacctggagaaaaaaggagaaaaaatcttcagttattgaaggacatgcaaagcatacagaattcattacaaagcagtagtttgtgttgggattactgactcataaccaggtcagaaattttattcagataatctgtacctcatcaatcagatgatgacaatttacttcccaggtctcatactcacttatgttggaattaattaatagcaggtgttaaaggacccaggcttcattacacaggcttttcatgtatgcaggatgactcaatgttaaagcatttaaatggaaaccaggggagttttaaagcccgagaaaccacacataatcttttgttgagatgagtttgctgtactgacgctgcactttgtaaacagattaccagttttttacttgtgggtgtgattttttaaaatagttctttatatataattaaaattaggtttaaattttcaaaatatgagactatgctataggcagtgcttgcttgaaaagtctcatttttaaatctccctggcatgaggtgcccacttcccctttccaaagcaaccattaaacatactttgtttcta

SEQ ID NO: 442443 - DNA, 3017 bp, Homo sapiens
tactactactaaattcgcggccgcgtcgaccgacagaaggggagacgtccgttaggacgtgttgccctttctgtgtaagctgtgagcgtaggcggccctgagggggtgtgttgcaggggtttccaagcccagcaccagcacccttgcccttttccatcaggggttcagcctagggtccccgctggtgggcggctcccgagtcttggagaagagcacgagaacctagaccgcccccgaagtgcggagaccccctgggcaggctgaaagatggcggcggcgtctgtctctgcggcttctggttctcacttgtcgaacagctttgctgagccatcaaggtctaatggaagcatggttcggcattcttcatctccatatgtagtatatccttcggataagcctttccttaatagtgatctacgacgctccccaagtaagcctacacttgcctatccagaaagcaacagcagagccatattttctgctcttaagaatcttcaagataagattcgacgcttggaacttgagaggattcaggcagaagaaagtgtgaaaaccttgtctagagaaacaattgaatataagaaagtactggatgaacagatacaagaaagggagaattcaaagaatgaggaatcaaagcacaatcaagaactgacatctcagttgttagctgcagaaaataaatgcaatctattagaaaaacaattggaatacatgcgaaatatgataaagcatgccgaaatggagaggacatctgtcttagagaaacaagtttccctagaaagagaacgacaacatgatcaaacacatgttcagagccaacttgaaaaattggatcttcttgaacaggagtataacaaacttaccacaatgcaggcccttgcagaaaaaaaaatgcaagagttggaagcaaaactccatgaagaagaacaggaaaggaaacgcatgcaagctaaggcagctgagtccacaagccctagccatgccgtggtagccaatgttcagcttgtcttgcatctaatgaagcaacacagtaaagctttgtgcaatgatcgagtcatcaacagtattcctttggcaaagcaagtatcttcacgaggtggtaaaagtaagaagttgtcagtaacacctccctcctccaacggtattaatgaggagttgtcagaagtcttacagactttacaggatgaatttgggcaaatgagctttgatcaccagcagcttgcaaaacttatccaggagtcgccaaccgttgaactgaaagacaagttggagtgtgaattggaggcattagtgggaaggatggaagcaaaagccaaccaaataactaaagttcgaaaataccaagcccagctggagaaacagaagttagagaagcagaagaaggaattaaaagctaccaaaaagactcttgatgaagaaagaaacagcagcagccgttctggaatcacagggaccacaaataagaaagattttatgaaactgagacctggagaaaaaaggagaaaaaatcttcagttattgaaggacatgcaaagcatacagaattcattacaaagcagtagtttgtgttgggattactgactcataaccaggtcagaaattttattcagataatctgtacctcatcaatcagatgatgacaatttacttcccaggtctcatactcacttatgttggaattaattaatagcaggtgttaaaggacccaggcttcattacacaggcttttcatgtatgcaggatgactcaatgttaaagcatttaaatggaaaccaggggagttttaaagcccgagaaaccacacataatcttttgttgagatgagtttgctgtactgacgctgcactttgtaaacagattaccagttttttacttgtgggtgtgattttttaaaatagttctttatatataattaaaattaggtttaaattttcaaaatatgagactatgctataggcagtgcttgcttgaaaagtctcatttttaaatctccctggcatgaggtgcccacttcccctttccaaagcaaccattaaacatactttgtttctactattggtggagtttttctatatttaaaaatacatatatatttcagaggatttttattttgctttttggcatttcagactttgatcagtgttaagtgcacttgtattgctttttaatctgttaattttttaaagacccaagcagtcattttgagttatatctataaaaattataaaaggatttttgaaagtataaacaaattgtcagtgaaataaatgagattttggaataaagtgagaatgggagaagggatatgttgtgagcatataccttcacagttcttaatacctgttttgtaatcatgatattcagtcaaggcattatggtttttaatcttgaaacttagagaaccctttgaatatttgcttttactggtgtacagtatgagtggaatatgaactgtacacataattatcatgttgatataaatcataatttcaactagatcaagacatgttaaccttttataaatttaaagtcaataaagcacctttttaaaggaaacactgcaactttccttaacagcctgttaataaaggctttgtgacaagctctcaaaaaatgcatttctaaataggaggacatcaatgtattgatgaagagaaaaaactagtacttagttgccacactcatgcttacatagaaagagagcccaagaatattagatttcctcatgatacaagatactacagtaacaggctttaatttaggatccttaagattttggggtattatttgtgactctcctgaaattgtaaacttgtgcttctgtgtccagttttctaatgagtaggttcgtagcttgattgaattaataattgtgagcccatagacacaagggaagtgagaaacagtgctctggtgacatgataaatatatgtgtcaaccaccatttcagctattaaaaactcctgttatctccttgtttgaatttcaggtcattaaattgtataaccatcatt

SEQ ID NO: 442444 - DNA, 3183 bp, Homo sapiens
tactactactaaattcgcggccgcgtcgaccgacagaaggggagacgtccgttaggacgtgttgccctttctgtgtaagctgtgagcgtaggcggccctgagggggtgtgttgcaggggtttccaagcccagcaccagcacccttgcccttttccatcaggggttcagcctagggtccccgctggtgggcggctcccgagtcttggagaagagcacgagaacctagaccgcccccgaagtgcggagaccccctgggcaggctgaaagatggcggcggcgtctgtctctgcggcttctggttctcacttgtcgaacagctttgctgagccatcaaggtctaatggaagcatggttcggcattcttcatctccatatgtagtatatccttcggataagcctttccttaatagtgatctacgacgctccccaagtaagcctacacttgcctatccagaaagcaacagcagagaatcttcaagataagattcgacgcttggaacttgagaggattcaggcagaagaaagtgtgaaaaccttgtctagagaaacaattgaatataagaaagtactggatgaacagatacaagaaagggagaattcaaagaatgaggaatcaaagcacaatcaagaactgacatctcagttgttagctgcagaaaataaatgcaatctattagaaaaacaattggaatacatgcgaaatatgataaagcatgccgaaatggagaggacatctgtcttagagaaacaagtttccctagaaagagaacgacaacatgatcaaacacatgttcagagccaacttgaaaaattggatcttcttgaacaggagtataacaaacttaccacaatgcaggcccttgcagaaaaaaaaatgcaagagttggaagcaaaactccatgaagaagaacaggaaaggaaacgcatgcaagctaaggcagctgagttgcagactggtctagaaacaaatagacttatctttgaagataaggcaactccgtgtgttcccaatgcaagaagaattaaaaaaaagaagtcaaaaccaccagaaaagaaaagttctaggaactattttggtgcacaaccacattatagattatgcttgggtgatatgccatttgtagctgggaagtccacaagccctagccatgccgtggtagccaatgttcagcttgtcttgcatctaatgaagcaacacagtaaagctttgtgcaatgatcgagtcatcaacagtattcctttggcaaagcaagtatcttcacgaggtggtaaaagtaagaagttgtcagtaacacctccctcctccaacggtattaatgaggagttgtcagaagtcttacagactttacaggatgaatttgggcaaatgagctttgatcaccagcagcttgcaaaacttatccaggagtcgccaaccgttgaactgaaagacaagttggagtgtgaattggaggcattagtgggaaggatggaagcaaaagccaaccaaataactaaagttcgaaaataccaagcccagctggagaaacagaagttagagaagcagaagaaggaattaaaagctaccaaaaagactcttgatgaagaaagaaacagcagcagccgttctggaatcacagggaccacaaataagaaagattttatgaaactgagacctggagaaaaaaggagaaaaaatcttcagttattgaaggacatgcaaagcatacagaattcattacaaagcagtagtttgtgttgggattactgactcataaccaggtcagaaattttattcagataatctgtacctcatcaatcagatgatgacaatttacttcccaggtctcatactcacttatgttggaattaattaatagcaggtgttaaaggacccaggcttcattacacaggcttttcatgtatgcaggatgactcaatgttaaagcatttaaatggaaaccaggggagttttaaagcccgagaaaccacacataatcttttgttgagatgagtttgctgtactgacgctgcactttgtaaacagattaccagttttttacttgtgggtgtgattttttaaaatagttctttatatataattaaaattaggtttaaattttcaaaatatgagactatgctataggcagtgcttgcttgaaaagtctcatttttaaatctccctggcatgaggtgcccacttcccctttccaaagcaaccattaaacatactttgtttctactattggtggagtttttctatatttaaaaatacatatatatttcagaggatttttattttgctttttggcatttcagactttgatcagtgttaagtgcacttgtattgctttttaatctgttaattttttaaagacccaagcagtcattttgagttatatctataaaaattataaaaggatttttgaaagtataaacaaattgtcagtgaaataaatgagattttggaataaagtgagaatgggagaagggatatgttgtgagcatataccttcacagttcttaatacctgttttgtaatcatgatattcagtcaaggcattatggtttttaatcttgaaacttagagaaccctttgaatatttgcttttactggtgtacagtatgagtggaatatgaactgtacacataattatcatgttgatataaatcataatttcaactagatcaagacatgttaaccttttataaatttaaagtcaataaagcacctttttaaaggaaacactgcaactttccttaacagcctgttaataaaggctttgtgacaagctctcaaaaaatgcatttctaaataggaggacatcaatgtattgatgaagagaaaaaactagtacttagttgccacactcatgcttacatagaaagagagcccaagaatattagatttcctcatgatacaagatactacagtaacaggctttaatttaggatccttaagattttggggtattatttgtgactctcctgaaattgtaaacttgtgcttctgtgtccagttttctaatgagtaggttcgtagcttgattgaattaataattgtgagcccatagacacaagggaagtgagaaacagtgctctggtgacatgataaatatatgtgtcaaccaccatttcagctattaaaaactcctgttatctccttgtttgaatttcaggtcattaaattgtataaccatcatt

SEQ ID NO: 442445 - DNA, 2599 bp, Homo sapiens
tggcagaaacagaaggtagaagcagaagaaggcattaaaagctaccaaaaagactcttgatgaagaaagaaacagcagcagccgttctggaatcacaggtgggggactacatgcgaaatatgataaagcatgccgaaatggagaggacatctgtcttagagaaacaagtttccctagaaagagaacgacaacatgatcaaacacatgttcagagccaacttgaaaaattggatcttcttgaacaggagtataacaaacttaccacaatgcaggcccttgcagaaaaaaaaatgcaagagttggaagcaaaactccatgaagaagaacaggaaaggaaacgcatgcaagctaaggcagctgagttgcagactggtctagaaacaaatagacttatctttgaagataaggcaactccgtgtgttcccaatgcaagaagaattaaaaaaaagaagtcaaaaccaccagaaaagaaaagttctaggaactattttggtgcacaaccacattatagattatgcttgggtgatatgccatttgtagctgggaagtccacaagccctagccatgccgtggtagccaatgttcagcttgtcttgcatctaatgaagcaacacagtaaagctttgtgcaatgatcgagtcatcaacagtattcctttggcaaagcaagtatcttcacgaggtggtaaaagtaagaagttgtcagtaacacctccctcctccaacggtattaatgaggagttgtcagaagtcttacagactttacaggatgaatttgggcaaatgagctttgatcaccagcagcttgcaaaacttatccaggagtcgccaaccgttgaactgaaagacaagttggagtgtgaattggaggcattagtgggaaggatggaagcaaaagccaaccaaataactaaagttcgaaaataccaagcccagctggagaaacagaagttagagaagcagaagaaggaattaaaagctaccaaaaagactcttgatgaagaaagaaacagcagcagccgttctggaatcacagggaccacaaataagaaagattttatgaaactgagacctggagaaaaaaggagaaaaaatcttcagttattgaaggacatgcaaagcatacagaattcattacaaagcagtagtttgtgttgggattactgactcataaccaggtcagaaattttattcagataatctgtacctcatcaatcagatgatgacaatttacttcccaggtctcatactcacttatgttggaattaattaatagcaggtgttaaaggacccaggcttcattacacaggcttttcatgtatgcaggatgactcaatgttaaagcatttaaatggaaaccaggggagttttaaagcccgagaaaccacacataatcttttgttgagatgagtttgctgtactgacgctgcactttgtaaacagattaccagttttttacttgtgggtgtgattttttaaaatagttctttatatataattaaaattaggtttaaattttcaaaatatgagactatgctataggcagtgcttgcttgaaaagtctcatttttaaatctccctggcatgaggtgcccacttcccctttccaaagcaaccattaaacatactttgtttctactattggtggagtttttctatatttaaaaatacatatatatttcagaggatttttattttgctttttggcatttcagactttgatcagtgttaagtgcacttgtattgctttttaatctgttaattttttaaagacccaagcagtcattttgagttatatctataaaaattataaaaggatttttgaaagtataaacaaattgtcagtgaaataaatgagattttggaataaagtgagaatgggagaagggatatgttgtgagcatataccttcacagttcttaatacctgttttgtaatcatgatattcagtcaaggcattatggtttttaatcttgaaacttagagaaccctttgaatatttgcttttactggtgtacagtatgagtggaatatgaactgtacacataattatcatgttgatataaatcataatttcaactagatcaagacatgttaaccttttataaatttaaagtcaataaagcacctttttaaaggaaacactgcaactttccttaacagcctgttaataaaggctttgtgacaagctctcaaaaaatgcatttctaaataggaggacatcaatgtattgatgaagagaaaaaactagtacttagttgccacactcatgcttacatagaaagagagcccaagaatattagatttcctcatgatacaagatactacagtaacaggctttaatttaggatccttaagattttggggtattatttgtgactctcctgaaattgtaaacttgtgcttctgtgtccagttttctaatgagtaggttcgtagcttgattgaattaataattgtgagcccatagacacaagggaagtgagaaacagtgctctggtgacatgataaatatatgtgtcaaccaccatttcagctattaaaaactcctgttatctccttgtttgaatttcaggtcattaaattgtataaccatcatt

SEQ ID NO: 442446 - DNA, 2311 bp, Homo sapiens
tactactactaaattcgcggccgcgtcgaccgacagaaggggagacgtccgttaggacgtgttgccctttctgtgtaagctgtgagcgtaggcggccctgagggggtgtgttgcaggggtttccaagcccagcaccagcacccttgcccttttccatcaggggttcagcctagggtccccgctggtgggcggctcccgagtcttggagaagagcacgagaacctagaccgcccccgaagtgcggagaccccctgggcaggctgaaagatggcggcggcgtctgtctctgcggcttctggttctcacttgtcgaacagctttgctgagccatcaaggtctaatggaagcatggttcggcattcttcatctccatatgtagtatatccttcggataagcctttccttaatagtgatctacgacgctccccaagtaagcctacacttgcctatccagaaagcaacagcagagccatattttctgctcttaagaatcttcaagataagattcgacgcttggaacttgagaggattcaggcagaagaaagtgtgaaaaccttgtctagagaaacaattgaatataagaaagtactggatgaacagatacaagaaagggagaattcaaagaatgaggaatcaaagcacaatcaagaactgacatctcagttgttagctgcagaaaataaatgcaatctattagaaaaacaattggaatacatgcgaaatatgataaagcatgccgaaatggagaggacatctgtcttagagaaacaagtttccctagaaagagaacgacaacatgatcaaacacatgttcagagccaacttgaaaaattggatcttcttgaacaggagtataacaaacttaccacaatgcaggcccttgcagaaaaaaaaatgcaagagttggaagcaaaactccatgaagaagaacaggaaaggaaacgcatgcaagctaaggcagctgagttgcagactggtctagaaacaaatagacttatctttgaagataaggcaactccgtgtgttcccaatgcaagaagaattaaaaaaaagaagtcaaaaccaccagaaaaggtgtgaagacagaaccaaatcaggcaaaatgctgattacttggtatagtttatgtcaaaacacccataaactgtgtggtgtactacaaccttgagagagtaaatctttcattctcaatttcttcattcagaaggtggagataagtaatacctactcctaaatttttatcctgatagtgagaaaatatataagcattttggaactacagaacaccatacaaaattagcattattagtactgcattatcttgtgctcttacaatgttttgtgtatatgtatactgattttctacttagaatgtaactgttgttttgtcaagtgcttttttccccccagcctttcctaggctaggatatatgctaacaagtactattaggagctggcttgtgatcataatgccaactatagataaggcaagtagtagcctagtagttaactgaagtttcaagttagtcatgtatagtcagtttttattatcatgtgaataaaataaaattgttttccttttcttttcattcagaaaagttctaggaactattttggtgcacaaccacattatagattatgcttgggtgatatgccatttgtagctgggaaggtgagttggtcaaactccggattctttttatacaacattgatccctgaattaagtccctgcatctgcaagtatgtctacaaatggaaggaacatttttctgtgcctttaccagtgtgtggatcacagtgatgtgaaaatgagatgtagggaggtttttggggattagggaagcaaggaagagatggggaggataccttaaagtagataaagtatatgtggaaaggaagtgataaaacagagaccctaagttgaagaaggtgttgtttcagataggggtcaaggaaataagaaatagtatgtttgtagcattggatttttagtatcaatcctgttgagttacatttagatataggtagatattcgaataagcacgtagcacattctgcttgtcctcacatccagatcatttctaggactaattctccaagaagcagtcatacgtacacttgaatcttcagtttcttcagcacttgaatgtaaagctgtattgtcatatatcaagtactgagtgaagtgcctaaaactgtgctagttgacactactttataagctgtttgtgttgctggtggttttatatttagattccaactagattgttattctggcatcttgggaagtaaatgttcttctgaattttg

SEQ ID NO: 442447 - DNA, 2749 bp, Homo sapiens
tactactactaaattcgcggccgcgtcgaccgacagaaggggagacgtccgttaggacgtgttgccctttctgtgtaagctgtgagcgtaggcggccctgagggggtgtgttgcaggggtttccaagcccagcaccagcacccttgcccttttccatcaggggttcagcctagggtccccgctggtgggcggctcccgagtcttggagaagagcacgagaacctagaccgcccccgaagtgcggagaccccctgggcaggctgaaagatggcggcggcgtctgtctctgcggcttctggttctcacttgtcgaacagctttgctgagccatcaaggtctaatggaagcatggttcggcattcttcatctccatatgtagtatatccttcggataagcctttccttaatagtgatctacgacgctccccaagtaagcctacacttgcctatccagaaagcaacagcagagccatattttctgctcttaagaatcttcaagataagattcgacgcttggaacttgagaggattcaggcagaagaaagtgtgaaaaccttgtctagagaaacaattgaatataagaaagtactggatgaacagatacaagaaagggagaattcaaagaatgaggaatcaaagcacaatcaagaactgacatctcagttgttagctgcagaaaataaatgcaatctattagaaaaacaattggaatacatgcgaaatatgataaagcatgccgaaatggagaggacatctgtcttagagaaacaagtttccctagaaagagaacgacaacatgatcaaacacatgttcagagccaacttgaaaaattggatcttcttgaacaggagtataacaaacttaccacaatgcaggcccttgcagaaaaaaaaatgcaagagttggaagcaaaactccatgaagaagaacaggaaaggaaacgcatgcaagctaaggcagctgagttgcagactggtctagaaacaaatagacttatctttgaagataaggcaactccgtgtgttcccaatgcaagaagaattaaaaaaaagaagtcaaaaccaccagaaaaggtgtgaagacagaaccaaatcaggcaaaatgctgattacttggtatagtttatgtcaaaacacccataaactgtgtggtgtactacaaccttgagagagtaaatctttcattctcaatttcttcattcagaaggtggagataagtaatacctactcctaaatttttatcctgatagtgagaaaatatataagcattttggaactacagaacaccatacaaaattagcattattagtactgcattatcttgtgctcttacaatgttttgtgtatatgtatactgattttctacttagaatgtaactgttgttttgtcaagtgcttttttccccccagcctttcctaggctaggatatatgctaacaagtactattaggagctggcttgtgatcataatgccaactatagataaggcaagtagtagcctagtagttaactgaagtttcaagttagtcatgtatagtcagtttttattatcatgtgaataaaataaaattgttttccttttcttttcattcagaaaagttctaggaactattttggtgcacaaccacattatagattatgcttgggtgatatgccatttgtagctgggaaggtgagttggtcaaactccggattctttttatacaacattgatccctgaattaagtccctgcatctgcaagtatgtctacaaatggaaggaacatttttctgtgcctttaccagtgtgtggatcatgcctttaccagtgtgtggatcacagtgatgtgaaaatgagatgtagggaggtttttggggattagggaagcaaggaagagatggggaggataccttaaagtagataaagtatatgtggaaaggaagtgataaaacagagaccctaagttgaagaaggtgttgtttcagataggggtcaaggaaataagaaatagtatgtttgtagcattggatttttagtatcaatcctgttgagttacatttagatataggtagatattcgaataagcacgtagcacattctgcttgtcctcacatccagatcatttctaggactaattctccaagaagcagtcatacgtacacttgaatcttcagtttcttcagcacttgaatgtaaagctgtattgtcatatatcaagtactgagtgaagtgcctaaaactgtgctagttgacactactttataagctgtttgtgttgctggtggttttatatttagattccaactagattgttattctggcatcttgggaagtaaatgttcttctgaattttgtatttgtttatatttatttattttaaacccctagtaaattcgcagtgaaatcatggggaatataataaattagtggtgacaagcatttgaaaaaggtacagttgacccttgaacaacatgagtccgaactctgtgtgggtctacttacaggcagattttttttttcaataagtatcttggaaaattttttggagatttttggcaatttgaaaaaacttgcaaactatagcttagaaatatcagaagttaagaaaaagttggtatgtcatagatgcataaaattgactatgtcaatactagtgcattttatcatttattaccataaaatatacacaagttttttttaattataatttatcaaaacaatttgcacacagactacgtgacgccattcacagtccagagaaatgtaaac

SEQ ID NO: 442448 - DNA, 1255 bp, Homo sapiens
tactactactaaattcgcggccgcgtcgaccgacagaaggggagacgtccgttaggacgtgttgccctttctgtgtaagctgtgagcgtaggcggccctgagggggtgtgttgcaggggtttccaagcccagcaccagcacccttgcccttttccatcaggggttcagcctagggtccccgctggtgggcggctcccgagtcttggagaagagcacgagaacctagaccgcccccgaagtgcggagaccccctgggcaggctgaaagatggcggcggcgtctgtctctgcggcttctggttctcacttgtcgaacagctttgctgagccatcaaggtctaatggaagcatggttcggcattcttcatctccatatgtagtatatccttcggataagcctttccttaatagtgatctacgacgctccccaagtaagcctacacttgcctatccagaaagcaacagcagagccatattttctgctcttaagaatcttcaagataagattcgacgcttggaacttgagaggattcaggcagaagaaagtgtgaaaaccttgtctagagaaacaattgaatataagaaagtactggatgaacagatacaagaaagggagaattcaaagaatgaggaatcaaagcacaatcaagaactgacatctcagttgttagctgcagaaaataaatgcaatctattagaaaaacaattggaatacatgcgaaatatgataaagcatgccgaaatggagaggacatctgtcttagagaaacaagtttccctagaaagagaacgacaacatgatcaaacacatgttcagagccaacttgaaaaattggatcttcttgaacaggagtataacaaacttaccacaatgcaggcccttgcagaaaaaaaaatgcaagagttggaagcaaaactccatgaagaagaacaggaaaggaaacgcatgcaagctaaggcagctgagttgcagactggtctagaaacaaatagacttatctttgaagataaggcaactccgtgtgttcccaatgcaagaagaattaaaaaaaagaagtcaaaaccaccagaaaagaaaagttctaggaactattttggtgcacaaccacattatagattatgcttgggtgatatgccatttgtagctgggaagatttttttttttttttttttttttacaataaggccttcagcggggtatccatttttttgggaatgggggggacaaccggcagctggcagagggggatcctcta

SEQ ID NO: 442449 - DNA, 2766 bp, Homo sapiens
tactactactaaattcgcggccgcgtcgaccgacagaaggggagacgtccgttaggacgtgttgccctttctgtgtaagctgtgagcgtaggcggccctgagggggtgtgttgcaggggtttccaagcccagcaccagcacccttgcccttttccatcaggggttcagcctagggtccccgctggtgggcggctcccgagtcttggagaagagcacgagaacctagaccgcccccgaagtgcggagaccccctgggcaggctgaaagatggcggcggcgtctgtctctgcggcttctggttctcacttgtcgaacagctttgctgagccatcaaggtctaatggaagcatggttcggcattcttcatctccatatgtagtatatccttcggataagcctttccttaatagtgatctacgacgctccccaagtaagcctacacttgcctatccagaaagcaacagcagagccatattttctgctcttaagaatcttcaagataagattcgacgcttggaacttgagaggattcaggcagaagaaagtgtgaaaaccttgtctagagaaacaattgaatataagaaagtactggatgaacagatacaagaaagggagaattcaaagaatgaggaatcaaagcacaatcaagaactgacatctcagttgttagctgcagaaaataaatgcaatctattagaaaaacaattggaatacatgcgaaatatgataaagcatgccgaaatggagaggacatctgtcttagagaaacaagtttccctagaaagagaacgacaacatgatcaaacacatgttcagagccaacttgaaaaattggatcttcttgaacaggagtataacaaacttaccacaatgcaggcccttgcagaaaaaaaaatgcaagagttggaagcaaaactccatgaagaagaacaggaaaggaaacgcatgcaagctaaggcagctgagttgcagactggtctagaaacaaatagacttatctttgaagataaggcaactccgtgtgttcccaatgcaagaagaattaaaaaaaagaagtcaaaaccaccagaaaagaaaagttctaggaactattttggtgcacaaccacattatagattatgcttgggtgatatgccatttgtagctgggaagtccacaagccctagccatgccgtggtagccaatgttcagcttgtcttgcatctaatgaagcaacacagtaaagctttgtgcaatgatcgagtcatcaacagtattcctttggcaaagcaagtatcttcacgaggtggtaaaagtaagaagttgtcagtaacacctccctcctccaacggtattaatgaggagttgtcagaagtcttacagactttacaggatgaatttgggcaaatgagctttgatcaccagcagcttgcaaaacttatccaggagtcgccaaccgttgaactgaaagacaagttggagtgtgaattggaggcattagtgggaaggatggaagcaaaagccaaccaaataactaaagttcgaaaataccaagcccagctggagaaacagaagttagagaagcagaagaaggaattaaaagctaccaaaaagactcttgatgaagaaagaaacagcagcagccgttctggaatcacagggaccacaaataagaaagattttatgaaactgagacctggagaaaaaaggagaaaaaatcttcagttattgaaggacatgcaaagcatacagaattcattacaaagcagtagtttgtgttgggattactgactcataaccaggtcagaaattttattcagataatctgtacctcatcaatcagatgatgacaatttacttcccaggtctcatactcacttatgttggaattaattaatagcaggtgttaaaggacccaggcttcattacacaggcttttcatgtatgcaggatgactcaatgttaaagcatttaaatggaaaccaggggagttttaaagcccgagaaaccacacataatcttttgttgagatgagtttgctgtactgacgctgcactttgtaaacagattaccagttttttacttgtgggtgtgattttttaaaatagttctttatatataattaaaattaggtttaaattttcaaaatatgagactatgctataggcagtgcttgcttgaaaagtctcatttttaaatctccctggcatgaggtgcccacttcccctttccaaagcaaccattaaacatactttgtttctactattggtggagtttttctatatttaaaaatacatatatatttcagaggatttttattttgctttttggcatttcagactttgatcagtgttaagtgcacttgtattgctttttaatctgttaattttttaaagacccaagcagtcattttgagttatatctataaaaattataaaaggatttttgaaagtataaacaaattgtcagtgaaataaatgagattttggaataaagtgagaatgggagaagggatatgttgtgagcatataccttcacagttcttaatacctgttttgtaatcatgatattcagtcaaggcattatggtttttaatcttgaaacttagagaaccctttgaatatttgcttttactggtgtacagtatgagtggaatatgaactgtacacataattatcatgttgatataaatcataatttcaactagatcaagacatgttaaccttttataaatttaaagtcaataaagcacctttttaaaggaaacactgcaactttccttaacag

SEQ ID NO: 442450 - DNA, 3723 bp, Homo sapiens
tactactactaaattcgcggccgcgtcgaccgacagaaggggagacgtccgttaggacgtgttgccctttctgtgtaagctgtgagcgtaggcggccctgagggggtgtgttgcaggggtttccaagcccagcaccagcacccttgcccttttccatcaggggttcagcctagggtccccgctggtgggcggctcccgagtcttggagaagagcacgagaacctagaccgcccccgaagtgcggagaccccctgggcaggctgaaagatggcggcggcgtctgtctctgcggcttctggttctcacttgtcgaacagctttgctgagccatcaaggtctaatggaagcatggttcggcattcttcatctccatatgtagtatatccttcggataagcctttccttaatagtgatctacgacgctccccaagtaagcctacacttgcctatccagaaagcaacagcagagccatattttctgctcttaagaatcttcaagataagattcgacgcttggaacttgagaggattcaggcagaagaaagtgtgaaaaccttgtctagagaaacaattgaatataagaaagtactggatgaacagatacaagaaagggagaattcaaagaatgaggaatcaaagcacaatcaagaactgacatctcagttgttagctgcagaaaataaatgcaatctattagaaaaacaattggaatacatgcgaaatatgataaagcatgccgaaatggagaggacatctgtcttagagaaacaagtttccctagaaagagaacgacaacatgatcaaacacatgttcagagccaacttgaaaaattggatcttcttgaacaggagtataacaaacttaccacaatgcaggcccttgcagaaaaaaaaatgcaagagttggaagcaaaactccatgaagaagaacaggaaaggaaacgcatgcaagctaaggcagctgagttgcagactggtctagaaacaaatagacttatctttgaagataaggcaactccgtgtgttcccaatgcaagaagaattaaaaaaaagaagtcaaaaccaccagaaaaggtgtgaagacagaaccaaatcaggcaaaatgctgattacttggtatagtttatgtcaaaacacccataaactgtgtggtgtactacaaccttgagagagtaaatctttcattctcaatttcttcattcagaaggtggagataagtaatacctactcctaaatttttatcctgatagtgagaaaatatataagcattttggaactacagaacaccatacaaaattagcattattagtactgcattatcttgtgctcttacaatgttttgtgtatatgtatactgattttctacttagaatgtaactgttgttttgtcaagtgcttttttccccccagcctttcctaggctaggatatatgctaacaagtactattaggagctggcttgtgatcataatgccaactatagataaggcaagtagtagcctagtagttaactgaagtttcaagttagtcatgtatagtcagtttttattatcatgtgaataaaataaaattgttttccttttcttttcattcagaaaagttctaggaactattttggtgcacaaccacattatagattatgcttgggtgatatgccatttgtagctgggaagtccacaagccctagccatgccgtggtagccaatgttcagcttgtcttgcatctaatgaagcaacacagtaaagctttgtgcaatgatcgagtcatcaacagtattcctttggcaaagcaagtatcttcacgaggtggtaaaagtaagaagttgtcagtaacacctccctcctccaacggtattaatgaggagttgtcagaagtcttacagactttacaggatgaatttgggcaaatgagctttgatcaccagcagcttgcaaaacttatccaggagtcgccaaccgttgaactgaaagacaagttggagtgtgaattggaggcattagtgggaaggatggaagcaaaagccaaccaaataactaaagttcgaaaataccaagcccagctggagaaacagaagttagagaagcagaagaaggaattaaaagctaccaaaaagactcttgatgaagaaagaaacagcagcagccgttctggaatcacagggaccacaaataagaaagattttatgaaactgagacctggagaaaaaaggagaaaaaatcttcagttattgaaggacatgcaaagcatacagaattcattacaaagcagtagtttgtgttgggattactgactcataaccaggtcagaaattttattcagataatctgtacctcatcaatcagatgatgacaatttacttcccaggtctcatactcacttatgttggaattaattaatagcaggtgttaaaggacccaggcttcattacacaggcttttcatgtatgcaggatgactcaatgttaaagcatttaaatggaaaccaggggagttttaaagcccgagaaaccacacataatcttttgttgagatgagtttgctgtactgacgctgcactttgtaaacagattaccagttttttacttgtgggtgtgattttttaaaatagttctttatatataattaaaattaggtttaaattttcaaaatatgagactatgctataggcagtgcttgcttgaaaagtctcatttttaaatctccctggcatgaggtgcccacttcccctttccaaagcaaccattaaacatactttgtttctactattggtggagtttttctatatttaaaaatacatatatatttcagaggatttttattttgctttttggcatttcagactttgatcagtgttaagtgcacttgtattgctttttaatctgttaattttttaaagacccaagcagtcattttgagttatatctataaaaattataaaaggatttttgaaagtataaacaaattgtcagtgaaataaatgagattttggaataaagtgagaatgggagaagggatatgttgtgagcatataccttcacagttcttaatacctgttttgtaatcatgatattcagtcaaggcattatggtttttaatcttgaaacttagagaaccctttgaatatttgcttttactggtgtacagtatgagtggaatatgaactgtacacataattatcatgttgatataaatcataatttcaactagatcaagacatgttaaccttttataaatttaaagtcaataaagcacctttttaaaggaaacactgcaactttccttaacagcctgttaataaaggctttgtgacaagctctcaaaaaatgcatttctaaataggaggacatcaatgtattgatgaagagaaaaaactagtacttagttgccacactcatgcttacatagaaagagagcccaagaatattagatttcctcatgatacaagatactacagtaacaggctttaatttaggatccttaagattttggggtattatttgtgactctcctgaaattgtaaacttgtgcttctgtgtccagttttctaatgagtaggttcgtagcttgattgaattaataattgtgagcccatagacacaagggaagtgagaaacagtgctctggtgacatgataaatatatgtgtcaaccaccatttcagctattaaaaactcctgttatctccttgtttgaatttcaggtcattaaattgtataaccatcatt

SEQ ID NO: 442451 - DNA, 3247 bp, Homo sapiens
tactactactaaattcgcggccgcgtcgaccgacagaaggggagacgtccgttaggacgtgttgccctttctgtgtaagctgtgagcgtaggcggccctgagggggtgtgttgcaggggtttccaagcccagcaccagcacccttgcccttttccatcaggggttcagcctagggtccccgctggtgggcggctcccgagtcttggagaagagcacgagaacctagaccgcccccgaagtgcggagaccccctgggcaggctgaaagatggcggcggcgtctgtctctgcggcttctggttctcacttgtcgtgtgcagactagggaaatgaagtacaatgttgaccagaattgataacagctttgctgagccatcaaggtctaatggaagcatggttcggcattcttcatctccatatgtagtatatccttcggataagcctttccttaatagtgatctacgacgctccccaagtaagcctacacttgcctatccagaaagcaacagcagagccatattttctgctcttaagaatcttcaagataagattcgacgcttggaacttgagaggattcaggcagaagaaagtgtgaaaaccttgtctagagaaacaattgaatataagaaagtactggatgaacagatacaagaaagggagaattcaaagaatgaggaatcaaagcacaatcaagaactgacatctcagttgttagctgcagaaaataaatgcaatctattagaaaaacaattggaatacatgcgaaatatgataaagcatgccgaaatggagaggacatctgtcttagagaaacaagtttccctagaaagagaacgacaacatgatcaaacacatgttcagagccaacttgaaaaattggatcttcttgaacaggagtataacaaacttaccacaatgcaggcccttgcagaaaaaaaaatgcaagagttggaagcaaaactccatgaagaagaacaggaaaggaaacgcatgcaagctaaggcagctgagttgcagactggtctagaaacaaatagacttatctttgaagataaggcaactccgtgtgttcccaatgcaagaagaattaaaaaaaagaagtcaaaaccaccagaaaagaaaagttctaggaactattttggtgcacaaccacattatagattatgcttgggtgatatgccatttgtagctgggaagtccacaagccctagccatgccgtggtagccaatgttcagcttgtcttgcatctaatgaagcaacacagtaaagctttgtgcaatgatcgagtcatcaacagtattcctttggcaaagcaagtatcttcacgaggtggtaaaagtaagaagttgtcagtaacacctccctcctccaacggtattaatgaggagttgtcagaagtcttacagactttacaggatgaatttgggcaaatgagctttgatcaccagcagcttgcaaaacttatccaggagtcgccaaccgttgaactgaaagacaagttggagtgtgaattggaggcattagtgggaaggatggaagcaaaagccaaccaaataactaaagttcgaaaataccaagcccagctggagaaacagaagttagagaagcagaagaaggaattaaaagctaccaaaaagactcttgatgaagaaagaaacagcagcagccgttctggaatcacagggaccacaaataagaaagattttatgaaactgagacctggagaaaaaaggagaaaaaatcttcagttattgaaggacatgcaaagcatacagaattcattacaaagcagtagtttgtgttgggattactgactcataaccaggtcagaaattttattcagataatctgtacctcatcaatcagatgatgacaatttacttcccaggtctcatactcacttatgttggaattaattaatagcaggtgttaaaggacccaggcttcattacacaggcttttcatgtatgcaggatgactcaatgttaaagcatttaaatggaaaccaggggagttttaaagcccgagaaaccacacataatcttttgttgagatgagtttgctgtactgacgctgcactttgtaaacagattaccagttttttacttgtgggtgtgattttttaaaatagttctttatatataattaaaattaggtttaaattttcaaaatatgagactatgctataggcagtgcttgcttgaaaagtctcatttttaaatctccctggcatgaggtgcccacttcccctttccaaagcaaccattaaacatactttgtttctactattggtggagtttttctatatttaaaaatacatatatatttcagaggatttttattttgctttttggcatttcagactttgatcagtgttaagtgcacttgtattgctttttaatctgttaattttttaaagacccaagcagtcattttgagttatatctataaaaattataaaaggatttttgaaagtataaacaaattgtcagtgaaataaatgagattttggaataaagtgagaatgggagaagggatatgttgtgagcatataccttcacagttcttaatacctgttttgtaatcatgatattcagtcaaggcattatggtttttaatcttgaaacttagagaaccctttgaatatttgcttttactggtgtacagtatgagtggaatatgaactgtacacataattatcatgttgatataaatcataatttcaactagatcaagacatgttaaccttttataaatttaaagtcaataaagcacctttttaaaggaaacactgcaactttccttaacagcctgttaataaaggctttgtgacaagctctcaaaaaatgcatttctaaataggaggacatcaatgtattgatgaagagaaaaaactagtacttagttgccacactcatgcttacatagaaagagagcccaagaatattagatttcctcatgatacaagatactacagtaacaggctttaatttaggatccttaagattttggggtattatttgtgactctcctgaaattgtaaacttgtgcttctgtgtccagttttctaatgagtaggttcgtagcttgattgaattaataattgtgagcccatagacacaagggaagtgagaaacagtgctctggtgacatgataaatatatgtgtcaaccaccatttcagctattaaaaactcctgttatctccttgtttgaatttcaggtcattaaattgtataaccatcatt

SEQ ID NO: 442452 - DNA, 2961 bp, Homo sapiens
tcaagataaaatgagagactggtatttatttaaaatatttgacaaacgttgatagattggttcaagacatagttatacagctgtaatatgtttttcagttagatactaccattggtttttacaggctttttacatgacacatctgaaatctgagtcatagcttttatttctacagcattaacttgaggctctcatttttcctagttgcagactggtctagaaacaaatagacttatctttgaagataaggcaactccgtgtgttcccaatgcaagaagaattaaaaaaaagaagtcaaaaccaccagaaaaggtgtgaagacagaaccaaatcaggcaaaatgctgattacttggtatagtttatgtcaaaacacccataaactgtgtggtgtactacaaccttgagagagtaaatctttcattctcaatttcttcattcagaaggtggagataagtaatacctactcctaaatttttatcctgatagtgagaaaatatataagcattttggaactacagaacaccatacaaaattagcattattagtactgcattatcttgtgctcttacaatgttttgtgtatatgtatactgattttctacttagaatgtaactgttgttttgtcaagtgcttttttccccccagcctttcctaggctaggatatatgctaacaagtactattaggagctggcttgtgatcataatgccaactatagataaggcaagtagtagcctagtagttaactgaagtttcaagttagtcatgtatagtcagtttttattatcatgtgaataaaataaaattgttttccttttcttttcattcagaaaagttctaggaactattttggtgcacaaccacattatagattatgcttgggtgatatgccatttgtagctgggaagtccacaagccctagccatgccgtggtagccaatgttcagcttgtcttgcatctaatgaagcaacacagtaaagctttgtgcaatgatcgagtcatcaacagtattcctttggcaaagcaagtatcttcacgaggtggtaaaagtaagaagttgtcagtaacacctccctcctccaacggtattaatgaggagttgtcagaagtcttacagactttacaggatgaatttgggcaaatgagctttgatcaccagcagcttgcaaaacttatccaggagtcgccaaccgttgaactgaaagacaagttggagtgtgaattggaggcattagtgggaaggatggaagcaaaagccaaccaaataactaaagttcgaaaataccaagcccagctggagaaacagaagttagagaagcagaagaaggaattaaaagctaccaaaaagactcttgatgaagaaagaaacagcagcagccgttctggaatcacagggaccacaaataagaaagattttatgaaactgagacctggagaaaaaaggagaaaaaatcttcagttattgaaggacatgcaaagcatacagaattcattacaaagcagtagtttgtgttgggattactgactcataaccaggtcagaaattttattcagataatctgtacctcatcaatcagatgatgacaatttacttcccaggtctcatactcacttatgttggaattaattaatagcaggtgttaaaggacccaggcttcattacacaggcttttcatgtatgcaggatgactcaatgttaaagcatttaaatggaaaccaggggagttttaaagcccgagaaaccacacataatcttttgttgagatgagtttgctgtactgacgctgcactttgtaaacagattaccagttttttacttgtgggtgtgattttttaaaatagttctttatatataattaaaattaggtttaaattttcaaaatatgagactatgctataggcagtgcttgcttgaaaagtctcatttttaaatctccctggcatgaggtgcccacttcccctttccaaagcaaccattaaacatactttgtttctactattggtggagtttttctatatttaaaaatacatatatatttcagaggatttttattttgctttttggcatttcagactttgatcagtgttaagtgcacttgtattgctttttaatctgttaattttttaaagacccaagcagtcattttgagttatatctataaaaattataaaaggatttttgaaagtataaacaaattgtcagtgaaataaatgagattttggaataaagtgagaatgggagaagggatatgttgtgagcatataccttcacagttcttaatacctgttttgtaatcatgatattcagtcaaggcattatggtttttaatcttgaaacttagagaaccctttgaatatttgcttttactggtgtacagtatgagtggaatatgaactgtacacataattatcatgttgatataaatcataatttcaactagatcaagacatgttaaccttttataaatttaaagtcaataaagcacctttttaaaggaaacactgcaactttccttaacagcctgttaataaaggctttgtgacaagctctcaaaaaatgcatttctaaataggaggacatcaatgtattgatgaagagaaaaaactagtacttagttgccacactcatgcttacatagaaagagagcccaagaatattagatttcctcatgatacaagatactacagtaacaggctttaatttaggatccttaagattttggggtattatttgtgactctcctgaaattgtaaacttgtgcttctgtgtccagttttctaatgagtaggttcgtagcttgattgaattaataattgtgagcccatagacacaagggaagtgagaaacagtgctctggtgacatgataaatatatgtgtcaaccaccatttcagctattaaaaactcctgttatctccttgtttgaatttcaggtcattaaattgtataaccatcatt

SEQ ID NO: 442453 - DNA, 2494 bp, Homo sapiens
gagagatgtaaaaagtgttataggtgatctgagaatggactgattgattacctggcagttttaaggaagcctttaaaaataatatatttgaactgggttttaaagaatgatataaatgttgctaatacaccaaaaaaatgtcatctgcaaatatggtttgttcacaaaatggagagaaggggaggatgataggacatgaggctaggaaatgtaggttgcagctcaatgatgtgtatgtagggccttattttccattctgaaacatagttagtggatttatatcaaaggatttcaaatagaagaacatcatgatgagaataattttaggatttatatactctactttggggggtggagagttctttttacctaggcttagggaatagaaagtggtgtagagaatataacttcaattacttctttcatcatttttcttcctttagtccacaagccctagccatgccgtggtagccaatgttcagcttgtcttgcatctaatgaagcaacacagtaaagctttgtgcaatgatcgagtcatcaacagtattcctttggcaaagcaagtatcttcacgaggtggtaaaagtaagaagttgtcagtaacacctccctcctccaacggtattaatgaggagttgtcagaagtcttacagactttacaggatgaatttgggcaaatgagctttgatcaccagcagcttgcaaaacttatccaggagtcgccaaccgttgaactgaaagacaagttggagtgtgaattggaggcattagtgggaaggatggaagcaaaagccaaccaaataactaaagttcgaaaataccaagcccagctggagaaacagaagttagagaagcagaagaaggaattaaaagctaccaaaaagactcttgatgaagaaagaaacagcagcagccgttctggaatcacagggaccacaaataagaaagattttatgaaactgagacctggagaaaaaaggagaaaaaatcttcagttattgaaggacatgcaaagcatacagaattcattacaaagcagtagtttgtgttgggattactgactcataaccaggtcagaaattttattcagataatctgtacctcatcaatcagatgatgacaatttacttcccaggtctcatactcacttatgttggaattaattaatagcaggtgttaaaggacccaggcttcattacacaggcttttcatgtatgcaggatgactcaatgttaaagcatttaaatggaaaccaggggagttttaaagcccgagaaaccacacataatcttttgttgagatgagtttgctgtactgacgctgcactttgtaaacagattaccagttttttacttgtgggtgtgattttttaaaatagttctttatatataattaaaattaggtttaaattttcaaaatatgagactatgctataggcagtgcttgcttgaaaagtctcatttttaaatctccctggcatgaggtgcccacttcccctttccaaagcaaccattaaacatactttgtttctactattggtggagtttttctatatttaaaaatacatatatatttcagaggatttttattttgctttttggcatttcagactttgatcagtgttaagtgcacttgtattgctttttaatctgttaattttttaaagacccaagcagtcattttgagttatatctataaaaattataaaaggatttttgaaagtataaacaaattgtcagtgaaataaatgagattttggaataaagtgagaatgggagaagggatatgttgtgagcatataccttcacagttcttaatacctgttttgtaatcatgatattcagtcaaggcattatggtttttaatcttgaaacttagagaaccctttgaatatttgcttttactggtgtacagtatgagtggaatatgaactgtacacataattatcatgttgatataaatcataatttcaactagatcaagacatgttaaccttttataaatttaaagtcaataaagcacctttttaaaggaaacactgcaactttccttaacagcctgttaataaaggctttgtgacaagctctcaaaaaatgcatttctaaataggaggacatcaatgtattgatgaagagaaaaaactagtacttagttgccacactcatgcttacatagaaagagagcccaagaatattagatttcctcatgatacaagatactacagtaacaggctttaatttaggatccttaagattttggggtattatttgtgactctcctgaaattgtaaacttgtgcttctgtgtccagttttctaatgagtaggttcgtagcttgattgaattaataattgtgagcccatagacacaagggaagtgagaaacagtgctctggtgacatgataaatatatgtgtcaaccaccatttcagctattaaaaactcctgttatctccttgtttgaatttcaggtcattaaattgtataaccatcatt

SEQ ID NO: 442454 - DNA, 2695 bp, Homo sapiens
tactactactaaattcgcggccgcgtcgaccgacagaaggggagacgtccgttaggacgtgttgccctttctgtgtaagctgtgagcgtaggcggccctgagggggtgtgttgcaggggtttccaagcccagcaccagcacccttgcccttttccatcaggggttcagcctagggtccccgctggtgggcggctcccgagtcttggagaagagcacgagaacctagaccgcccccgaagtgcggagaccccctgggcaggctgaaagatggcggcggcgtctgtctctgcggcttctggttctcacttgtcgaacagctttgctgagccatcaaggtctaatggaagcatggttcggcattcttcatctccatatgtagtatatccttcggataagcctttccttaatagtgatctacgacgctccccaagtaagcctacacttgcctatccagaaagcaacagcagagccatattttctgctcttaagaatcttcaagataagattcgacgcttggaacttgagaggattcaggcagaagaaagtgtgaaaaccttgtctagagaaacaattgaatataagaaagtactggatgaacagatacaagaaagggagaattcaaagaatgaggaatcaaagcacaatcaagaactgacatctcagttgttagctgcagaaaataaatgcaatctattagaaaaacaattggaatacatgcgaaatatgataaagcatgccgaaatggagaggacatctgtcttagagaaacaagtttccctagaaagagaacgacaacatgatcaaacacatgttcagagccaacttgaaaaattggatcttcttgaacaggagtataacaaacttaccacaatgcaggcccttgcagaaaaaaaaatgcaagagttggaagcaaaactccatgaagaagaacaggaaaggaaacgcatgcaagctaaggcagctgagttgcagactggtctagaaacaaatagacttatctttgaagataaggcaactccgtgtgttcccaatgcaagaagaattaaaaaaaagaagtcaaaaccaccagaaaaggtgtgaagacagaaccaaatcaggcaaaatgctgattacttggtatagtttatgtcaaaacacccataaactgtgtggtgtactacaaccttgagagagtaaatctttcattctcaatttcttcattcagaaggtggagataagtaatacctactcctaaatttttatcctgatagtgagaaaatatataagcattttggaactacagaacaccatacaaaattagcattattagtactgcattatcttgtgctcttacaatgttttgtgtatatgtatactgattttctacttagaatgtaactgttgttttgtcaagtgcttttttccccccagcctttcctaggctaggatatatgctaacaagtactattaggagctggcttgtgatcataatgccaactatagataaggcaagtagtagcctagtagttaactgaagtttcaagttagtcatgtatagtcagtttttattatcatgtgaataaaataaaattgttttccttttcttttcattcagaaaagttctaggaactattttggtgcacaaccacattatagattatgcttgggtgatatgccatttgtagctgggaaggtgagttggtcaaactccggattctttttatacaacattgatccctgaattaagtccctgcatctgcaagtatgtctacaaatggaaggaacatttttctgtgcctttaccagtgtgtggatcatgcctttaccagtgtgtggatcacagtgatgtgaaaatgagatgtagggaggtttttggggattagggaagcaaggaagagatggggaggataccttaaagtagataaagtatatgtggaaaggaagtgataaaacagagaccctaagttgaagaaggtgttgtttcagataggggtcaaggaaataagaaatagtatgtttgtagcattggatttttagtatcaatcctgttgagttacatttagatataggtagatattcgaataagcacgtagcacattctgcttgtcctcacatccagatcatttctaggactaattctccaagaagcagtcatacgtacacttgaatcttcagtttcttcagcacttgaatgtaaagctgtattgtcatatatcaagtactgagtgaagtgcttatatttagattccaactagattgttattctggcatcttgggaagtaaatgttcttctgaattttgtatttgtttatatttatttattttaaacccctagtaaattcgcagtgaaatcatggggaatataataaattagtggtgacaagcatttgaaaaaggtacagttgacccttgaacaacatgagtccgaactctgtgtgggtctacttacaggcagattttttttttcaataagtatcttggaaaattttttggagatttttggcaatttgaaaaaacttgcaaactatagcttagaaatatcagaagttaagaaaaagttggtatgtcatagatgcataaaattgactatgtcaatactagtgcattttatcatttattaccataaaatatacacaagttttttttaattataatttatcaaaacaatttgcacacagactacgtgacgccattcacagtccagagaaatgtaaac

SEQ ID NO: 442455 - DNA, 1027 bp, Homo sapiens
tactactactaaattcgcggccgcgtcgaccgacagaaggggagacgtccgttaggacgtgttgccctttctgtgtaagctgtgagcgtaggcggccctgagggggtgtgttgcaggggtttccaagcccagcaccagcacccttgcccttttccatcaggggttcagcctagggtccccgctggtgggcggctcccgagtcttggagaagagcacgagaacctagaccgcccccgaagtgcggagaccccctgggcaggctgaaagatggcggcggcgtctgtctctgcggcttctggttctcacttgtcgaacagctttgctgagccatcaaggtctaatggaagcatggttcggcattcttcatctccatatgtagtatatccttcggataagcctttccttaatagtgatctacgacgctccccaagtaagcctacacttgcctatccagaaagcaacagcagagccatattttctgctcttaagaatcttcaagataagattcgacgcttggaacttgagaggattcaggcagaagaaagtgtgaaaaccttgtctagagaaacaattgaatataagaaagtactggatgaacagatacaagaaagggagaattcaaagaatgaggaatcaaagcacaatcaagaactgacatctcagttgttagctgcagaaaataaatgcaatctattagaaaaacaattggaatacatgcgaaatatgataaagcatgccgaaatggagaggacatctgtcttagagaaacaagtttccctagaaagagaacgacaacatgatcaaacacatgttcagagccaacttgaaaaattggatcttcttgaacaggagtataacaaacttaccacaatgcaggcccttgcagaagtcagtgcatgtgtctttttattgttaacatatatcagggtggtttttttttaatgttaattattttacatcactggatatttatagcattaaaagtgatcttataatgaagaaatatattggagttttaaaaagaaaa

SEQ ID NO: 442456 - DNA, 1288 bp, Homo sapiens
cctaataagccttttctgcagatttaccgtgaaggcagaggaaatgagtgtgattacagaaaactggaagaaatgcaccaaagattcctggtttcagagcgttcaaaagatgatcttcagctaagacttacgagagcagaaaatagaataaaacaacttgaaactgactcctcagaagaaatatcacgttaccaagaaatgattcagaaacttcaaaatgtattggagtctgagagagagaactgtgggcttgtcagtgaacaaaggctaaaacttcagcaagaaaataaacagttacggaaagagactgagagtttaaggaagattgccctggaggctcaaaaaaaagccaaagtaaagatcagtacaatggaacatgaattttcaataaaggaacgtggatttgaagttcaattgagagagatggaagacagtaatagaaattccattgttgaactgaggcatctcctagcgactcaacagaaggcagccaataggtggaaagaagaaacgaagaaacttactgaaagtgcagaaattagaatcaataatctaaagagtgagctgagtcgacagaaacttcatacccaagagctgctttctcagctggaaatggcaaatgaaaaggtagctgagaatgaaaagctaattctagagcatcaagaaaaagccaacagacttcaaaggcgtctaagtcaggcagaagagagagctgcttcagcttcccagcagctgcagtgtgcatacagtgcagagaagaaaagcagcctccctgatgaatctggaaaatatttaaaaatattcatagttcactcacagaactttagagttgggaaagcagttggactagaagtgtattgaaatggtaaagcctgcaaagtataatagttaaggcttgtgttatttcgcgtaagcattgttgttctgttttgagggttattggaaaacagagcagtgaccacttcctgtaagtaaagaaaatataatcctatattgagcttcagtggagaataaaccagctgagaagaactcattgccttcatcaatgtgtctgttttttaattcctcctttttcccttgaaaggacataataattttcaaactatgcaaatttctctttcataagaaagagtttttaagaaaattctagaatttaatatttcagtttccaagatttgagaattttacatctaattgttacttctaactcatttttaaagttcctaagtatccattttattatgaactcataaatgtaataaattgtgcactttctaaaatgatgctg

SEQ ID NO: 442457 - DNA, 1008 bp, Homo sapiens
cctaataagccttttctgcagatttaccgtgaaggcagaggaaatgagtgtgattacagaaaactggaagaaatgcaccaaagattcctggtttcagagcgttcaaaagatgatcttcagctaagacttacgagagcagaaaatagaataaaacaacttgaaactgactcctcagaagaaatatcacgttaccaagaaatgattcagaaacttcaaaatgtattggagtctgagagagagaactgtgggcttgtcagtgaacaaaggctaaaacttcagcaagaaaataaacagttacggaaagagactgagagtttaaggaagattgccctggaggctcaaaaaaaagccaaagtaaagatcagtacaatggaacatgaattttcaataaaggaacgtggatttgaagttcaattgagagagatggaagacagtaatagaaattccattgttgaactgaggcatctcctagcgactcaacagaaggcagccaataggtggaaagaagaaacgaagaaacttactgaaagtgcagaaattagaatcaataatctaaagagtgagctgagtcgacagaaacttcatacccaagagctgctttctcagctggaaatggcaaatgaaaaggtagctgagaatgaaaagctaattctagagcatcaagaaaaagccaacagacttcaaaggcgtctaagtcaggcagaagagagagctgcttcagcttcccagcaggtagggagcatcctcttatccctagataataaacagttcaaagataagttttttagaagttcccagggaacttaatagtttatttttactagattaacatattttaaaattaatccctttaatatgtgaggttgaaaaagtaaacattggaaacaaaaataagctatgcgtggtggctcgcaactgtaatgccagcaatttgggaggcctaggcaggaggatcacttgaggccaggagttcaagaccatcctgcaaaacatggcaataccttttct

SEQ ID NO: 442458 - DNA, 1027 bp, Homo sapiens
cctaataagccttttctgcagatttaccgtgaaggcagaggaaatgagtgtgattacagaaaactggaagaaatgcaccaaagattcctggtttcagagcgttcaaaagatgatcttcagctaagacttacgagagcagaaaatagaataaaacaacttgaaactgactcctcagaagaaatatcacgttaccaagaaatgattcagaaacttcaaaatgtattggagtctgagagagagaactgtgggcttgtcagtgaacaaaggctaaaacttcagcaagaaaataaacagttacggaaagagactgagagtttaaggaagattgccctggaggctcaaaaaaaagccaaagtaaagatcagtacaatggaacatgaattttcaataaaggaacgtggatttgaagttcaattgagagagatggaagacagtaatagaaattccattgttgaactgaggcatctcctagcgactcaacagaaggcagccaataggtggaaagaagaaacgaagaaacttactgaaagtgcagaaattagaatcaataatctaaagagtgagctgagtcgacagaaacttcatacccaagagctgctttctcagctggaaatggcaaatgaaaaggtagctgagaatgaaaagctaattctagagcatcaagaaaaagccaacagacttcaaaggcgtctaagtcaggcagaagagagagctgcttcagcttcccagcagctgcagtgtgcatacagtgcagagaagaaaagcagcctccctgatgaatctggaaaatatttaaaaatattcatagttcactcacagaactttagagttgggaaagcagttggactagaagtgtattgaaatggtaaagcctgcaaagtataatagttaaggcttgtgttatttcgcgtaagcattgttgttctgttttgagggttattggaaaacagagcagtgaccacttcctgtaagtaaagaaaatataatcctatattgagcttcagtggagaataaaccagctgagaag

SEQ ID NO: 442459 - DNA, 1017 bp, Homo sapiens
ctgccccagctgcagcaagtgccacaataaacaagtggtagttcatgttcagctcagtagattcgcacatcctcaagaaattctcagagatcagtacaatggaacatgaattttcaataaaggaacgtggatttgaagttcaattgagagagatggaagacagtaatagaaattccattgttgaactgaggcatctcctagcgactcaacagaaggcagccaataggtggaaagaagaaacgaagaaacttactgaaagtgcagaaattagaatcaataatctaaagagtgagctgagtcgacagaaacttcatacccaagagctgctttctcagctggaaatggcaaatgaaaaggtagctgagaatgaaaagctaattctagagcatcaagaaaaagccaacagacttcaaaggcgtctaagtcaggcagaagagagagctgcttcagcttcccagcagctgcagtgtgcatacagtgcagagaagaaaagcagcctccctgatgaatctggaaaatatttaaaaatattcatagttcactcacagaactttagagttgggaaagcagttggactagaagtgtattgaaatggtaaagcctgcaaagtataatagttaaggcttgtgttatttcgcgtaagcattgttgttctgttttgagggttattggaaaacagagcagtgaccacttcctgtaagtaaagaaaatataatcctatattgagcttcagtggagaataaaccagctgagaagaactcattgccttcatcaatgtgtctgttttttaattcctcctttttcccttgaaaggacataataattttcaaactatgcaaatttctctttcataagaaagagtttttaagaaaattctagaatttaatatttcagtttccaagatttgagaattttacatctaattgttacttctaactcatttttaaagttcctaagtatccattttattatgaactcataaatgtaataaattgtgcactttctaaaatgatgctg

SEQ ID NO: 442460 - DNA, 310 bp, Homo sapiens
ttacatatacgactcgagctggtaccctcgataaggggccaggggaacccgtgaggatcactctcaaatgagattaaaaacaaggaagcagagaatggtcagagaatgggattcagattgggaacttgtggggatgagagtgaccaggttgaactgggaagtggaaaaaggagtttgagtcactggcacctagaagcctgcccacgattcctaggaaggctggcagacaccctggaaccctggggagctactggcaaactctcctggattgggccttatcgagggtacctaactcgagtcgtatcgtcta

SEQ ID NO: 442461 - DNA, 1471 bp, Homo sapiens
cgaacgtgctggtgtgacggacgatctaaatggacgtgtgatgagaagtggtaccagaggatgctcacaagaactgggcttctagtcatcgagttccttcagtacgccgacgtatcttctgagctcaagtcgcatggcagttgaggcagttgcgcagattgtgattggttgtcgctacagcaagaggtgcccatattcctgctggctaacaacagaatatccaggtcactatggtgaggaaatggacatgatttcctacaattatgattactatatccgaggagcaacaaccactttctctgcagtggaaagggatcgccagtggaagttcataatgtgccggatgactgaatacgactgtgaatttgcaaatgtttagatttgccacataccaaatctgggtgaaaggaaaggggccggggacaggagggtgtccacatatgttaacatcagttggatctcctatagaagtttctgctgctctctttccttctccctgagctggtaactgcaatgccaacttcctgggcctttctgactagtatcacacttctaataaaatccacaattaaaccatgtttctcacttttcacatgtttcatagcaactgctttatatgactgatgatggcttccttgcacaccacatatacagtgcgcatgcttacagccgggcttctggagcaccagctgcagcctggctactgctttttactgcagaatgaactgcaagttcagcatagtggaggggagaggcagaactggaggagaggtgcagtgaaggttctctacagctaagcctgtttgaatgatacgtaggttccccaccaaaagcaggctttctgccctgagggacatcttcccactcccctgctccacatgagccatgcatgcttagcaatccaagtgcagagctctttgctccaggagtgaggagactgggaggtgaaatggggaaatggaagggtttggaggcagagctgaaaacagggttggaaggatttcctgaattagaagacaaacgttagcatacccagtaaggaaaatgagtgcaggggccaggggaacccgtgaggatcactctcaaatgagattaaaaacaaggaagcagagaatggtcagagaatgggattcagattgggaacttgtggggatgagagtgaccaggttgaactgggaagtggaaaaaggagtttgagtcactggcacctagaagcctgcccacgattcctaggaaggctggcagacaccctggaaccctggggagctactggcaaactctcctggattgggcctgatttttttggtgggaaaggctgccctggggatcaactttccttctgtgtgtggctcaggagttcttctgcagagatggcgctatctttcctcctcctgtgatgtcctgctcccaaccatttgtactcttcattacaaaagaaataaaaatattaacgttcactaaaaaaaaaata

SEQ ID NO: 442462 - DNA, 1492 bp, Homo sapiens
tgatgttaaataaatgcttttattccaagctgttaacccacaggtccttgaggtactttctggaggcagcaggggtgagctgaccaccagtgatgaacagaggcctccacacagccagtgacctaattagtcaccttcaagggtgacctgaactcacagatttgtcggttcttgggaaactgcataaagatgtcttctaagagcaaagtgagattaagtgtcccttcagttcccagatcctccaaatgttctctgctgctgtttccccagcagcgattcttcctgccatgtcctttctcactgacattcattttctgactctccctcccacagggatcgccagtggaagttcataatgtgccggatgactgaatacgactgtgaatttgcaaatgtttagatttgccacataccaaatctgggtgaaaggaaaggggccggggacaggagggtgtccacatatgttaacatcagttggatctcctatagaagtttctgctgctctctttccttctccctgagctggtaactgcaatgccaacttcctgggcctttctgactagtatcacacttctaataaaatccacaattaaaccatgtttctcacttttcacatgtttcatagcaactgctttatatgactgatgatggcttccttgcacaccacatatacagtgcgcatgcttacagccgggcttctggagcaccagctgcagcctggctactgctttttactgcagaatgaactgcaagttcagcatagtggaggggagaggcagaactggaggagaggtgcagtgaaggttctctacagctaagcctgtttgaatgatacgtaggttccccaccaaaagcaggctttctgccctgagggacatcttcccactcccctgctccacatgagccatgcatgcttagcaatccaagtgcagagctctttgctccaggagtgaggagactgggaggtgaaatggggaaatggaagggtttggaggcagagctgaaaacagggttggaaggatttcctgaattagaagacaaacgttagcatacccagtaaggaaaatgagtgcaggggccaggggaacccgtgaggatcactctcaaatgagattaaaaacaaggaagcagagaatggtcagagaatgggattcagattgggaacttgtggggatgagagtgaccaggttgaactgggaagtggaaaaaggagtttgagtcactggcacctagaagcctgcccacgattcctaggaaggctggcagacaccctggaaccctggggagctactggcaaactctcctggattgggcctgatttttttggtgggaaaggctgccctggggatcaactttccttctgtgtgtggctcaggagttcttctgcagagatggcgctatctttcctcctcctgtgatgtcctgctcccaaccatttgtactcttcattacaaaagaaataaaaatattaacgttcactaaaaaaaaaata

SEQ ID NO: 442463 - DNA, 752 bp, Homo sapiens
ttagagtgacattgtttgccaaaatcccaggcagcatggacctcagtcttctctgggtacttctgcccctagtcaccatggcctggggccagtatggcgattatggatacccataccagcagtatcatgactacagcgatgatgggtgggtgaatttgaaccggcaaggcttcagctaccagtgtccccaggggcaggtgatagtggccgtgaggagcatcttcagcaagaaggaaggttctgacagacaatggaactacgcctgcatgcccacgccacagagcctcggggaacccacggagtgctggtgggaggagatcaacagggctggcatggaatggtaccagacgtgctccaacaatgggctggtggcaggattccagagccgctacttcgagtcagtgctggatcgggagtggcagttttactgttgtcgctacagcaagaggtgcccatattcctgctggctaacaacagaatatccaggtcactatggtgaggaaatggacatgatttcctacaattatgattactatatccgaggagcaacaaccactttctctgcagtggaaagggatcgccagtggaagttcataatgtgccggatgactgaatacgactgtgaatttgcaaatgtttagatttgccacataccaaatctgggtgaaaggaaaggggccctccagctttccactgcagagaaagtggttgttgctcctcggtatatgtaatcataattgtagatcgaattc

SEQ ID NO: 442464 - DNA, 1733 bp, Homo sapiens
ttagagtgacattgtttgccaaaatcccaggcagcatggacctcagtcttctctgggtacttctgcccctagtcaccatggcctggggccagtatggcgattatggatacccataccagcagtatcatgactacagcgatgatgggtgggtgaatttgaaccggcaaggcttcagctaccagtgtccccaggggcaggtgatagtggccgtgaggagcatcttcagcaagaaggaaggttctgacagacaatggaactacgcctgcatgcccacgccacagagcctcggggaacccacggagtgctggtgggaggagatcaacagggctggcatggaatggtaccagacgtgctccaacaatgggctggtggcaggattccagagccgctacttcgagtcagtgctggatcgggagtggcagttttactgttgtcgctacagcaagaggtgcccatattcctgctggctaacaacagaatatccaggtcactatggtgaggaaatggacatgatttcctacaattatgattactatatccgaggagcaacaaccactttctctgcagtggaaagggatcgccagtggaagttcataatgtgccggatgactgaatacgactgtgaatttgcaaatgtttagatttgccacataccaaatctgggtgaaaggaaaggggccggggacaggagggtgtccacatatgttaacatcagttggatctcctatagaagtttctgctgctctctttccttctccctgagctggtaactgcaatgccaacttcctgggcctttctgactagtatcacacttctaataaaatccacaattaaaccatgtttctcacttttcacatgtttcatagcaactgctttatatgactgatgatggcttccttgcacaccacatatacagtgcgcatgcttacagccgggcttctggagcaccagctgcagcctggctactgctttttactgcagaatgaactgcaagttcagcatagtggaggggagaggcagaactggaggagaggtgcagtgaaggttctctacagctaagcctgtttgaatgatacgtaggttccccaccaaaagcaggctttctgccctgagggacatcttcccactcccctgctccacatgagccatgcatgcttagcaatccaagtgcagagctctttgctccaggagtgaggagactgggaggtgaaatggggaaatggaagggtttggaggcagagctgaaaacagggttggaaggatttcctgaattagaagacaaacgttagcatacccagtaaggaaaatgagtgcaggggccaggggaacccgtgaggatcactctcaaatgagattaaaaacaaggaagcagagaatggtcagagaatgggattcagattgggaacttgtggggatgagagtgaccaggttgaactgggaagtggaaaaaggagtttgagtcactggcacctagaagcctgcccacgattcctaggaaggctggcagacaccctggaaccctggggagctactggcaaactctcctggattgggcctgatttttttggtgggaaaggctgccctggggatcaactttccttctgtgtgtggctcaggagttcttctgcagagatggcgctatctttcctcctcctgtgatgtcctgctcccaaccatttgtactcttcattacaaaagaaataaaaatattaacgttcactaaaaaaaaaata

SEQ ID NO: 442465 - DNA, 641 bp, Homo sapiens
ttagagtgacattgtttgccaaaatcccaggcagcatggacctcagtcttctctgggtacttctgcccctagtcaccatggcctggggccagtatggcgattatggatacccataccagcagtatcatgactacagcgatgatgggtgggtgaatttgaaccggcaaggcttcagctaccagtgtccccaggggcaggtgatagtggccgtgaggagcatcttcagcaagaaggaaggttctgacagacaatggaactacgcctgcatgcccacgccacagagcctcggggaacccacggagtgctggtgggaggagatcaacagggctggcatggaatggtaccagacgtgctccaacaatgggctggtggcaggattccagagccgctacttcgagtcagtgctggatcgggagtggcagttttactgttgtcgctacagcaagaggtgcccatattcctgctggctaacaacagaatatccaggtcactatggtgaggaaatggacatgatttcctacaattatgattactatatccgaggagcaacaaccactttctctgcagtggaaagggatcgccagtggaagtcatatcgccagtcacgagatggtcccgagctcgattcactgcctcgttcc

SEQ ID NO: 442466 - DNA, 3336 bp, Homo sapiens
tcgaatcgtaaccgttcgtacgagaatcgctgtcctctccttgctcgagatccattgtgctctaaaggaaaaaactgtattttggctgatgagatgggcctagggaaaaccatccagtccatcacattcctttcagaaatatttctgagaggaatccacggcccttttctcattatcgcccctctctccaccatcactaactgggagcgggagttccggacatggacagagatgaatgccattgtgtaccacggcagccagatcagcaggcagatgatccagcagtatgaaatggtgtacagagacgcccagggaaaccccctttcaggagtcttcaagttccacgtcgtcatcacaacatttgaaatgatcctagcagactgcccagagttgaagaagattcactggagctgtgtgataattgatgaagcccacagactgaagaataggaactgcaaacttctggagggtctaaagcttatggccctggaacataaagtgcttctcactggaacacccttgcagaactctgtggaggagctcttcagtttgttaaattttctggagccatcacagtttccttcagagaccgctttcttggaggaatttggagatctgaaaacagaggagcaggtaaagaaactgcagtctatcctaaaaccaatgatgcttcggcggctgaaagatgatgtggaaaagaaccttgctcccaaacaagagacgatcattgaggtggaactgaccaatatccagaaaaagtactaccgtgccatcctcgagaagaacttttccttcctgaccaagggggcaaatcagcacaacatgcccaatctcatcaacaccatgatggagctgaggaagtgctgtaaccatccctacctgatcaatggagcagaggagaaaattctagaagatttccgaaaaacccacagccctgatgcccctgactttcagctgcaggccatgattcaggcagcaggaaagcttgtgttgattgataaactactccctaagctgattgcaggtggccacaaagtactcatcttctcccagatggtgcgctgcctcgacatcctagaagattacctcatccagagaagatacacctatgagcgaattgatgggcgagtacggggaaacctgcgccaggcagccatcgaccggttctgtaagccagattcagaccgctttgtctttcttctgtgcaccagagcgggaggcctggggatcaatctcacagctgctgatacctgcatcatatttgattctgactggaacccacaaaatgacttgcaggctcaggcccgatgtcaccgcataggccagagcaaagctgtgaaggtgtatcgcctcatcactcgaaattcctacgagcgcgagatgtttgacaaggccagcctaaagctggggctggacaaggctgttcttcaggacatcaaccgaaagggcggcaccaatggggtacagcagctctcaaaaatggaggtggaggacctactccggaaaggtgcttatggagccttaatggatgaagaagatgaaggctccaagttctgtgaagaagacatagaccagattctgcagaggcgaacgcacaccatcaccatccagtctgaggggaaagggtccacttttgccaaggctagctttgtggcttcaggaaacagaacagatatttccttagatgatcctaacttttggcagaaatgggctaaaatagctgaactagacactgaagcaaagaatgaaaaggaaagcttagtgatcgaccgacctcgcgtgagaaagcagaccaaacactacaactcgtttgaggaagacgagctcatggagttttcagagttagacagcgactcagacgaaaggcccacgagatccaggcgcctcaatgacaaagccaggcgctacctccgagcggagtgcttccgggtagagaagaacctgctcatctttggctggggccggtggaaggacatcctgactcatggccgattcaagtggcatctgaacgagaaggacatggagatgatttgccgtgccctcctggtgtactgtgtcaagcattataagggggacgagaagatcaagagtttcatttgggaactgatcacacctaccaaagatgggcaagcccagaccctccagaaccactcaggcttatctgccccagtccccagagggaggaaggggaagaagacgaagaaccagttgctaatcccagagctaaaggatgcagattggctagccacctgcaaccccgaggtggtcttgcatgatgatggctataagaaacacctcaaacagcactgcaacaaagtacttttgcgagtccggatgctgtactacctaaaagctgaaatactgggagaagcagctgagaaagcatttgaaggatctcctgccagggagctggatgtacctctgcctgacatcgactacatggagatcccagtggactggtgggatgctgaagccgataagtcacttctcattggcgtgttcaagcatggttatgaaaggtacaatgccatgcgagcagacccagcactttgcttcctggagaaagttgggatgcccgatgagaagtccctttctgcagaacagggtgttacagatgggacctcagacattcctgaaagaggcaacacagataaagaagacaatgctgaggacaaagtagatggcctccagaaacaaacggagagttccagtgatggaggtgatggcgtttttagcgaaaagaaggatgacagccgggcagcccaggatggctccgacccagacaaatcgccctggccagtttcctccgccctcacagctcgtctcagacgtctggtcactgtttaccagcgctgcaaccgcaaggaactgtgccggcctgaaattctgggaccaggtaaccaaggatattgggttcaggaagagatgttcaggagaacctcagaaatggacctcatcaacaaggaagcccaaaagaggtggactaggagagaacaagcagacttctatagaacagtgtcttcctttggtgttgtttacgatcaagaaaagaaaacctttgactggacacagttccgcatcatttcccgtttggacaagaagtcggatgagagcctggaacagtatttttatagttttgtggccatgtgccggaatgtctgtcgtctacccacatggaaagatggcggtcccccagataccaccatctacgttagggtgtccttgcagggtgtctgagctaaacttcaccaaataatagctgtttgtattttggctgctgcaggagccattttagaaataaatatcttccttcaatagatgaaaatgaaaatacag

SEQ ID NO: 442467 - DNA, 2605 bp, Homo sapiens
tcgaatcgtaaccgttcgtacgagaatcgctgtcctctccttgctcgagaagaacttttccttcctgaccaagggggcaaatcagcacaacatgcccaatctcatcaacaccatgatggagctgaggaagtgctgtaaccatccctacctgatcaatggagcagaggagaaaattctagaagatttccgaaaaacccacagccctgatgcccctgactttcagctgcaggccatgattcaggcagcaggaaagcttgtgttgattgataaactactccctaagctgattgcaggtggccacaaagtactcatcttctcccagatggtgcgctgcctcgacatcctagaagattacctcatccagagaagatacacctatgagcgaattgatgggcgagtacggggaaacctgcgccaggcagccatcgaccggttctgtaagccagattcagaccgctttgtctttcttctgtgcaccagagcgggaggcctggggatcaatctcacagctgctgatacctgcatcatatttgattctgactggaacccacaaaatgacttgcaggctcaggcccgatgtcaccgcataggccagagcaaagctgtgaaggtgtatcgcctcatcactcgaaattcctacgagcgcgagatgtttgacaaggccagcctaaagctggggctggacaaggctgttcttcaggacatcaaccgaaagggcggcaccaatggggtacagcagctctcaaaaatggaggtggaggacctactccggaaaggtgcttatggagccttaatggatgaagaagatgaaggctccaagttctgtgaagaagacatagaccagattctgcagaggcgaacgcacaccatcaccatccagtctgaggggaaagggtccacttttgccaaggctagctttgtggcttcaggaaacagaacagatatttccttagatgatcctaacttttggcagaaatgggctaaaatagctgaactagacactgaagcaaagaatgaaaaggaaagcttagtgatcgaccgacctcgcgtgagaaagcagaccaaacactacaactcgtttgaggaagacgagctcatggagttttcagagttagacagcgactcagacgaaaggcccacgagatccaggcgcctcaatgacaaagccaggcgctacctccgagcggagtgcttccgggtagagaagaacctgctcatctttggctggggccggtggaaggacatcctgactcatggccgattcaagtggcatctgaacgagaaggacatggagatgatttgccgtgccctcctggtgtactgtgtcaagcattataagggggacgagaagatcaagagtttcatttgggaactgatcacacctaccaaagatgggcaagcccagaccctccagaaccactcaggcttatctgccccagtccccagagggaggaaggggaagaagacgaagaaccagttgctaatcccagagctaaaggatgcagattggctagccacctgcaaccccgaggtggtcttgcatgatgatggctataagaaacacctcaaacagcactgcaacaaagtacttttgcgagtccggatgctgtactacctaaaagctgaaatactgggagaagcagctgagaaagcatttgaaggatctcctgccagggagctggatgtacctctgcctgacatcgactacatggagatcccagtggactggtgggatgctgaagccgataagtcacttctcattggcgtgttcaagcatggttatgaaaggtacaatgccatgcgagcagacccagcactttgcttcctggagaaagttgggatgcccgatgagaagtccctttctgcagaacagggtgttacagatgggacctcagacattcctgaaagaggcaacacagataaagaagacaatgctgaggacaaagtagatggcctccagaaacaaacggagagttccagtgatggaggtgatggcgtttttagcgaaaagaaggatgacagccgggcagcccaggatggctccgacccagacaaatcgccctggccagtttcctccgccctcacagctcgtctcagacgtctggtcactgtttaccagcgctgcaaccgcaaggaactgtgccggcctgaaattctgggaccaggtaaccaaggatattgggttcaggaagagatgttcaggagaacctcagaaatggacctcatcaacaaggaagcccaaaagaggtggactaggagagaacaagcagacttctatagaacagtgtcttcctttggtgttgtttacgatcaagaaaagaaaacctttgactggacacagttccgcatcatttcccgtttggacaagaagtcggatgagagcctggaacagtatttttatagttttgtggccatgtgccggaatgtctgtcgtctacccacatggaaagatggcggtcccccagataccaccatctacgttagggtgtccttgcagggtgtctgagctaaacttcaccaaataatagctgtttgtattttggctgctgcaggagccattttagaaataaatatcttccttcaatagatgaaaatgaaaatacag

SEQ ID NO: 442468 - DNA, 2675 bp, Homo sapiens
tcgaatcgtaaccgttcgtacgagaatcgctgtcctctccttgctcgagatccattgtgctctaaaggaaaaaactgtattttggctgatgagatgggcctagggaaaaccatccagtccatcacattcctttcagaaatatttctgagaggaatccacggcccttttctcattatcgcccctctctccaccatcactaactgggagcgggagttccggacatggacagagatgaatgccattgtgtaccacggcagccagatcagcaggcagatgatccagcagtatgaaatggtgtacagagacgcccagggaaaccccctttcaggagtcttcaagttccacgtcgtcatcacaacatttgaaatgatcctagcagactgcccagagttgaagaagattcactggagctgtgtgataattgatgaagcccacagactgaagaataggaactgcaaacttctggagggtctaaagcttatggccctggaacataaagtgcttctcactggaacacccttgcagaactctgtggaggagctcttcagtttgttaaattttctggagccatcacagtttccttcagagaccgctttcttggaggaatttggagatctgaaaacagaggagcagacaaaagatctccttgaggacaaggcccacatcttctcccaagttgtgtttgttgtattgaccagcacaatgtctggcatatagtaaactctaaatgattcaaggtaaagaaactgcagtctatcctaaaaccaatgatgcttcggcggctgaaagatgatgtggaaaagaaccttgctcccaaacaagagacgatcattgaggtggaactgaccaatatccagaaaaagtactaccgtgccatcctcgagaagaacttttccttcctgaccaagggggcaaatcagcacaacatgcccaatctcatcaacaccatgatggagctgaggaagtgctgtaaccatccctacctgatcaatggagcagaggagaaaattctagaagatttccgaaaaacccacagccctgatgcccctgactttcagctgcaggccatgattcaggcagcaggaaagcttgtgttgattgataaactactccctaagctgattgcaggtggccacaaagtactcatcttctcccagatggtgcgctgcctcgacatcctagaagattacctcatccagagaagatacacctatgagcgaattgatgggcgagtacggggaaacctgcgccaggcagccatcgaccggttctgtaagccagattcagaccgctttgtctttcttctgtgcaccagagcgggaggcctggggatcaatctcacagctgctgatacctgcatcatatttgattctgactggaacccacaaaatgacttgcaggctcaggcccgatgtcaccgcataggccagagcaaagctgtgaaggtgtatcgcctcatcactcgaaattcctacgagcgcgagatgtttgacaaggccagcctaaagctggggctggacaaggctgttcttcaggacatcaaccgaaagggcggcaccaatggggtacagcagctctcaaaaatggaggtggaggacctactccggaaaggtgcttatggagccttaatggatgaagaagatgaaggctccaagttctgtgaagaagacatagaccagattctgcagaggcgaacgcacaccatcaccatccagtctgaggggaaagggtccacttttgccaaggctagctttgtggcttcaggaaacagaacagatatttccttagatgatcctaacttttggcagaaatgggctaaaatagctgaactagacactgaagcaaagaatgaaaaggaaagcttagtgatcgaccgacctcgcgtgagaaagcagaccaaacactacaactcgtttgaggaagacgagctcatggagttttcagagttagacagcgactcagacgaaaggcccacgagatccaggcgcctcaatgacaaagccaggcgctacctccgagcggagtgcttccgggtagagaagaacctgctcatctttggctggggccggtggaaggacatcctgactcatggccgattcaagtggcatctgaacgagaaggacatggagatgatttgccgtgccctcctggtgtactgtgtcaagcattataagggggacgagaagatcaagagtttcatttgggaactgatcacacctaccaaagatgggcaagcccagaccctccagaaccactcaggcttatctgccccagtccccagagggaggaaggggaagaagacgaagaaccagttgctaatcccagagctaaaggatgcagattggctagccacctgcaaccccgaggtggtcttgcatgatgatggctataagaaacacctcaaacagcactgcaacaagtgagtgtccctcctccccataccctggtggcagcccggctcagactgcttcgattcctgggaaccccacagggagagcacttcatgctcttgtgctacttctgtgcaaggtctagaaagacaggatgtgttatctgtggtctaagctggctcagaattcatgttacagctcctataactcctttaacagtacctctgctctcccgcagaacctggcccctctgccactgcattgtatatacccctgaggattttt

SEQ ID NO: 442469 - DNA, 1412 bp, Homo sapiens
  misc_feature (1406)..(1406): n is a, c, g, or t
tcgaatcgtaaccgttcgtacgagaatcgctgtcctctccttgctcgagatccattgtgctctaaaggaaaaaactgtattttggctgatgagatgggcctagggaaaaccatccagtccatcacattcctttcagaaatatttctgagaggaatccacggcccttttctcattatcgcccctctctccaccatcactaactgggagcgggagttccggacatggacagagatgaatgccattgtgtaccacggcagccagatcagcaggcagatgatccagcagtatgaaatggtgtacagagacgcccagggaaaccccctttcaggagtcttcaagttccacgtcgtcatcacaacatttgaaatgatcctagcagactgcccagagttgaagaagattcactggagctgtgtgataattgatgaagcccacagactgaagaataggaactgcaaacttctggagggtctaaagcttatggccctggaacataaagtgcttctcactggaacacccttgcagaactctgtggaggagctcttcagtttgttaaattttctggagccatcacagtttccttcagagaccgctttcttggaggaatttggagatctgaaaacagaggagcagacaaaagatctccttgaggacaaggcccacatcttctcccaagttgtgtttgttgtattgaccagcacaatgtctggcatatagtaaactctaaatgattcaaggtaaagaaactgcagtctatcctaaaaccaatgatgcttcggcggctgaaagatgatgtggaaaagaaccttgctcccaaacaagagacgatcattgaggtggaactgaccaatatccagaaaaagtactaccgtgccatcctcgagaagaacttttccttcctgaccaagggggcaaatcagcacaacatgcccaatctcatcaacaccatgatggagctgaggaagtgctgtaaccatccctacctgatcaatggagcagaggagaaaattctagaagatttccgaaaaacccacagccctgatgcccctgactttcagctgcaggccatgattcaggcagcaggaaagcttgtgttgattgataaactactccctaagctgattgcaggtggccacaaagtactcatcttctcccagatggtgcgctgcctcgacatcctagaagattacctcatccagagaagatacacctatgagcgaattgatgggcgagtacggggaaacctgcgccaggcagccatcgaccggttctgtaagccagattcagaccgctttgtctttcttctgtgcaccagagcgggaggcctggggatcaatctcacagctgctgaattccaccacactggcggccgcaaggagaggacagcgatctcgtacgaacggttnccatgg

SEQ ID NO: 442470 - DNA, 1775 bp, Homo sapiens
tcgaatcgtaaccgttcgtacgagaatcgctgtcctctccttgctcgagatccattgtgctctaaaggaaaaaactgtattttggctgatgagatgggcctagggaaaaccatccagtccatcacattcctttcagaaatatttctgagaggaatccacggcccttttctcattatcgcccctctctccaccatcactaactgggagcgggagttccggacatggacagagatgaatgccattgtgtaccacggcagccagatcagcaggcagatgatccagcagtatgaaatggtgtacagagacgcccagggaaaccccctttcaggagtcttcaagttccacgtcgtcatcacaacatttgaaatgatcctagcagactgcccagagttgaagaagattcactggagctgtgtgataattgatgaagcccacagactgaagaataggaactgcaaacttctggagggtctaaagcttatggccctggaacataaagtgcttctcactggaacacccttgcagaactctgtggaggagctcttcagtttgttaaattttctggagccatcacagtttccttcagagaccgctttcttggaggaatttggagatctgaaaacagaggagcagacaaaagatctccttgaggacaaggcccacatcttctcccaagttgtgtttgttgtattgaccagcacaatgtctggcatatagtaaactctaaatgattcaaggtaaagaaactgcagtctatcctaaaaccaatgatgcttcggcggctgaaagatgatgtggaaaagaaccttgctcccaaacaagagacgatcattgaggtggaactgaccaatatccagaaaaagtactaccgtgccatcctcgagaagaacttttccttcctgaccaagggggcaaatcagcacaacatgcccaatctcatcaacaccatgatggagctgaggaagtgctgtaaccatccctacctgatcaatggagcagaggagaaaattctagaagatttccgaaaaacccacagccctgatgcccctgactttcagctgcaggccatgattcaggcagcaggaaagcttgtgttgattgataaactactccctaagctgattgcaggtggccacaaagtactcatcttctcccagatggtgcgctgcctcgacatcctagaagattacctcatccagagaagatacacctatgagcgaattgatgggcgagtacggggaaacctgcgccaggcagccatcgaccggttctgtaagccagattcagaccgctttgtctttcttctgtgcaccagagcgggaggcctggggatcaatctcacagctgctgatacctgcatcatatttgattctgactggaacccacaaaatgacttgcaggtaaccactaggatgattgctgtttaccttagctgccctggatcccagaacatcatgatagggcctggcttggctacagagcatccgtgatgctctatgctatggtgtcagctggatgacaggcttagggccttggtcagggggtgaaactgaatgaaaagtaaatgtcgacccttccaactaattagagagtgtggttctttccgttaaatcaaatgatgtttcacagtggtagcctccagatatagactagaactactaattattattattatcagaaataaagatactaatcttgaaaaaaaaaaactttaaaccccaagggatctcgaccaggggggggacagggattctcgtccaaccggttccaatttg

SEQ ID NO: 442471 - DNA, 1761 bp, Homo sapiens
tcgaatcgtaaccgttcgtacgagaatcgctgtcctctccttgctcgagatccattgtgctctaaaggaaaaaactgtattttggctgatgagatgggcctagggaaaaccatccagtccatcacattcctttcagaaatatttctgagaggaatccacggcccttttctcattatcgcccctctctccaccatcactaactgggagcgggagttccggacatggacagagatgaatgccattgtgtaccacggcagccagatcagcaggcagatgatccagcagtatgaaatggtgtacagagacgcccagggaaaccccctttcaggagtcttcaagttccacgtcgtcatcacaacatttgaaatgatcctagcagactgcccagagttgaagaagattcactggagctgtgtgataattgatgaagcccacagactgaagaataggaactgcaaacttctggagggtctaaagcttatggccctggaacataaagtgcttctcactggaacacccttgcagaactctgtggaggagctcttcagtttgttaaattttctggagccatcacagtttccttcagagaccgctttcttggaggaatttggagatctgaaaacagaggagcagacaaaagatctccttgaggacaaggcccacatcttctcccaagttgtgtttgttgtattgaccagcacaatgtctggcatatagtaaactctaaatgattcaaggtaaagaaactgcagtctatcctaaaaccaatgatgcttcggcggctgaaagatgatgtggaaaagaaccttgctcccaaacaagagacgatcattgaggtggaactgaccaatatccagaaaaagtactaccgtgccatcctcgagaagaacttttccttcctgaccaagggggcaaatcagcacaacatgcccaatctcatcaacaccatgatggagctgaggaagtgctgtaaccatccctacctgatcaatggagcagaggagaaaattctagaagatttccgaaaaacccacagccctgatgcccctgactttcagctgcaggccatgattcaggcagcaggaaagcttgtgttgattgataaactactccctaagctgattgcaggtggccacaaagtactcatcttctcccagatggtgcgctgcctcgacatcctagaagattacctcatccagagaagatacacctatgagcgaattgatgggcgagtacggggaaacctgcgccaggcagccatcgaccggttctgtaagccagattcagaccgctttgtctttcttctgtgcaccagagcgggaggcctggggatcaatctcacagctgctgatacctgcatcatatttgattctgactggaacccacaaaatgacttgcaggtaaccactaggatgattgctgtttaccttagctgccctggatcccagaacatcatgatagggcctggcttggctacagagcatccgtgatgctctatgctatggtgtcagctggatgacaggcttagggccttggtcagggggtgaaactgaatgaaaagtaaatgtcgacccttccaactaattagagagtgtggttctttccgttaaatcaaatgatgtttcacagtggtagcctccagatatagactagaactactaattattattattatcagaaataaagatactaatcttgactccgctgcgcgccggcactattttataattctattcataaataaagtagaacgatatcgtc

SEQ ID NO: 442472 - DNA, 1681 bp, Homo sapiens
tcccacatctggtcctgcccactaacctgagtctcacacagactccccctctgaattagggatgcacagtgacttgccttttgcatttcaccatcctgtccctgtcccacctctgtctgtgccttttcttgtgctacattccttccctatccttggctaaggctccccttgaagttttaggtcaaatgttccttttctcccagccaggttgtaagttcccaaagggcacaggttatgttacacctttcttaatcctcacagggtacttgggaaatcttactgacaaactaaatggtcctggagtttatttgtttactaaggaggagaccaagtgcatggccttccttcctaccaccaccacctgtgggctaaggagtagggtctgccatccagagcacagcccaactctgttctaacaaaccccagcccagctcttctaaaacccgtgtgtaacaccccccttggctatccacttgccctatgctgtctttctgtttcaggcttatctgccccagtccccagagggaggaaggggaagaagacgaagaaccagttgctaatcccagagctaaaggatgcagattggctagccacctgcaaccccgaggtggtcttgcatgatgatggctataagaaacacctcaaacagcactgcaacaaagtacttttgcgagtccggatgctgtactacctaaaagctgaaatactgggagaagcagctgagaaagcatttgaaggatctcctgccagggagctggatgtacctctgcctgacatcgactacatggagatcccagtggactggtgggatgctgaagccgataagtcacttctcattggcgtgttcaagcatggttatgaaaggtacaatgccatgcgagcagacccagcactttgcttcctggagaaagttgggatgcccgatgagaagtccctttctgcagaacagggtgttacagatgggacctcagacattcctgaaagaggcaacacagataaagaagacaatgctgaggacaaagtagatggcctccagaaacaaacggagagttccagtgatggaggtgatggcgtttttagcgaaaagaaggatgacagccgggcagcccaggatggctccgacccagacaaatcgccctggccagtttcctccgccctcacagctcgtctcagacgtctggtcactgtttaccagcgctgcaaccgcaaggaactgtgccggcctgaaattctgggaccaggtaaccaaggatattgggttcaggaagagatgttcaggagaacctcagaaatggacctcatcaacaaggaagcccaaaagaggtggactaggagagaacaagcagacttctatagaacagtgtcttcctttggtgttgtttacgatcaagaaaagaaaacctttgactggacacagttccgcatcatttcccgtttggacaagaagtcggatgagagcctggaacagtatttttatagttttgtggccatgtgccggaatgtctgtcgtctacccacatggaaagatggcggtcccccagataccaccatctacgttagggtgtccttgcagggtgtctgagctaaacttcaccaaataatagctgtttgtattttggctgctgcaggagccattttagaaataaatatcttccttcaatagatgaaaatgaaaatacag

SEQ ID NO: 442473 - DNA, 412 bp, Homo sapiens
aactactaattattattattatcagaaataaagatactaatcttgaatcttgactaatgctctaattcttgatatgtagacgattcgggcattttcactcagtttgttggttaagatggtcatgtgtcatgtacagtaaacgagttaacccagaggggtgggaaagttccatggtgtggcaggggcaacagtggcagcctcactagttcctttgttctccacacagtgcaacacattagagtttatatgtgtccagttaagtggctttatggattctattttctggttttagccaaactaaataaccggtggctttaaaagattactgcaaagattggagttgatatattttttgaaagctaacataaacaagcaagaaaatggcagggtccagtttggagttcttcatcaa

SEQ ID NO: 442474 - DNA, 3440 bp, Homo sapiens
tcgaatcgtaaccgttcgtacgagaatcgctgtcctctccttgctcgagatccattgtgctctaaaggaaaaaactgtattttggctgatgagatgggcctagggaaaaccatccagtccatcacattcctttcagaaatatttctgagaggaatccacggcccttttctcattatcgcccctctctccaccatcactaactgggagcgggagttccggacatggacagagatgaatgccattgtgtaccacggcagccagatcagcaggcagatgatccagcagtatgaaatggtgtacagagacgcccagggaaaccccctttcaggagtcttcaagttccacgtcgtcatcacaacatttgaaatgatcctagcagactgcccagagttgaagaagattcactggagctgtgtgataattgatgaagcccacagactgaagaataggaactgcaaacttctggagggtctaaagcttatggccctggaacataaagtgcttctcactggaacacccttgcagaactctgtggaggagctcttcagtttgttaaattttctggagccatcacagtttccttcagagaccgctttcttggaggaatttggagatctgaaaacagaggagcagacaaaagatctccttgaggacaaggcccacatcttctcccaagttgtgtttgttgtattgaccagcacaatgtctggcatatagtaaactctaaatgattcaaggtaaagaaactgcagtctatcctaaaaccaatgatgcttcggcggctgaaagatgatgtggaaaagaaccttgctcccaaacaagagacgatcattgaggtggaactgaccaatatccagaaaaagtactaccgtgccatcctcgagaagaacttttccttcctgaccaagggggcaaatcagcacaacatgcccaatctcatcaacaccatgatggagctgaggaagtgctgtaaccatccctacctgatcaatggagcagaggagaaaattctagaagatttccgaaaaacccacagccctgatgcccctgactttcagctgcaggccatgattcaggcagcaggaaagcttgtgttgattgataaactactccctaagctgattgcaggtggccacaaagtactcatcttctcccagatggtgcgctgcctcgacatcctagaagattacctcatccagagaagatacacctatgagcgaattgatgggcgagtacggggaaacctgcgccaggcagccatcgaccggttctgtaagccagattcagaccgctttgtctttcttctgtgcaccagagcgggaggcctggggatcaatctcacagctgctgatacctgcatcatatttgattctgactggaacccacaaaatgacttgcaggctcaggcccgatgtcaccgcataggccagagcaaagctgtgaaggtgtatcgcctcatcactcgaaattcctacgagcgcgagatgtttgacaaggccagcctaaagctggggctggacaaggctgttcttcaggacatcaaccgaaagggcggcaccaatggggtacagcagctctcaaaaatggaggtggaggacctactccggaaaggtgcttatggagccttaatggatgaagaagatgaaggctccaagttctgtgaagaagacatagaccagattctgcagaggcgaacgcacaccatcaccatccagtctgaggggaaagggtccacttttgccaaggctagctttgtggcttcaggaaacagaacagatatttccttagatgatcctaacttttggcagaaatgggctaaaatagctgaactagacactgaagcaaagaatgaaaaggaaagcttagtgatcgaccgacctcgcgtgagaaagcagaccaaacactacaactcgtttgaggaagacgagctcatggagttttcagagttagacagcgactcagacgaaaggcccacgagatccaggcgcctcaatgacaaagccaggcgctacctccgagcggagtgcttccgggtagagaagaacctgctcatctttggctggggccggtggaaggacatcctgactcatggccgattcaagtggcatctgaacgagaaggacatggagatgatttgccgtgccctcctggtgtactgtgtcaagcattataagggggacgagaagatcaagagtttcatttgggaactgatcacacctaccaaagatgggcaagcccagaccctccagaaccactcaggcttatctgccccagtccccagagggaggaaggggaagaagacgaagaaccagttgctaatcccagagctaaaggatgcagattggctagccacctgcaaccccgaggtggtcttgcatgatgatggctataagaaacacctcaaacagcactgcaacaaagtacttttgcgagtccggatgctgtactacctaaaagctgaaatactgggagaagcagctgagaaagcatttgaaggatctcctgccagggagctggatgtacctctgcctgacatcgactacatggagatcccagtggactggtgggatgctgaagccgataagtcacttctcattggcgtgttcaagcatggttatgaaaggtacaatgccatgcgagcagacccagcactttgcttcctggagaaagttgggatgcccgatgagaagtccctttctgcagaacagggtgttacagatgggacctcagacattcctgaaagaggcaacacagataaagaagacaatgctgaggacaaagtagatggcctccagaaacaaacggagagttccagtgatggaggtgatggcgtttttagcgaaaagaaggatgacagccgggcagcccaggatggctccgacccagacaaatcgccctggccagtttcctccgccctcacagctcgtctcagacgtctggtcactgtttaccagcgctgcaaccgcaaggaactgtgccggcctgaaattctgggaccaggtaaccaaggatattgggttcaggaagagatgttcaggagaacctcagaaatggacctcatcaacaaggaagcccaaaagaggtggactaggagagaacaagcagacttctatagaacagtgtcttcctttggtgttgtttacgatcaagaaaagaaaacctttgactggacacagttccgcatcatttcccgtttggacaagaagtcggatgagagcctggaacagtatttttatagttttgtggccatgtgccggaatgtctgtcgtctacccacatggaaagatggcggtcccccagataccaccatctacgttagggtgtccttgcagggtgtctgagctaaacttcaccaaataatagctgtttgtattttggctgctgcaggagccattttagaaataaatatcttccttcaatagatgaaaatgaaaatacag

SEQ ID NO: 442475 - DNA, 3552 bp, Homo sapiens
tcgaatcgtaaccgttcgtacgagaatcgctgtcctctccttgctcgagatccattgtgctctaaaggaaaaaactgtattttggctgatgagatgggcctagggaaaaccatccagtccatcacattcctttcagaaatatttctgagaggaatccacggcccttttctcattatcgcccctctctccaccatcactaactgggagcgggagttccggacatggacagagatgaatgccattgtgtaccacggcagccagatcagcaggcagatgatccagcagtatgaaatggtgtacagagacgcccagggaaaccccctttcaggagtcttcaagttccacgtcgtcatcacaacatttgaaatgatcctagcagactgcccagagttgaagaagattcactggagctgtgtgataattgatgaagcccacagactgaagaataggaactgcaaacttctggagggtctaaagcttatggccctggaacataaagtgcttctcactggaacacccttgcagaactctgtggaggagctcttcagtttgttaaattttctggagccatcacagtttccttcagagaccgctttcttggaggaatttggagatctgaaaacagaggagcagacaaaagatctccttgaggacaaggcccacatcttctcccaagttgtgtttgttgtattgaccagcacaatgtctggcatatagtaaactctaaatgattcaaggtaaagaaactgcagtctatcctaaaaccaatgatgcttcggcggctgaaagatgatgtggaaaagaaccttgctcccaaacaagagacgatcattgaggtggaactgaccaatatccagaaaaagtactaccgtgccatcctcgagaagaacttttccttcctgaccaagggggcaaatcagcacaacatgcccaatctcatcaacaccatgatggagctgaggaagtgctgtaaccatccctacctgatcaatggagcagaggagaaaattctagaagatttccgaaaaacccacagccctgatgcccctgactttcagctgcaggccatgattcaggcagcaggaaagcttgtgttgattgataaactactccctaagctgattgcaggtggccacaaagtactcatcttctcccagatggtgcgctgcctcgacatcctagaagattacctcatccagagaagatacacctatgagcgaattgatgggcgagtacggggaaacctgcgccaggcagccatcgaccggttctgtaagccagattcagaccgctttgtctttcttctgtgcaccagagcgggaggcctggggatcaatctcacagctgctgatacctgcatcatatttgattctgactggaacccacaaaatgacttgcaggctcaggcccgatgtcaccgcataggccagagcaaagctgtgaaggtgtatcgcctcatcactcgaaattcctacgagcgcgagatgtttgacaaggccagcctaaagctggggctggacaaggctgttcttcaggacatcaaccgaaagggcggcaccaatggggtacagcagctctcaaaaatggaggtggaggacctactccggaaaggtgcttatggagccttaatggatgaagaagatgaaggctccaagttctgtgaagaagacatagaccagattctgcagaggcgaacgcacaccatcaccatccagtctgaggggaaagggtccacttttgccaaggctagctttgtggcttcaggaaacagaacagatatttccttagatgatcctaacttttggcagaaatgggctaaaatagctgaactagacactgaagcaaagaatgaaaaggaaagcttagtgatcgaccgacctcgcgtgagaaagcagaccaaacactacaactcgtttgaggaagacgagctcatggagttttcagagttagacagcgactcagacgaaaggcccacgagatccaggcgcctcaatgacaaagccaggcgctacctccgagcggagtgcttccgggtagagaagaacctgctcatctttggctggggccggtggaaggacatcctgactcatggccgattcaagtggcatctgaacgagaaggacatggagatgatttgccgtgccctcctggtgtactgtgtcaagcattataagggggacgagaagatcaagagtttcatttgggaactgatcacacctaccaaagatgggcaagcccagaccctccagaaccactcaggcttatctgccccagtccccagagggaggaaggggaagaagacgaagaaccagttgctaatcccagagctaaaggatgcagattggctagccacctgcaaccccgaggtggtcttgcatgatgatggctataagaaacacctcaaacagcactgcaacaaagtacttttgcgagtccggatgctgtactacctaaaagctgaaatactgggagaagcagctgagaaagcatttgaaggatctcctgccagggagctggatgtacctctgcctgacatcgactacatggagatcccagtggactggtgggatgctgaagccgataagtcacttctcattggcgtgttcaagcatggttatgaaaggtacaatgccatgcgagcagacccagcactttgcttcctggagaaagttgggatgcccgatgagaagtccctttctgcagaacagggtgttacagatgggacctcagacattcctgaaagaggcaacacagataaagaagacaatgctgaggacaaagtagatggcctccagaaacaaacggagagttccagtgatggaggtgatggcgtttttagcgaaaagaaggatgacagccgggcagcccaggatggctccgacccagacaaatcgccctggccagtttcctccgccctcacagctcgtctcagacgtctggtcactgtttaccagcgctgcaaccgcaaggaactgtgccggcctgaaattctgggaccaggtaaccaaggatattgggttcaggaagagatgttcaggagaacctcagaaatggacctcatcaacaaggaagcccaaaagaggtggactaggagagaacaagcagacttctatagaacagtgtcttcctttggtgttgtttacgatcaagaaaagaaaacctttgactggacacagttccgcatcatttcccgtttggacaagaagtcggatgagagcctggaacagtatttttatagttttgtggccatgtgccggaatgtctgtcgtctacccacatggaaagatggcggtcccccagataccaccatctacgttgaacccatcactgaggaacgtgctgcaagaactctgtaccgcattgaactgttacggaaagtccgagagcaagtgctcaagtgccctcagctgcatgaacgcctccagctgtgcaggcccagcctctacctcccagtctggtgggagtgtgggaagcatgatcgagacctgctcatcggcactgccaaacatgggctgaaccgcactgactgttacatcatgaacgacccccagc

SEQ ID NO: 442476 - DNA, 2524 bp, Homo sapiens
tcgaatcgtaaccgttcgtacgagaatcgctgtcctctccttgctcgagatccattgtgctctaaaggaaaaaactgtattttggctgatgagatgggcctagggaaaaccatccagtccatcacattcctttcagaaatatttctgagaggaatccacggcccttttctcattatcgcccctctctccaccatcactaactgggagcgggagttccggacatggacagagatgaatgccattgtgtaccacggcagccagatcagcaggcagatgatccagcagtatgaaatggtgtacagagacgcccagggaaaccccctttcaggagtcttcaagttccacgtcgtcatcacaacatttgaaatgatcctagcagactgcccagagttgaagaagattcactggagctgtgtgataattgatgaagcccacagactgaagaataggaactgcaaacttctggagggtctaaagcttatggccctggaacataaagtgcttctcactggaacacccttgcagaactctgtggaggagctcttcagtttgttaaattttctggagccatcacagtttccttcagagaccgctttcttggaggaatttggagatctgaaaacagaggagcagacaaaagatctccttgaggacaaggcccacatcttctcccaagttgtgtttgttgtattgaccagcacaatgtctggcatatagtaaactctaaatgattcaaggtaaagaaactgcagtctatcctaaaaccaatgatgcttcggcggctgaaagatgatgtggaaaagaaccttgctcccaaacaagagacgatcattgaggtggaactgaccaatatccagaaaaagtactaccgtgccatcctcgagaagaacttttccttcctgaccaagggggcaaatcagcacaacatgcccaatctcatcaacaccatgatggagctgaggaagtgctgtaaccatccctacctgatcaatggagcagaggagaaaattctagaagatttccgaaaaacccacagccctgatgcccctgactttcagctgcaggccatgattcaggcagcaggaaagcttgtgttgattgataaactactccctaagctgattgcaggtggccacaaagtactcatcttctcccagatggtgcgctgcctcgacatcctagaagattacctcatccagagaagatacacctatgagcgaattgatgggcgagtacggggaaacctgcgccaggcagccatcgaccggttctgtaagccagattcagaccgctttgtctttcttctgtgcaccagagcgggaggcctggggatcaatctcacagctgctgatacctgcatcatatttgattctgactggaacccacaaaatgacttgcaggctcaggcccgatgtcaccgcataggccagagcaaagctgtgaaggtgtatcgcctcatcactcgaaattcctacgagcgcgagatgtttgacaaggccagcctaaagctggggctggacaaggctgttcttcaggacatcaaccgaaagggcggcaccaatggggtacagcagctctcaaaaatggaggtggaggacctactccggaaaggtgcttatggagccttaatggatgaagaagatgaaggctccaagttctgtgaagaagacatagaccagattctgcagaggcgaacgcacaccatcaccatccagtctgaggggaaagggtccacttttgccaaggctagctttgtggcttcaggaaacagaacagatatttccttagatgatcctaacttttggcagaaatgggctaaaatagctgaactagacactgaagcaaagaatgaaaaggaaagcttagtgatcgaccgacctcgcgtgagaaagcagaccaaacactacaactcgtttgaggaagacgagctcatggagttttcagagttagacagcgactcagacgaaaggcccacgagatccaggcgcctcaatgacaaagccaggcgctacctccgagcggagtgcttccgggtagagaagaacctgctcatctttggctggggccggtggaaggacatcctgactcatggccgattcaagtggcatctgaacgagaaggacatggagatgatttgccgtgccctcctggtgtactgtgtcaagcattataagggggacgagaagatcaagagtttcatttgggaactgatcacacctaccaaagatgggcaagcccagaccctccagaaccactcaggcttatctgccccagtccccagagggaggaaggggaagaagacgaagaaccagttgctaatcccagagctaaaggatgcagattggctagccacctgcaaccccgaggtggtcttgcatgatgatggctataagaaacacctcaaacagcactgcaacaaagtacttttgcgagtccggatgctgtactacctaaaagctgaaatactgggagaagcagctgagaaagcatttgaaggatctcctgccaggtaaagcaaatgaaa

SEQ ID NO: 442477 - DNA, 3244 bp, Homo sapiens
tcgaatcgtaaccgttcgtacgagaatcgctgtcctctccttgctcgagatccattgtgctctaaaggaaaaaactgtattttggctgatgagatgggcctagggaaaaccatccagtccatcacattcctttcagaaatatttctgagaggaatccacggcccttttctcattatcgcccctctctccaccatcactaactgggagcgggagttccggacatggacagagatgaatgccattgtgtaccacggcagccagatcagcaggcagatgatccagcagtatgaaatggtgtacagagacgcccagggaaaccccctttcaggagtcttcaagttccacgtcgtcatcacaacatttgaaatgatcctagcagactgcccagagttgaagaagattcactggagctgtgtgataattgatgaagcccacagactgaagaataggaactgcaaacttctggagggtctaaagcttatggccctggaacataaagtgcttctcactggaacacccttgcagaactctgtggaggagctcttcagtttgttaaattttctggagccatcacagtttccttcagagaccgctttcttggaggaatttggagatctgaaaacagaggagcagacaaaagatctccttgaggacaaggcccacatcttctcccaagttgtgtttgttgtattgaccagcacaatgtctggcatatagtaaactctaaatgattcaaggtaaagaaactgcagtctatcctaaaaccaatgatgcttcggcggctgaaagatgatgtggaaaagaaccttgctcccaaacaagagacgatcattgaggtggaactgaccaatatccagaaaaagtactaccgtgccatcctcgagaagaacttttccttcctgaccaagggggcaaatcagcacaacatgcccaatctcatcaacaccatgatggagctgaggaagtgctgtaaccatccctacctgatcaatggagcagaggagaaaattctagaagatttccgaaaaacccacagccctgatgcccctgactttcagctgcaggccatgattcaggcagcaggaaagcttgtgttgattgataaactactccctaagctgattgcaggtggccacaaagtactcatcttctcccagatggtgcgctgcctcgacatcctagaagattacctcatccagagaaggctcaggcccgatgtcaccgcataggccagagcaaagctgtgaaggtgtatcgcctcatcactcgaaattcctacgagcgcgagatgtttgacaaggccagcctaaagctggggctggacaaggctgttcttcaggacatcaaccgaaagggcggcaccaatggggtacagcagctctcaaaaatggaggtggaggacctactccggaaaggtgcttatggagccttaatggatgaagaagatgaaggctccaagttctgtgaagaagacatagaccagattctgcagaggcgaacgcacaccatcaccatccagtctgaggggaaagggtccacttttgccaaggctagctttgtggcttcaggaaacagaacagatatttccttagatgatcctaacttttggcagaaatgggctaaaatagctgaactagacactgaagcaaagaatgaaaaggaaagcttagtgatcgaccgacctcgcgtgagaaagcagaccaaacactacaactcgtttgaggaagacgagctcatggagttttcagagttagacagcgactcagacgaaaggcccacgagatccaggcgcctcaatgacaaagccaggcgctacctccgagcggagtgcttccgggtagagaagaacctgctcatctttggctggggccggtggaaggacatcctgactcatggccgattcaagtggcatctgaacgagaaggacatggagatgatttgccgtgccctcctggtgtactgtgtcaagcattataagggggacgagaagatcaagagtttcatttgggaactgatcacacctaccaaagatgggcaagcccagaccctccagaaccactcaggcttatctgccccagtccccagagggaggaaggggaagaagacgaagaaccagttgctaatcccagagctaaaggatgcagattggctagccacctgcaaccccgaggtggtcttgcatgatgatggctataagaaacacctcaaacagcactgcaacaaagtacttttgcgagtccggatgctgtactacctaaaagctgaaatactgggagaagcagctgagaaagcatttgaaggatctcctgccagggagctggatgtacctctgcctgacatcgactacatggagatcccagtggactggtgggatgctgaagccgataagtcacttctcattggcgtgttcaagcatggttatgaaaggtacaatgccatgcgagcagacccagcactttgcttcctggagaaagttgggatgcccgatgagaagtccctttctgcagaacagggtgttacagatgggacctcagacattcctgaaagaggcaacacagataaagaagacaatgctgaggacaaagtagatggcctccagaaacaaacggagagttccagtgatggaggtgatggcgtttttagcgaaaagaaggatgacagccgggcagcccaggatggctccgacccagacaaatcgccctggccagtttcctccgccctcacagctcgtctcagacgtctggtcactgtttaccagcgctgcaaccgcaaggaactgtgccggcctgaaattctgggaccaggtaaccaaggatattgggttcaggaagagatgttcaggagaacctcagaaatggacctcatcaacaaggaagcccaaaagaggtggactaggagagaacaagcagacttctatagaacagtgtcttcctttggtgttgtttacgatcaagaaaagaaaacctttgactggacacagttccgcatcatttcccgtttggacaagaagtcggatgagagcctggaacagtatttttatagttttgtggccatgtgccggaatgtctgtcgtctacccacatggaaagatggcggtcccccagataccaccatctacgttagggtgtccttgcagggtgtctgagctaaacttcaccaaataatagctgtttgtattttggctgctgcaggagccattttagaaataaatatcttccttcaatagatgaaaatgaaaatacag

SEQ ID NO: 442478 - DNA, 1684 bp, Homo sapiens
gcatggttctatcccaaatgtgtcctgaggatacacttatgctttgtgaaaggagtagagaaaagaggactttcttcccagtagtcctctccatttctaggaaagcttagtgatcgaccgacctcgcgtgagaaagcagaccaaacactacaactcgtttgaggaagacgagctcatggagttttcagagttagacagcgactcagacgaaaggcccacgagatccaggcgcctcaatgacaaagccaggcgctacctccgagcggagtgcttccgggtagagaagaacctgctcatctttggctggggccggtggaaggacatcctgactcatggccgattcaagtggcatctgaacgagaaggacatggagatgatttgccgtgccctcctggtgtactgtgtcaagcattataagggggacgagaagatcaagagtttcatttgggaactgatcacacctaccaaagatgggcaagcccagaccctccagaaccactcaggcttatctgccccagtccccagagggaggaaggggaagaagacgaagaaccagttgctaatcccagagctaaaggatgcagattggctagccacctgcaaccccgaggtggtcttgcatgatgatggctataagaaacacctcaaacagcactgcaacaaagtacttttgcgagtccggatgctgtactacctaaaagctgaaatactgggagaagcagctgagaaagcatttgaaggatctcctgccagggagctggatgtacctctgcctgacatcgactacatggagatcccagtggactggtgggatgctgaagccgataagtcacttctcattggcgtgttcaagcatggttatgaaaggtacaatgccatgcgagcagacccagcactttgcttcctggagaaagttgggatgcccgatgagaagtccctttctgcagaacagggtgttacagatgggacctcagacattcctgaaagaggcaacacagataaagaagacaatgctgaggacaaagtagatggcctccagaaacaaacggagagttccagtgatggaggtgatggcgtttttagcgaaaagaaggatgacagccgggcagcccaggatggctccgacccagacaaatcgccctggccagtttcctccgccctcacagctcgtctcagacgtctggtcactgtttaccagcgctgcaaccgcaaggaactgtgccggcctgaaattctgggaccaggtaaccaaggatattgggttcaggaagagatgttcaggagaacctcagaaatggacctcatcaacaaggaagcccaaaagaggtggactaggagagaacaagcagacttctatagaacagtgtcttcctttggtgttgtttacgatcaagaaaagaaaacctttgactggacacagttccgcatcatttcccgtttggacaagaagtcggatgagagcctggaacagtatttttatagttttgtggccatgtgccggaatgtctgtcgtctacccacatggaaagatggcggtcccccagataccaccatctacgttagggtgtccttgcagggtgtctgagctaaacttcaccaaataatagctgtttgtattttggctgctgcaggagccattttagaaataaatatcttccttcaatagatgaaaatgaaaatacag

SEQ ID NO: 442479 - DNA, 597 bp, Homo sapiens
tcgaatcgtaaccgttcgtacgagaatcgctgtcctctccttgctcgagatccattgtgctctaaagggaagagatgttcaggagaacctcagaaatggacctcatcaacaaggaagcccaaaagaggtggactaggagagaacaagcagacttctatagaacagtgtcttcctttggtgttgtttacgatcaagaaaagaaaacctttgactggacacagttccgcatcatttcccgtttggacaagaagtcggatgagagcctggaacagtatttttatagttttgtggccatgtgccggaatgtctgtcgtctacccacatggaaagatggcggtcccccagataccaccatctacgttgaacccatcactgaggaacgtgctgcaagaactctgtaccgcattgaactgttacggaaagtccgagagcaagtgctcaagtgccctcagctgcatgaacgcctccagctgtgcaggcccagcctctacctcccagtctggtgggagtgtgggaagcatgatcgagacctgctcatcggcactgccaaacatgggctgaaccgcactgactgttacatcatgaacgacccccagc

SEQ ID NO: 442480 - DNA, 2287 bp, Homo sapiens
tcgtttcctgtcgctgcttggtaacaatggggaagataatggctgcctgagcaacgtctccgagcaggcgctgggctagaggcgggtctcaaccagctactcattggaggcgggcttgagagcggcggccagggaggtgcggagcagcctcggcggcggcggccgaaccaaccgagtcggatcctgaccctaaaacctagtattttccacttgttcatcaatatggaaaactcagattccaatgacaaaggaagtggtgatcagtctgcagcacagcgcagaagtcagatggaccgattggatcgagaagaagctttctatcaatttgtaaataacctgagtgaagaagattataggcttatgagagataacaatttgctaggcaccccaggtgaaagtactgaggaagagttgctgagacgactacagcaaattaaagaaggcccaccaccgcaaaactcagatgaaaatagaggaggagactcttcagatgatgtgtctaatggtgactctataatagactggcttaactctgtcagacaaactggaaatacaacaagaagtgggcaaagaggaaaccaatcttggagagcagtgagtcggactaatccaaacagtggtgatttcagattcagtttagagataaatgttaaccgtaataatgggagccaaaattcagagaatgaaaatgagccatctgcaagacgttctagtggagaaaatgtggaaaacaacagccaaaggcaagtggaaaacccacgatctgaatcaacatctgcaaggccatctagatcagaacgaaattcaactgaagcgttaacagaggtcccacctaccagaggtcagaggagggcaagaagcaggagcccagaccatcggagaaccagagcaagagctgaaagaagtaggtcacctctgcatccaatgagtgaaattccacgaagatctcatcatagtatctcatctcagacttttgaacatcctttggtaaatgagacggagggaagttctagaacccggcaccatgtgacattgaggcagcaaatatctgggcctgagttgctaagtagaggtctttttgcagcttctggaacaagaaatgcttctcaaggagcaggttcttcagacacagctgccagtggtgaatctacaggatcaggacagagacctccaaccatagtccttgatcttcaagtaagaagagttcgtcctggagaatatcggcagagagatagcatagccagcagaactcggtctaggtctcagacaccaaacaacactgtcacctatgaaagtgaacgaggaggttttaggcgtacattttcacgttctgagcgggcaggtgtgagaacctatgtcagtaccatcagaattcccattcgtagaatcttaaatactggtttaagtgagactacatctgttgcaattcagaccatgttaaggcagataatgacaggttttggtgagttaagctattttatgtacagtgatagcgactcagagcctactggctcagtctcaaatcgaaatatggaaagggcagagtcacggagtggaagaggaggttctggtggtggtagtagttctggttccagttcgagttccagttccagttcgagttccagttccagttcaagttccagttccagtcctagttccagttccggtggtgaaagttcagaaactagctcagatttatttgaaggcagtaatgaaggaagctcatcatcaggctcatcaggtgccaggcgagagggtcgacatagggccccagtcacatttgatgaaagtggctctttgcccttccttagcctggctcagtttttcctcttaaatgaggatgatgatgaccaacctagaggactcaccaaagaacagattgacaacttggcaatgagaagttttggtgaaaatgatgcattaaaaacctgtagtgtttgcattacagaatatacagaaggcaacaaacttcgtaaactaccttgttcccatgagtaccatgtccactgcatcgatcgctggttatctgagaattctacctgtcctatttgtcgcagagcagtcttagcttctggtaacagagaaagtgttgtgtaattaagatctgaactctcagctatgtagctgatatagtgatgggcaaacaggaatcacttgcttttatgtccactttttgagtggtacttaaatgtaaagtaacaacctgaattgagtcattgctttctgaaggaatcattgtcctttctccagtttttgttccagaataaaaggaaatattttaaaagcc

SEQ ID NO: 442481 - DNA, 602 bp, Homo sapiens
atcagccagaggtttcaagccatggaatggaggaaaggcggcagagaggagcagcaccagaggccaggagagagtggaaagggccacagcttgtttttaaaaaattctataatttggaagagggtggcgattaattttccaaatacacttcagagtcccactttccacatagctcccttactcacagccctttggttttttagacaaaatttaagagctctcataaagccagaagtattgataactccttagtgcatccaaaaaaaagtgttcacatcaatcccttacaaagactatgtgctgtagactttgcttcttcctatacatttgtcttacgactcaggtggtgtgtacaccacctgagtcggatcctgaccctaaaacctagtattttccacttgttcatcaatatggaaaactcagattccaatgacaaaggaagtggtgatcagtctgcagcacagcgcagaagtcagatggaccgattggatcgagaagaagctttctatcaatttgtaaataacctgagtgaagaagattataggcttatgagagataacaatttgctaggcaccccaggtatgcttacatatatttaagga

SEQ ID NO: 442482 - DNA, 3261 bp, Homo sapiens
tcgtttcctgtcgctgcttggtaacaatggggaagataatggctgcctgagcaacgtctccgagcaggcgctgggctagaggcgggtctcaaccagctactcattggaggcgggcttgagagcggcggccagggaggtgcggagcagcctcggcggcggcggccgaaccaaccgagtcggatcctgaccctaaaacctagtattttccacttgttcatcaatatggaaaactcagattccaatgacaaaggaagtggtgatcagtctgcagcacagcgcagaagtcagatggaccgattggatcgagaagaagctttctatcaatttgtaaataacctgagtgaagaagattataggcttatgagagataacaatttgctaggcaccccaggtgaaagtactgaggaagagttgctgagacgactacagcaaattaaagaaggcccaccaccgcaaaactcagatgaaaatagaggaggagactcttcagatgatgtgtctaatggtgactctataatagactggcttaactctgtcagacaaactggaaatacaacaagaagtgggcaaagaggaaaccaatcttggagagcagtgagtcggactaatccaaacagtggtgatttcagattcagtttagagataaatgttaaccgtaataatgggagccaaaattcagagaatgaaaatgagccatctgcaagacgttctagtggagaaaatgtggaaaacaacagccaaaggcaagtggaaaacccacgatctgaatcaacatctgcaaggccatctagatcagaacgaaattcaactgaagcgttaacagaggtcccacctaccagaggtcagaggagggcaagaagcaggagcccagaccatcggagaaccagagcaagagctgaaagaagtaggtcacctctgcatccaatgagtgaaattccacgaagatctcatcatagtatctcatctcagacttttgaacatcctttggtaaatgagacggagggaagttctagaacccggcaccatgtgacattgaggcagcaaatatctgggcctgagttgctaagtagaggtctttttgcagcttctggaacaagaaatgcttctcaaggagcaggttcttcagacacagctgccagtggtgaatctacaggatcaggacagagacctccaaccatagtccttgatcttcaagtaagaagagttcgtcctggagaatatcggcagagagatagcatagccagcagaactcggtctaggtctcagacaccaaacaacactgtcacctatgaaagtgaacgaggaggttttaggcgtacattttcacgttctgagcgggcaggtgtgagaacctatgtcagtaccatcagaattcccattcgtagaatcttaaatactggtttaagtgagactacatctgttgcaattcagaccatgttaaggcagataatgacaggttttggtgagttaagctattttatgtacagtgatagcgactcagagcctactggctcagtctcaaatcgaaatatggaaagggcagagtcacggagtggaagaggaggttctggtggtggtagtagttctggttccagttcgagttccagttccagttcgagttccagttccagttcaagttccagttccagtcctagttccagttccggtggtgaaagttcagaaactagctcagatttatttgaaggcagtaatgaaggaagctcatcatcaggctcatcaggtgccaggcgagagggtcgacatagggccccagtcacatttgatgaaagtggctctttgcccttccttagcctggctcagtttttcctcttaaatgaggatgatgatgaccaacctagaggactcaccaaagaacagattgacaacttggcaatgagaagttttggtgaaaatgatgcattaaaaacctgtagtgtttgcattacagaatatacagaaggcaacaaacttcgtaaactaccttgttcccatgagtaccatgtccactgcatcgatcgctggttatctgagaattctacctgtcctatttgtcgcagagcagtcttagcttctggtaacagagaaagtgttgtgtaattaagatctgaactctcagctatgtagctgatatagtgatgggcaaacaggaatcacttgcttttatgtccactttttgagtggtacttaaatgtaaagtaacaacctgaattgagtcattgctttctgaaggaatcattgtcctttctccagtttttgttccagaataaaaggaaatattttaaaagccacgttataggacctaaaaatctgatttccgtaccagttaaattggtagcatcactgttactgataatttatcatatacacttgtcaatttttcctttgttatcttaaaagatctgccttagcaatggctcctttttcatgttgatctttaaattttcccacaccataagagaggagcaaaggaaattaccagtttagactaagttacagtatgtgtttcataagtgattaaagctatatcattcccagttattagttaacacaaattcagccacattctgagtattgtttgttcacctttcagacttggtgatactggacatgtcagtgtaaataacactaaggttaggatcttctaagtgtataactgtctcctaagcccatcactgtggcacactgtagagtgagcttatagtttaattgagatatttatcttgtggaaatattaaaaagcctatgcttgtgtaagtgaaaaaaaatcacattcatttgtttaaaaatgtaaagctattttgtagaggctcagtacttttccaatgcactgttgtatgaatgcattaaaaattgtaaagtaccatgaaaaaaaaaaaaaaaaaaaaaaaaaaaaaaaaagggggggggggtaaaaaattccccggggggggccaattggggtcccgttttttgttgcacaaggggggccccataatggggagcggtgtaatatataaaggctaagggaatgggccggggtttaaacaaggcttgtaactggggaaaaaagtgggtatcctgggagccactctggtgggaaagggaacccttttattctggggggggtgcgccaattagtgggaacatctaccttaagggatattataaaggctcaaagggagaacaatataaaatttcacgggtggctatagtggtgtacacacggggaatattatgtgggtgtaaaaagtgtggacaaggagattgttgtaaacgagtttc

SEQ ID NO: 442483 - DNA, 2886 bp, Homo sapiens
tcgtttcctgtcgctgcttggtaacaatggggaagataatggctgcctgagcaacgtctccgagcaggcgctgggctagaggcgggtctcaaccagctactcattggaggcgggcttgagagcggcggccagggaggtgcggagcagcctcggcggcggcggccgaaccaaccgagtcggatcctgaccctaaaacctagtattttccacttgttcatcaatatggaaaactcagattccaatgacaaaggaagtggtgatcagtctgcagcacagcgcagaagtcagatggaccgattggatcgagaagaagctttctatcaatttgtaaataacctgagtgaagaagattataggcttatgagagataacaatttgctaggcaccccaggtgaaagtactgaggaagagttgctgagacgactacagcaaattaaagaaggcccaccaccgcaaaactcagatgaaaatagaggaggagactcttcagatgatgtgtctaatggtgactctataatagactggcttaactctgtcagacaaactggaaatacaacaagaagtgggcaaagaggaaaccaatcttggagagcagtgagtcggactaatccaaacagtggtgatttcagattcagtttagagataaatgttaaccgtaataatgggagccaaaattcagagaatgaaaatgagccatctgcaagacgttctagtggagaaaatgtggaaaacaacagccaaaggcaagtggaaaacccacgatctgaatcaacatctgcaaggccatctagatcagaacgaaattcaactgaagcgttaacagaggtcccacctaccagaggtcagaggagggcaagaagcaggagcccagaccatcggagaaccagagcaagagctgaaagaagtaggtcacctctgcatccaatgagtgaaattccacgaagatctcatcatagtatctcatctcagacttttgaacatcctttggtaaatgagacggagggaagttctagaacccggcaccatgtgacattgaggcagcaaatatctgggcctgagttgctaagtagaggtctttttgcagcttctggaacaagaaatgcttctcaaggagcaggttcttcagacacagctgccagtggtgaatctacaggatcaggacagagacctccaaccatagtccttgatcttcaagtaagaagagttcgtcctggagaatatcggcagagagatagcatagccagcagaactcggtctaggtctcagacaccaaacaacactgtcacctatgaaagtgaacgaggaggttttaggcgtacattttcacgttctgagcgggcaggtgtgagaacctatgtcagtaccatcagaattcccattcgtagaatcttaaatactggtttaagtgagactacatctgttgcaattcagaccatgttaaggcagataatgacaggttttggtgagttaagctattttatgtacagtgatagcgactcagagcctactggctcagtctcaaatcgaaatatggaaagggcagagtcacggagtggaagaggaggttctggtggtggtagtagttctggttccagttcgagttccagttccagttcgagttccagttccagttcaagttccagttccagtcctagttccagttccggtggtgaaagttcagaaactagctcagatttatttgaaggcagtaatgaaggaagctcatcatcaggctcatcaggtgccaggcgagagggtcgacatagggccccagtcacatttgatgaaagtggctctttgcccttccttagcctggctcagtttttcctcttaaatgaggatgatgatgaccaacctagaggactcaccaaagaacagattgacaacttggcaatgagaagttttggtgaaaatgatgcattaaaaacctgtagtgtttgcattacagaatatacagaaggcaacaaacttcgtaaactaccttgttcccatgagtaccatgtccactgcatcgatcgctggttatctgagaattctacctgtcctatttgtcgcagagcagtcttagcttctggtaacagagaaagtgttgtgtaattaagatctgaactctcagctatgtagctgatatagtgatgggcaaacaggaatcacttgcttttatgtccactttttgagtggtacttaaatgtaaagtaacaacctgaattgagtcattgctttctgaaggaatcattgtcctttctccagtttttgttccagaataaaaggaaatattttaaaagccacgttataggacctaaaaatctgatttccgtaccagttaaattggtagcatcactgttactgataatttatcatatacacttgtcaatttttcctttgttatcttaaaagatctgccttagcaatggctcctttttcatgttgatctttaaattttcccacaccataagagaggagcaaaggaaattaccagtttagactaagttacagtatgtgtttcataagtgattaaagctatatcattcccagttattagttaacacaaattcagccacattctgagtattgtttgttcacctttcagacttggtgatactggacatgtcagtgtaaataacactaaggttaggatcttctaagtgtataactgtctcctaagcccatcactgtggcacactgtagagtgagcttatagtttaattgagatatttatcttgtggaaatattaaaaagcctatgcttgtgtaagtgaaaaaaaatcacattcatttgtttaaaaatgtaaagctattttgtagaggctcagtacttttccaatgcaattaacgcctgatgcataaattaaccctcgggtcggcgggtgggggtggcggttgtgcg

SEQ ID NO: 442484 - DNA, 2662 bp, Homo sapiens
  misc_feature (2659)..(2661): n is a, c, g, or t
tgactctagagtatccctcacagcttcgggctaacctctgactctggtaggtgggacctctgttaacgcttcagtggaaaacccacgatctgaatcaacatctgcaaggccatctagatcagaacgaaattcaactgaagcgttaacagaggtcccacctaccagaggtcagaggagggcaagaagcaggagcccagaccatcggagaaccagagcaagagctgaaagaagtaggtcacctctgcatccaatgagtgaaattccacgaagatctcatcatagtatctcatctcagacttttgaacatcctttggtaaatgagacggagggaagttctagaacccggcaccatgtgacattgaggcagcaaatatctgggcctgagttgctaagtagaggtctttttgcagcttctggaacaagaaatgcttctcaaggagcaggttcttcagacacagctgccagtggtgaatctacaggatcaggacagagacctccaaccatagtccttgatcttcaagtaagaagagttcgtcctggagaatatcggcagagagatagcatagccagcagaactcggtctaggtctcagacaccaaacaacactgtcacctatgaaagtgaacgaggaggttttaggcgtacattttcacgttctgagcgggcaggtgtgagaacctatgtcagtaccatcagaattcccattcgtagaatcttaaatactggtttaagtgagactacatctgttgcaattcagaccatgttaaggcagataatgacaggttttggtgagttaagctattttatgtacagtgatagcgactcagagcctactggctcagtctcaaatcgaaatatggaaagggcagagtcacggagtggaagaggaggttctggtggtggtagtagttctggttccagttcgagttccagttccagttcgagttccagttccagttcaagttccagttccagtcctagttccagttccggtggtgaaagttcagaaactagctcagatttatttgaaggcagtaatgaaggaagctcatcatcaggctcatcaggtgccaggcgagagggtcgacatagggccccagtcacatttgatgaaagtggctctttgcccttccttagcctggctcagtttttcctcttaaatgaggatgatgatgaccaacctagaggactcaccaaagaacagattgacaacttggcaatgagaagttttggtgaaaatgatgcattaaaaacctgtagtgtttgcattacagaatatacagaaggcaacaaacttcgtaaactaccttgttcccatgagtaccatgtccactgcatcgatcgctggttatctgagaattctacctgtcctatttgtcgcagagcagtcttagcttctggtaacagagaaagtgttgtgtaattaagatctgaactctcagctatgtagctgatatagtgatgggcaaacaggaatcacttgcttttatgtccactttttgagtggtacttaaatgtaaagtaacaacctgaattgagtcattgctttctgaaggaatcattgtcctttctccagtttttgttccagaataaaaggaaatattttaaaagccacgttataggacctaaaaatctgatttccgtaccagttaaattggtagcatcactgttactgataatttatcatatacacttgtcaatttttcctttgttatcttaaaagatctgccttagcaatggctcctttttcatgttgatctttaaattttcccacaccataagagaggagcaaaggaaattaccagtttagactaagttacagtatgtgtttcataagtgattaaagctatatcattcccagttattagttaacacaaattcagccacattctgagtattgtttgttcacctttcagacttggtgatactggacatgtcagtgtaaataacactaaggttaggatcttctaagtgtataactgtctcctaagcccatcactgtggcacactgtagagtgagcttatagtttaattgagatatttatcttgtggaaatattaaaaagcctatgcttgtgtaagtgaaaaaaaatcacattcatttgtttaaaaatgtaaagctattttgtagaggctcagtacttttccaatgcactgttgtatgaatgcattaaaaattgtaaagtaccatgcttagaactgagaaaactgctttttgtgagccaacatagtaacaaacacaccaaacaaagtacaaagctgcttttgtaagtgtgtagatgtcaagagcagaacatatctataatatttaatgtgtgaacagctactgtgacatgcaaaggaaaggacagtgcagaattaaaccgtgttgaagaccagtggaaattgtataatttaacttggatttaggcaggaagtgaaatatgggaggagtaaagaaaactgaagaatttaaagttttcctgaagacagtaataatgcagacacaaactggtttcatatggtgagagcagccacagcagcagcttgacctggtattctacctgagtagatgaagcagaagatcagcaagtttggcagagttttggtttaagaaaaacaaaccactactacctagcacaagttaaatttacaagtctgctcctcaaaaatgaaaaaannna

SEQ ID NO: 442485 - DNA, 3336 bp, Homo sapiens
  misc_feature (3333)..(3335): n is a, c, g, or t
tcgtttcctgtcgctgcttggtaacaatggggaagataatggctgcctgagcaacgtctccgagcaggcgctgggctagaggcgggtctcaaccagctactcattggaggcgggcttgagagcggcggccagggaggtgcggagcagcctcggcggcggcggccgaaccaaccgagtcggatcctgaccctaaaacctagtattttccacttgttcatcaatatggaaaactcagattccaatgacaaaggaagtggtgatcagtctgcagcacagcgcagaagtcagatggaccgattggatcgagaagaagctttctatcaatttgtaaataacctgagtgaagaagattataggcttatgagagataacaatttgctaggcaccccaggtgaaagtactgaggaagagttgctgagacgactacagcaaattaaagaaggcccaccaccgcaaaactcagatgaaaatagaggaggagactcttcagatgatgtgtctaatggtgactctataatagactggcttaactctgtcagacaaactggaaatacaacaagaagtgggcaaagaggaaaccaatcttggagagcagtgagtcggactaatccaaacagtggtgatttcagattcagtttagagataaatgttaaccgtaataatgggagccaaaattcagagaatgaaaatgagccatctgcaagacgttctagtggagaaaatgtggaaaacaacagccaaaggcaagtggaaaacccacgatctgaatcaacatctgcaaggccatctagatcagaacgaaattcaactgaagcgttaacagaggtcccacctaccagaggtcagaggagggcaagaagcaggagcccagaccatcggagaaccagagcaagagctgaaagaagtaggtcacctctgcatccaatgagtgaaattccacgaagatctcatcatagtatctcatctcagacttttgaacatcctttggtaaatgagacggagggaagttctagaacccggcaccatgtgacattgaggcagcaaatatctgggcctgagttgctaagtagaggtctttttgcagcttctggaacaagaaatgcttctcaaggagcaggttcttcagacacagctgccagtggtgaatctacaggatcaggacagagacctccaaccatagtccttgatcttcaagtaagaagagttcgtcctggagaatatcggcagagagatagcatagccagcagaactcggtctaggtctcagacaccaaacaacactgtcacctatgaaagtgaacgaggaggttttaggcgtacattttcacgttctgagcgggcaggtgtgagaacctatgtcagtaccatcagaattcccattcgtagaatcttaaatactggtttaagtgagactacatctgttgcaattcagaccatgttaaggcagataatgacaggttttggtgagttaagctattttatgtacagtgatagcgactcagagcctactggctcagtctcaaatcgaaatatggaaagggcagagtcacggagtggaagaggaggttctggtggtggtagtagttctggttccagttcgagttccagttccagttcgagttccagttccagttcaagttccagttccagtcctagttccagttccggtggtgaaagttcagaaactagctcagatttatttgaaggcagtaatgaaggaagctcatcatcaggctcatcaggtgccaggcgagagggtcgacatagggccccagtcacatttgatgaaagtggctctttgcccttccttagcctggctcagtttttcctcttaaatgaggatgatgatgaccaacctagaggactcaccaaagaacagattgacaacttggcaatgagaagttttggtgaaaatgatgcattaaaaacctgtagtgtttgcattacagaatatacagaaggcaacaaacttcgtaaactaccttgttcccatgagtaccatgtccactgcatcgatcgctggttatctgagaattctacctgtcctatttgtcgcagagcagtcttagcttctggtaacagagaaagtgttgtgtaattaagatctgaactctcagctatgtagctgatatagtgatgggcaaacaggaatcacttgcttttatgtccactttttgagtggtacttaaatgtaaagtaacaacctgaattgagtcattgctttctgaaggaatcattgtcctttctccagtttttgttccagaataaaaggaaatattttaaaagccacgttataggacctaaaaatctgatttccgtaccagttaaattggtagcatcactgttactgataatttatcatatacacttgtcaatttttcctttgttatcttaaaagatctgccttagcaatggctcctttttcatgttgatctttaaattttcccacaccataagagaggagcaaaggaaattaccagtttagactaagttacagtatgtgtttcataagtgattaaagctatatcattcccagttattagttaacacaaattcagccacattctgagtattgtttgttcacctttcagacttggtgatactggacatgtcagtgtaaataacactaaggttaggatcttctaagtgtataactgtctcctaagcccatcactgtggcacactgtagagtgagcttatagtttaattgagatatttatcttgtggaaatattaaaaagcctatgcttgtgtaagtgaaaaaaaatcacattcatttgtttaaaaatgtaaagctattttgtagaggctcagtacttttccaatgcactgttgtatgaatgcattaaaaattgtaaagtaccatgcttagaactgagaaaactgctttttgtgagccaacatagtaacaaacacaccaaacaaagtacaaagctgcttttgtaagtgtgtagatgtcaagagcagaacatatctataatatttaatgtgtgaacagctactgtgacatgcaaaggaaaggacagtgcagaattaaaccgtgttgaagaccagtggaaattgtataatttaacttggatttaggcaggaagtgaaatatgggaggagtaaagaaaactgaagaatttaaagttttcctgaagacagtaataatgcagacacaaactggtttcatatggtgagagcagccacagcagcagcttgacctggtattctacctgagtagatgaagcagaagatcagcaagtttggcagagttttggtttaagaaaaacaaaccactactacctagcacaagttaaatttacaagtctgctcctcaaaaatgaaaaaannna

SEQ ID NO: 442486 - DNA, 3398 bp, Homo sapiens
  misc_feature (3395)..(3397): n is a, c, g, or t
tcgtttcctgtcgctgcttggtaacaatggggaagataatggctgcctgagcaacgtctccgagcaggcgctgggctagaggcgggtctcaaccagctactcattggaggcgggcttgagagcggcggccagggaggtgcggagcagcctcggcggcggcggccgaaccaaccgagtcggatcctgaccctaaaacctaagcagagtgaagaaaactaaaatccagtttattgtatttcaatactatgtcataacagtcaggtattttccacttgttcatcaatatggaaaactcagattccaatgacaaaggaagtggtgatcagtctgcagcacagcgcagaagtcagatggaccgattggatcgagaagaagctttctatcaatttgtaaataacctgagtgaagaagattataggcttatgagagataacaatttgctaggcaccccaggtgaaagtactgaggaagagttgctgagacgactacagcaaattaaagaaggcccaccaccgcaaaactcagatgaaaatagaggaggagactcttcagatgatgtgtctaatggtgactctataatagactggcttaactctgtcagacaaactggaaatacaacaagaagtgggcaaagaggaaaccaatcttggagagcagtgagtcggactaatccaaacagtggtgatttcagattcagtttagagataaatgttaaccgtaataatgggagccaaaattcagagaatgaaaatgagccatctgcaagacgttctagtggagaaaatgtggaaaacaacagccaaaggcaagtggaaaacccacgatctgaatcaacatctgcaaggccatctagatcagaacgaaattcaactgaagcgttaacagaggtcccacctaccagaggtcagaggagggcaagaagcaggagcccagaccatcggagaaccagagcaagagctgaaagaagtaggtcacctctgcatccaatgagtgaaattccacgaagatctcatcatagtatctcatctcagacttttgaacatcctttggtaaatgagacggagggaagttctagaacccggcaccatgtgacattgaggcagcaaatatctgggcctgagttgctaagtagaggtctttttgcagcttctggaacaagaaatgcttctcaaggagcaggttcttcagacacagctgccagtggtgaatctacaggatcaggacagagacctccaaccatagtccttgatcttcaagtaagaagagttcgtcctggagaatatcggcagagagatagcatagccagcagaactcggtctaggtctcagacaccaaacaacactgtcacctatgaaagtgaacgaggaggttttaggcgtacattttcacgttctgagcgggcaggtgtgagaacctatgtcagtaccatcagaattcccattcgtagaatcttaaatactggtttaagtgagactacatctgttgcaattcagaccatgttaaggcagataatgacaggttttggtgagttaagctattttatgtacagtgatagcgactcagagcctactggctcagtctcaaatcgaaatatggaaagggcagagtcacggagtggaagaggaggttctggtggtggtagtagttctggttccagttcgagttccagttccagttcgagttccagttccagttcaagttccagttccagtcctagttccagttccggtggtgaaagttcagaaactagctcagatttatttgaaggcagtaatgaaggaagctcatcatcaggctcatcaggtgccaggcgagagggtcgacatagggccccagtcacatttgatgaaagtggctctttgcccttccttagcctggctcagtttttcctcttaaatgaggatgatgatgaccaacctagaggactcaccaaagaacagattgacaacttggcaatgagaagttttggtgaaaatgatgcattaaaaacctgtagtgtttgcattacagaatatacagaaggcaacaaacttcgtaaactaccttgttcccatgagtaccatgtccactgcatcgatcgctggttatctgagaattctacctgtcctatttgtcgcagagcagtcttagcttctggtaacagagaaagtgttgtgtaattaagatctgaactctcagctatgtagctgatatagtgatgggcaaacaggaatcacttgcttttatgtccactttttgagtggtacttaaatgtaaagtaacaacctgaattgagtcattgctttctgaaggaatcattgtcctttctccagtttttgttccagaataaaaggaaatattttaaaagccacgttataggacctaaaaatctgatttccgtaccagttaaattggtagcatcactgttactgataatttatcatatacacttgtcaatttttcctttgttatcttaaaagatctgccttagcaatggctcctttttcatgttgatctttaaattttcccacaccataagagaggagcaaaggaaattaccagtttagactaagttacagtatgtgtttcataagtgattaaagctatatcattcccagttattagttaacacaaattcagccacattctgagtattgtttgttcacctttcagacttggtgatactggacatgtcagtgtaaataacactaaggttaggatcttctaagtgtataactgtctcctaagcccatcactgtggcacactgtagagtgagcttatagtttaattgagatatttatcttgtggaaatattaaaaagcctatgcttgtgtaagtgaaaaaaaatcacattcatttgtttaaaaatgtaaagctattttgtagaggctcagtacttttccaatgcactgttgtatgaatgcattaaaaattgtaaagtaccatgcttagaactgagaaaactgctttttgtgagccaacatagtaacaaacacaccaaacaaagtacaaagctgcttttgtaagtgtgtagatgtcaagagcagaacatatctataatatttaatgtgtgaacagctactgtgacatgcaaaggaaaggacagtgcagaattaaaccgtgttgaagaccagtggaaattgtataatttaacttggatttaggcaggaagtgaaatatgggaggagtaaagaaaactgaagaatttaaagttttcctgaagacagtaataatgcagacacaaactggtttcatatggtgagagcagccacagcagcagcttgacctggtattctacctgagtagatgaagcagaagatcagcaagtttggcagagttttggtttaagaaaaacaaaccactactacctagcacaagttaaatttacaagtctgctcctcaaaaatgaaaaaannna

SEQ ID NO: 442487 - DNA, 2135 bp, Homo sapiens
tcgtttcctgtcgctgcttggtaacaatggggaagataatggctgcctgagcaacgtctccgagcaggcgctgggctagaggcgggtctcaaccagctactcattggaggcgggcttgagagcggcggccagggaggtgcggagcagcctcggcggcggcggccgaaccaaccgagtcggatcctgaccctaaaacctagtattttccacttgttcatcaatatggaaaactcagattccaatgacaaaggaagtggtgatcagtctgcagcacagcgcagaagtcagatggaccgattggatcgagaagaagctttctatcaatttgtaaataacctgagtgaagaagattataggcttatgagagataacaatttgctaggcaccccaggtgaaagtactgaggaagagttgctgagacgactacagcaaattaaagaaggcccaccaccgcaaaactcagatgaaaatagaggaggagactcttcagatgatgtgtctaatggtgactctataatagactggcttaactctgtcagacaaactggaaatacaacaagaagtgggcaaagaggaaaccaatcttggagagcagtgagtcggactaatccaaacagtggtgatttcagattcagtttagagataaatgttaaccgtaataatgggagccaaaattcagagaatgaaaatgagccatctgcaagacgttctagtggagaaaatgtggaaaacaacagccaaaggcaagtggaaaacccacgatctgaatcaacatctgcaaggccatctagatcagaacgaaattcaactgaagcgttaacagaggtcccacctaccagaggtcagaggagggcaagaagcaggagcccagaccatcggagaaccagagcaagagctgaaagaagtaggtcacctctgcatccaatgagtgaaattccacgaagatctcatcatagtatctcatctcagacttttgaacatcctttggtaaatgagacggagggaagttctagaacccggcaccatgtgacattgaggcagcaaatatctgggcctgagttgctaagtagaggtctttttgcagcttctggaacaagaaatgcttctcaaggagcaggttcttcagacacagctgccagtggtgaatctacaggatcaggacagagacctccaaccatagtccttgatcttcaagtaagaagagttcgtcctggagaatatcggcagagagatagcatagccagcagaactcggtctaggtctcagacaccaaacaacactgtcacctatgaaagtgaacgaggaggttttaggcgtacattttcacgttctgagcgggcaggtgtgagaacctatgtcagtaccatcagaattcccattcgtagaatcttaaatactggtttaagtgagactacatctgttgcaattcagaccatgttaaggcagataatgacaggttttggtgagttaagctattttatgtacagtgatagcgactcagagcctactggctcagtctcaaatcgaaatatggaaagggcagagtcacggagtggaagaggaggttctggtggtggtagtagttctggttccagttcgagttccagttccagttcgagttccagttccagttcaagttccagttccagtcctagttccagttccggtggtgaaagttcagaaactagctcagatttatttgaaggcagtaatgaaggaagctcatcatcaggctcatcaggtgccaggcgagagggtcgacatagggccccagtcacatttgatgaaagtggctctttgcccttccttagcctggctcagtttttcctcttaaatgaggatgatgatgaccaacctagaggactcaccaaagaacagattgacaacttggcaatgagaagttttggtgaaaatgatgcattaaaaacctgtagtgtttgcattacagaatatacagaaggcaacaaacttcgtaaactaccttgttcccatgagtaccatgtccactgcatcgatcgctggttatctgagaattctacctgtcctatttgtcgcagagcagtcttagcttctggtaacagaggggtgtggaatctgaccctccacatgttgctttattgagggcacaccagtcc

SEQ ID NO: 442488 - DNA, 8134 bp, Homo sapiens
ctacaaggcccgggagcaagccgcgtggctgctttcaactttccttccagccgcgcgttcttggggtctttcctgactaggaaactcctcgctggccgctgacgcacgcagcaagtgagacgcgcggagggatcgagccgcggcccgggcgcagcggtaaaaaacacccattacagaaaccgacccaagggaagacgctgagagcaaacggcacgcgcggacgccgtccggcctcatgcaaggaatcagcgccgcttcgccgcagctgccagccggacggtgcaggagcgcggagtggctcccccgggccccgcggccaaatcgcacccccgccctggaagcggaggcctggccctgggcggccgcgcaggatctggggccgtccgcgggctgcagccccggttcgggagcctcgtggcggccactgcgcctgcctgcagcggctcgcggggccgggcctctccgggtgcggcgcgccggccgggtcctcctcgggccggcggggcctgctttctttttccaggtctccggaccgtggccactcgcggagccgcacaagcctgcgtgtggctgcggaaaggggtccgcacgcgggcggggccccgggccagcatgcaggcttggatgcggggcgcgggggtggcctccgactccccgcccgggctgcgtacagtagcgcgcggcgcggcggcgggggcgcgcgggccaattccaggagccggcggcggcgagccgcgccctggctgataccggaaaggcctgtgattggccgccggccgcccctatgcaaacgagctgagggaatggaattcctccggccgggcttacagtaaaagcacgttcatttccaggcactctcattcatagagccagcgggcgcgggcgggacgggcgccccgcggccggacccagccagggcaccacgctgcccggccctgcgccgccaggcacttctttccggggctcctagggacgccagaaggaagtcaacctctgctgcttctccttggcctgcgttggaccttcctttttttgttgtttttttttgtttttcccctttcttccttttgaattaactggcttcttggctggatgttttcaacttctttcctggctgcgaacttttccccaattgttttccttttacaacagggggagaaagtgctctgtggtccgaggcgagccgtgaagttgcgtgtgcgtggcagtgtgcgtggcaggatgtgcgtgcgtgtgtaacccgagccgcccgatctgtttcgatctgcgccgcggagccctccctcaaggcccgctccacctgctgcggttacgcggcgctcgtgggtgttcgtgcctcggagcagctaaccggcgggtgctgggcgacggtggaggagtatcgtctcgctgctgcccgagtcagggctgagtcacccagctgatgtagacagtggctgccttccgaagagtgcgtgtttgcatgtgtgtgactctgcggctgctcaactcccaacaaaccagaggaccagccacaaacttaaccaacatccccaaacccgagttcacagatgtgggagagctgtagaaccctgagtgtcatcgactgggccttcttatgattgttgttttaagattagctgaagatctctgaaacgctgaattttctgcactgagcgttttgacagaattcattgagagaacagagaacatgacaagtacttctagctcagcactgctccaactactgaagctgattttcaaggctacttaaaaaaatctgcagcgtacattaatggatttctgttgtgtttaaattctccacagattgtattgtaaatattttatgaagtagagcatatgtatatatttatatatacgtgcacatacattagtagcactacctttggaagtctcagctcttgcttttcgggactgaagccagttttgcatgataaaagtggccttgttacgggagataattgtgttctgttgggactttagacaaaactcacctgcaaaaaactgacaggcattaactactggaacttccaaataatgtgtttgctgatcgttttactcttcgcataaatattttaggaagtgtatgagaattttgccttcaggaacttttctaacagccaaagacagaacttaacctctgcaagcaagattcgtggaagatagtctccactttttaatgcactaagcaatcggttgctaggagcccatcctgggtcagaggccgatccgcagaaccagaacgttttcccctcctggactgttagtaacttagtctccctcctcccctaaccacccccgcccccccccaccccccgcagtaataaaggcccctgaacgtgtatgttggtctcccgggagctgcttgctgaagatccgcgcccctgtcgccgtctggtaggagctgtttgcagggtcctaactcaatcggcttgttgtgatgcgtatccccgtagatgccagcacgagccgccgcttcacgccgccttccaccgcgctgagcccaggcaagatgagcgaggcgttgccgctgggcgccccggacgccggcgctgccctggccggcaagctgaggagcggcgaccgcagcatggtggaggtgctggccgaccacccgggcgagctggtgcgcaccgacagccccaacttcctctgctccgtgctgcctacgcactggcgctgcaacaagaccctgcccatcgctttcaaggtggtggccctaggggatgttccagatggcactctggtcactgtgatggctggcaatgatgaaaactactcggctgagctgagaaatgctaccgcagccatgaagaaccaggttgcaagatttaatgacctcaggtttgtcggtcgaagtggaagagggaaaagcttcactctgaccatcactgtcttcacaaacccaccgcaagtcgccacctaccacagagccatcaaaatcacagtggatgggccccgagaacctcgaagacatcggcagaaactagatgatcagaccaagcccgggagcttgtccttttccgagcggctcagtgaactggagcagctgcggcgcacagccatgagggtcagcccacaccacccagcccccacgcccaaccctcgtgcctccctgaaccactccactgcctttaaccctcagcctcagagtcagatgcaggatacaaggcagatccaaccatccccaccgtggtcctacgatcagtcctaccaatacctgggatccattgcctctccttctgtgcacccagcaacgcccatttcacctggacgtgccagcggcatgacaaccctctctgcagaactttccagtcgactctcaacggcacccgacctgacagcgttcagcgacccgcgccagttccccgcgctgccctccatctccgacccccgcatgcactatccaggcgccttcacctactccccgacgccggtcacctcgggcatcggcatcggcatgtcggccatgggctcggccacgcgctaccacacctacctgccgccgccctaccccggctcgtcgcaagcgcagggaggcccgttccaagccagctcgccctcctaccacctgtactacggcgcctcggccggctcctaccagttctccatggtgggcggcgagcgctcgccgccgcgcatcctgccgccctgcaccaacgcctccaccggctccgcgctgctcaaccccagcctcccgaaccagagcgacgtggtggaggccgagggcagccacagcaactcccccaccaacatggcgccctccgcgcgcctggaggaggccgtgtggaggccctactgaggcgccaggcctggcccggctgggccacgcgggccgccgccttcgcctccgggcgcgcgggcctcctgttcgcgacaagcccgccgggatcccgggccctgggcccggccaccgtcctggggccgagggcgcccgacggccaggatctcgctgtaggtcaggcccgcgcagcctcctgcgcccagaagcccacgccgccgccgtctgctggcgccccggccctcgcggaggtgtccgaggcgacgcacctcgagggtgtccgccggccccagcacccaggggacgcgctggaaagcaaacaggaagattcccggagggaaactgtgaatgcttctgatttagcaatgctgtgaataaaaagaaagattttatacccttgacttaactttttaaccaagttgtttattccaaagagtgtggaattttggttggggtggggggagaggagggatgcaactcgccctgtttggcatctaattcttatttttaatttttccgcaccttatcaattgcaaaatgcgtatttgcatttgggtggtttttatttttatatacgtttatataaatatatataaattgagcttgcttctttcttgctttgaccatggaaagaaatatgattcccttttctttaagttttatttaacttttcttttggacttttgggtagttgtttttttttgttttgttttgtttttttgagaaacagctacagctttgggtcatttttaactactgtattcccacaaggaatccccagatatttatgtatcttgatgttcagacatttatgtgttgataattttttaattatttaaatgtacttatattaagaaaaatatcaagtactacattttcttttgttcttgatagtagccaaagttaaatgtatcacattgaagaaggctagaaaaaaagaatgagtaatgtgatcgcttggttatccagaagtattgtttacattaaactccctttcatgttaatcaaacaagtgagtagctcacgcagcaacgtttttaataggatttttagacactgagggtcactccaaggatcagaagtatggaattttctgccaggctcaacaagggtctcatatctaacttcctccttaaaacagagaaggtcaatctagttccagagggttgaggcaggtgccaataattacatctttggagaggatttgatttctgcccagggatttgctcaccccaaggtcatctgataatttcacagatgctgtgtaacagaacacagccaaagtaaactgtgtaggggagccacatttacataggaaccaaatcaatgaatttaggggttacgattatagcaatttaagggcccaccagaagcaggcctcgaggagtcaatttgcctctgtgtgcctcagtggagacaagtgggaaaacatggtcccacctgtgcgagaccccctgtcctgtgctgctcactcaacaacatctttgtgttgctttcaccaggctgagaccctaccctatggggtatatgggcttttacctgtgcaccagtgtgacaggaaagattcatgtcactactgtccgtggctacaattcaaaggtatccaatgtcgctgtaaattttatggcactatttttattggaggatttggtcagaatgcagttgttgtacaactcataaatactaactgctgattttgacacatgtgtgctccaaatgatctggtggttatttaacgtacctcttaaaattcgttgaaacgatttcaggtcaactctgaagagtatttgaaagcaggacttcagaacagtgtttgatttttattttataaatttaagcattcaaattaggcaaatctttggctgcaggcagcaaaaacagctggacttatttaaaacaacttgtttttgagttttcttatatatatattgattatttgttttacacacatgcagtagcactttggtaagagttaaagagtaaagcagcttatgttgtcaggtcgttcttatctagagaagagctatagcagatctcggacaaactcagaatatattcactttcatttttgacaggattccctccacaactcagtttcatatattattccgtattacatttttgcagctaaattaccataaaatgtcagcaaatgtaaaaatttaatttctgaaaagcaccattagcccatttcccccaaattaaacgtaaatgttttttttcagcacatgttaccatgtctgacctgcaaaaatgctggagaaaaatgaaggaaaaaattatgtttttcagtttaattctgttaactgaagatattccaactcaaaaccagcctcatgctctgattagataatcttttacattgaacctttactctcaaagccatgtgtggagggggcttgtcactattgtaggctcactggattggtcatttagagtttcacagactcttaccagcatatatagtatttaattgtttcaaaaaaaatcaaactgtagttgttttggcgataggtctcacgcaacacatttttgtatgtgtgtgtgtgtgcgtgtgtgtgtgtgtgtgtgaaaaattgcattcattgacttcaggtagattaaggtatctttttattcattgccctcaggaaagttaaggtatcaatgagacccttaagccaatcatgtaataactgcatgtgtctggtccaggagaagtattgaataagccatttctactgcttactcatgtccctatttatgatttcaacatggatacatatttcagttctttctttttctcactatctgaaaatacatttccctccctctcttccccccaatatctccctttttttctctcttcctctatcttccaaaccccactttctccctcctccttttcctgtgttctcttaagcagatagcacatacccccacccagtaccaaatttcagaacacaagaaggtccagttcttcccccttcacataaaggaacatggtttgtcagcctttctcctgtttatgggtttcttccagcagaacagagacattgccaaccatattggatctgcttgctgtccaaaccagcaaactttcctgggcaaatcacaatcagtgagtaaatagacagcctttctgctgccttgggtttctgtgcagataaacagaaatgctctgattagaaaggaaatgaatggttccactcaaatgtcctgcaatttaggattgcagatttctgccttgaaatacctgtttctttgggacattccgtcctgatgatttttatttttgttggtttttatttttggggggaatgacatgtttgggtcttttatacatgaaaatttgtttgacaataatctcacaaaacatattttacatctgaacaaaatgcctttttgtttaccgtagcgtatacatttgttttgggatttttgtgtgtttgttgggaattttgtttttagccaggtcagtattgatgaggctgatcatttggctctttttttccttccagaagagttgcatcaacaaagttaattgtatttatgtatgtaaatagattttaagcttcattataaaatattgttaatgcctataactttttttcaatttttttgtgtgtgtttctaaggactttttcttaggtttgctaaatactgtagggaaaaaaatgcttctttctactttgtttattttagactttaaaatgagctacttcttattcacttttgtaaacagctaatagcatggttccaattttttttaagttcactttttttgttctaggggaaatgaatgtgcaaaaaaagaaaaagaactgttggttatttgtgttattctggatgtataaaaatcaatggaaaaaaataaactttcaaattgaaatgacggtataacacatctactgaaaaagcaacgggaaatgtggtcctatttaagccagcccccacctagggtctatttgtgtggcagttattgggtttggtcacaaaacatcctgaaaattcgtgcgtgggcttctttctccctggtacaaacgtatggaatgcttcttaaaggggaactgtcaagctggtgtcttcagccagatgacatgagagaatatcccagaaccctctctccaaggtgtttctagatagcacaggagagcaggcactgcactgtccacagtccacggtacacagtcgggtgggccgcctcccctctcctgggagcattcgtcgtgcccagcctgagcagggcagctggactgctgctgttcaggagccaccagagccttcctctctttgtaccacagtttcttctgtaaatccagtgttacaatcagtgtgaatggcaaataaacagtttgacaagtacatacacca

SEQ ID NO: 442489 - DNA, 3952 bp, Homo sapiens
ctacaaggcccgggagcaagccgcgtggctgctttcaactttccttccagccgcgcgttcttggggtctttcctgactaggaaactcctcgctggccgctgacgcacgcagcaagtgagacgcgcggagggatcgagccgcggcccgggcgcagcggtaaaaaacacccattacagaaaccgacccaagggaagacgctgagagcaaacggcacgcgcggacgccgtccggcctcatgcaaggaatcagcgccgcttcgccgcagctgccagccggacggtgcaggagcgcggagtggctcccccgggccccgcggccaaatcgcacccccgccctggaagcggaggcctggccctgggcggccgcgcaggatctggggccgtccgcgggctgcagccccggttcgggagcctcgtggcggccactgcgcctgcctgcagcggctcgcggggccgggcctctccgggtgcggcgcgccggccgggtcctcctcgggccggcggggcctgctttctttttccaggtctccggaccgtggccactcgcggagccgcacaagcctgcgtgtggctgcggaaaggggtccgcacgcgggcggggccccgggccagcatgcaggcttggatgcggggcgcgggggtggcctccgactccccgcccgggctgcgtacagtagcgcgcggcgcggcggcgggggcgcgcgggccaattccaggagccggcggcggcgagccgcgccctggctgataccggaaaggcctgtgattggccgccggccgcccctatgcaaacgagctgagggaatggaattcctccggccgggcttacagtaaaagcacgttcatttccaggcactctcattcatagagccagcgggcgcgggcgggacgggcgccccgcggccggacccagccagggcaccacgctgcccggccctgcgccgccaggcacttctttccggggctcctagggacgccagaaggaagtcaacctctgctgcttctccttggcctgcgttggaccttcctttttttgttgtttttttttgtttttcccctttcttccttttgaattaactggcttcttggctggatgttttcaacttctttcctggctgcgaacttttccccaattgttttccttttacaacagggggagaaagtgctctgtggtccgaggcgagccgtgaagttgcgtgtgcgtggcagtgtgcgtggcaggatgtgcgtgcgtgtgtaacccgagccgcccgatctgtttcgatctgcgccgcggagccctccctcaaggcccgctccacctgctgcggttacgcggcgctcgtgggtgttcgtgcctcggagcagctaaccggcgggtgctgggcgacggtggaggagtatcgtctcgctgctgcccgagtcagggctgagtcacccagctgatgtagacagtggctgccttccgaagagtgcgtgtttgcatgtgtgtgactctgcggctgctcaactcccaacaaaccagaggaccagccacaaacttaaccaacatccccaaacccgagttcacagatgtgggagagctgtagaaccctgagtgtcatcgactgggccttcttatgattgttgttttaagattagctgaagatctctgaaacgctgaattttctgcactgagcgttttgacagaattcattgagagaacagagaacatgacaagtacttctagctcagcactgctccaactactgaagctgattttcaaggctacttaaaaaaatctgcagcgtacattaatggatttctgttgtgtttaaattctccacagattgtattgtaaatattttatgaagtagagcatatgtatatatttatatatacgtgcacatacattagtagcactacctttggaagtctcagctcttgcttttcgggactgaagccagttttgcatgataaaagtggccttgttacgggagataattgtgttctgttgggactttagacaaaactcacctgcaaaaaactgacaggcattaactactggaacttccaaataatgtgtttgctgatcgttttactcttcgcataaatattttaggaagtgtatgagaattttgccttcaggaacttttctaacagccaaagacagaacttaacctctgcaagcaagattcgtggaagatagtctccactttttaatgcactaagcaatcggttgctaggagcccatcctgggtcagaggccgatccgcagaaccagaacgttttcccctcctggactgttagtaacttagtctccctcctcccctaaccacccccgcccccccccaccccccgcagtaataaaggcccctgaacgtgtatgttggtctcccgggagctgcttgctgaagatccgcgcccctgtcgccgtctggtaggagctgtttgcagggtcctaactcaatcggcttgttgtgatgcgtatccccgtagatgccagcacgagccgccgcttcacgccgccttccaccgcgctgagcccaggcaagatgagcgaggcgttgccgctgggcgccccggacgccggcgctgccctggccggcaagctgaggagcggcgaccgcagcatggtggaggtgctggccgaccacccgggcgagctggtgcgcaccgacagccccaacttcctctgctccgtgctgcctacgcactggcgctgcaacaagaccctgcccatcgctttcaaggtggtggccctaggggatgttccagatggcactctggtcactgtgatggctggcaatgatgaaaactactcggctgagctgagaaatgctaccgcagccatgaagaaccaggttgcaagatttaatgacctcaggtttgtcggtcgaagtggaagagggaaaagcttcactctgaccatcactgtcttcacaaacccaccgcaagtcgccacctaccacagagccatcaaaatcacagtggatgggccccgagaacctcgaagacatcggcagaaactagatgatcagaccaagcccgggagcttgtccttttccgagcggctcagtgaactggagcagctgcggcgcacagccatgagggtcagcccacaccacccagcccccacgcccaaccctcgtgcctccctgaaccactccactgcctttaaccctcagcctcagagtcagatgcaggaggaagacacagcaccctggagatgttaaggcagaagtcagttcttctgtccatccctctccccagccaggatagagctatcttttccatctcatcctcagaagagactcagaagaaagatgacagccctcagaatgcacgttatgaggaaggcagaatgtgggtctgtaattcctccgtgtcccttctccccctctgcaaaccgtcgtaacaataatagttcctaacacatgggacaattgtgaggattaaatgagttagcctgcagaaatcacttgatgcacagcacatgggaagcattgtgtgtatttattaatccttcacaaagtctttgagatatatttttatcaaatatttagcatggatcccggtacactttcaatacttaataaatggtcaatgttattctttttcactattattgctatttatgtgctcttattggcggcattgttgtatcaccagttggttgtacccatcggtcctctccaagtcacacagctactctgcgataattcccccggtgtctccttattcctcgggagccccagagtggataaaggtattggtggttttagtggtattttcatttgagttttgtttccttggataaacccaaacaggagaccttcccataaccactgttccacaagaccaaatggtaaactgttaaagttgaaaggaccttaaacttctttgctcaaagccctatattttactcatgagacactcgaggcccagggagtttcagtgattttccgaactagaggcagacctaacatccaggt

SEQ ID NO: 442490 - DNA, 1768 bp, Homo sapiens
ggaaaggggaacagttaaatttgtaatttgggttgtgtgaaaacttctttgggcctcataaacaaccacagaaccacaagttgggtagcctggcagtgtcagaagtctgaacccagcatagtggtcagcaggcaggacgaatcacactgaatgcaaaccacagggtttcgcagcgtgggtaaaagaaatcattgagtcccccgccttcagaagagggtgcattttcaggaggaagcgatggcttcagacagcatatttgagtcatttccttcgtacccacagtgcttcatgagaggtggtggccctaggggatgttccagatggcactctggtcactgtgatggctggcaatgatgaaaactactcggctgagctgagaaatgctaccgcagccatgaagaaccaggttgcaagatttaatgacctcaggtttgtcggtcgaagtggaagagggaaaagcttcactctgaccatcactgtcttcacaaacccaccgcaagtcgccacctaccacagagccatcaaaatcacagtggatgggccccgagaacctcgaagacatcggcagaaactagatgatcagaccaagcccgggagcttgtccttttccgagcggctcagtgaactggagcagctgcggcgcacagccatgagggtcagcccacaccacccagcccccacgcccaaccctcgtgcctccctgaaccactccactgcctttaaccctcagcctcagagtcagatgcaggatacaaggcagatccaaccatccccaccgtggtcctacgatcagtcctaccaatacctgggatccattgcctctccttctgtgcacccagcaacgcccatttcacctggacgtgccagcggcatgacaaccctctctgcagaactttccagtcgactctcaacggcacccgacctgacagcgttcagcgacccgcgccagttccccgcgctgccctccatctccgacccccgcatgcactatccaggcgccttcacctactccccgacgccggtcacctcgggcatcggcatcggcatgtcggccatgggctcggccacgcgctaccacacctacctgccgccgccctaccccggctcgtcgcaagcgcagggaggcccgttccaagccagctcgccctcctaccacctgtactacggcgcctcggccggctcctaccagttctccatggtgggcggcgagcgctcgccgccgcgcatcctgccgccctgcaccaacgcctccaccggctccgcgctgctcaaccccagcctcccgaaccagagcgacgtggtggaggccgagggcagccacagcaactcccccaccaacatggcgccctccgcgcgcctggaggaggccgtgtggaggccctactgaggcgccaggcctggcccggctgggccacgcgggccgccgccttcgcctccgggcgcgcgggcctcctgttcgcgacaagcccgccgggatcccgggccctgggcccggccaccgtcctggggccgagggcgcccgacggccaggatctcgctgtaggtcaggcccgcgcagcctcctgcgcccagaagcccacgccgccgccgtctgctggcgccccggccctcgcggaggtgtccgaggcgacgcacctcgagggtgtccgccggccccagcacccaggggacgcgctggaaagcaaacaggaagattcccggagggaaactgtgaatgcttctgatttagcaatgctgtgaataaaaagaaagattttatacccttgac

SEQ ID NO: 442491 - DNA, 4183 bp, Homo sapiens
ctacaaggcccgggagcaagccgcgtggctgctttcaactttccttccagccgcgcgttcttggggtctttcctgactaggaaactcctcgctggccgctgacgcacgcagcaagtgagacgcgcggagggatcgagccgcggcccgggcgcagcggtaaaaaacacccattacagaaaccgacccaagggaagacgctgagagcaaacggcacgcgcggacgccgtccggcctcatgcaaggaatcagcgccgcttcgccgcagctgccagccggacggtgcaggagcgcggagtggctcccccgggccccgcggccaaatcgcacccccgccctggaagcggaggcctggccctgggcggccgcgcaggatctggggccgtccgcgggctgcagccccggttcgggagcctcgtggcggccactgcgcctgcctgcagcggctcgcggggccgggcctctccgggtgcggcgcgccggccgggtcctcctcgggccggcggggcctgctttctttttccaggtctccggaccgtggccactcgcggagccgcacaagcctgcgtgtggctgcggaaaggggtccgcacgcgggcggggccccgggccagcatgcaggcttggatgcggggcgcgggggtggcctccgactccccgcccgggctgcgtacagtagcgcgcggcgcggcggcgggggcgcgcgggccaattccaggagccggcggcggcgagccgcgccctggctgataccggaaaggcctgtgattggccgccggccgcccctatgcaaacgagctgagggaatggaattcctccggccgggcttacagtaaaagcacgttcatttccaggcactctcattcatagagccagcgggcgcgggcgggacgggcgccccgcggccggacccagccagggcaccacgctgcccggccctgcgccgccaggcacttctttccggggctcctagggacgccagaaggaagtcaacctctgctgcttctccttggcctgcgttggaccttcctttttttgttgtttttttttgtttttcccctttcttccttttgaattaactggcttcttggctggatgttttcaacttctttcctggctgcgaacttttccccaattgttttccttttacaacagggggagaaagtgctctgtggtccgaggcgagccgtgaagttgcgtgtgcgtggcagtgtgcgtggcaggatgtgcgtgcgtgtgtaacccgagccgcccgatctgtttcgatctgcgccgcggagccctccctcaaggcccgctccacctgctgcggttacgcggcgctcgtgggtgttcgtgcctcggagcagctaaccggcgggtgctgggcgacggtggaggagtatcgtctcgctgctgcccgagtcagggctgagtcacccagctgatgtagacagtggctgccttccgaagagtgcgtgtttgcatgtgtgtgactctgcggctgctcaactcccaacaaaccagaggaccagccacaaacttaaccaacatccccaaacccgagttcacagatgtgggagagctgtagaaccctgagtgtcatcgactgggccttcttatgattgttgttttaagattagctgaagatctctgaaacgctgaattttctgcactgagcgttttgacagaattcattgagagaacagagaacatgacaagtacttctagctcagcactgctccaactactgaagctgattttcaaggctacttaaaaaaatctgcagcgtacattaatggatttctgttgtgtttaaattctccacagattgtattgtaaatattttatgaagtagagcatatgtatatatttatatatacgtgcacatacattagtagcactacctttggaagtctcagctcttgcttttcgggactgaagccagttttgcatgataaaagtggccttgttacgggagataattgtgttctgttgggactttagacaaaactcacctgcaaaaaactgacaggcattaactactggaacttccaaataatgtgtttgctgatcgttttactcttcgcataaatattttaggaagtgtatgagaattttgccttcaggaacttttctaacagccaaagacagaacttaacctctgcaagcaagattcgtggaagatagtctccactttttaatgcactaagcaatcggttgctaggagcccatcctgggtcagaggccgatccgcagaaccagaacgttttcccctcctggactgttagtaacttagtctccctcctcccctaaccacccccgcccccccccaccccccgcagtaataaaggcccctgaacgtgtatgttggtctcccgggagctgcttgctgaagatccgcgcccctgtcgccgtctggtaggagctgtttgcagggtcctaactcaatcggcttgttgtgatgcgtatccccgtagatgccagcacgagccgccgcttcacgccgccttccaccgcgctgagcccaggcaagatgagcgaggcgttgccgctgggcgccccggacgccggcgctgccctggccggcaagctgaggagcggcgaccgcagcatggtggaggtgctggccgaccacccgggcgagctggtgcgcaccgacagccccaacttcctctgctccgtgctgcctacgcactggcgctgcaacaagaccctgcccatcgctttcaaggtggtggccctaggggatgttccagatggcactctggtcactgtgatggctggcaatgatgaaaactactcggctgagctgagaaatgctaccgcagccatgaagaaccaggttgcaagatttaatgacctcaggtttgtcggtcgaagtggaagagggaaaagcttcactctgaccatcactgtcttcacaaacccaccgcaagtcgccacctaccacagagccatcaaaatcacagtggatgggccccgagaacctcgaagacatcggcagaaactagatgatcagaccaagcccgggagcttgtccttttccgagcggctcagtgaactggagcagctgcggcgcacagccatgagggtcagcccacaccacccagcccccacgcccaaccctcgtgcctccctgaaccactccactgcctttaaccctcagcctcagagtcagatgcaggatacaaggcagatccaaccatccccaccgtggtcctacgatcagtcctaccaatacctgggatccattgcctctccttctgtgcacccagcaacgcccatttcacctggacgtgccagcggcatgacaaccctctctgcagaactttccagtcgactctcaacggcacccgacctgacagcgttcagcgacccgcgccagttccccgcgctgccctccatctccgacccccgcatgcactatccaggcgccttcacctactccccgacgccggtcacctcgggcatcggcatcggcatgtcggccatgggctcggccacgcgctaccacacctacctgccgccgccctaccccggctcgtcgcaagcgcagggaggcccgttccaagccagctcgccctcctaccacctgtactacggcgcctcggccggctcctaccagttctccatggtgggcggcgagcgctcgccgccgcgcatcctgccgccctgcaccaacgcctccaccggctccgcgctgctcaaccccagcctcccgaaccagagcgacgtggtggaggccgagggcagccacagcaactcccccaccaacatggcgccctccgcgcgcctggaggaggccgtgtggaggccctactgaggcgccaggcctggcccggctgggccacgcgggccgccgccttcgcctccgggcgcgcgggcctcctgttcgcgacaagcccgccgggatcccgggccctgggcccggccaccgtcctggggccgagggcgcccgacggccaggatctcgctgtaggtcaggcccgcgcagcctcctgcgcccagaagcccacgccgccgccgtctgctggcgccccggccctcgcggaggtgtccgaggcgacgcacctcgagggtgtccgccggccccagcacccaggggacgcgctggaaagcaaacaggaagattcccggagggaaactgtgaatgcttctgatttagcaatgctgtgaataaaaagaaagattttatacccttgac

SEQ ID NO: 442492 - DNA, 1228 bp, Homo sapiens
ggagaaggcttaccagccactctgtttactttattggggccattgccttcctacttttgaagttcattgggaccaagtgcttatcatccaaacccagtcaacatctaatccacttttatgagtatgcgtgcctcactttgagtgttccatatggccaagaggggtccctgacctctcaaatcatctcttgatttttagtattccaagtaacttctgtcttgctaattattttcccccaaaattaaagttacttaggaaggactatattctggtgctgctgtctgcaaaactctgagatactgaaatgaccctgtttctcagttgtatagagttatttaagtccgtctgattctctctttatcatctggatagacaaaaggaagaaaacctttccaccttcctgtaggagaaggagataaatcctctttccagccttggagaggaagacacagcaccctggagatgttaaggcagaagtcagttcttctgtccatccctctccccagccaggatagagctatcttttccatctcatcctcagaagagactcagaagaaagatgacagccctcagaatgcacgttatgaggaaggcagaatgtgggtctgtaattcctccgtgtcccttctccccctctgcaaaccgtcgtaacaataatagttcctaacacatgggacaattgtgaggattaaatgagttagcctgcagaaatcacttgatgcacagcacatgggaagcattgtgtgtatttattaatccttcacaaagtctttgagatatatttttatcaaatatttagcatggatcccggtacactttcaatacttaataaatggtcaatgttattctttttcactattattgctatttatgtgctcttattggcggcattgttgtatcaccagttggttgtacccatcggtcctctccaagtcacacagctactctgcgataattcccccggtgtctccttattcctcgggagccccagagtggataaaggtattggtggttttagtggtattttcatttgagttttgtttccttggataaacccaaacaggagaccttcccataaccactgttccacaagaccaaatggtaaactgttaaagttgaaaggaccttaaacttctttgctcaaagccctatattttactcatgagacactcgaggcccagggagtttcagtgattttccgaactagaggcagacctaacatccaggt

SEQ ID NO: 442493 - DNA, 284 bp, Homo sapiens
tgtcggtcgaagtggaagagggaaaagcttcactctgaccatcactgtcttcacaaacccaccgcaagtcgccacctaccacagagccatcaaaatcacagtggatgggccccgagaacctcgaaactctttgacctggcctcggtatcctcacatttaaaatgaggagttggcttatatgattggctggcatatttggctcatctcgaagactgtctattatagaagggcaaatggtagtgcctcattgcaggtgtggagcctttgacttgaggtatgcgtgc

SEQ ID NO: 442494 - DNA, 265 bp, Homo sapiens
  misc_feature (241)..(241): n is a, c, g, or t
tgtcggtcgaagtggaagagggaaaagcttcactctgaccatcactgtcttcacaaacccaccgcaagtcgccacctaccacagagccatcaaaatcacagtggatgggccccgagaacctcgaagtaagtgcatccacttggggctggtacaccctccaggctggtacaccctccaggctggtatactcagggaccatgtctcagattccttgggttcaacctttcccccagggggatgncaggcccccgtaaagccaaaaagt

SEQ ID NO: 442495 - DNA, 426 bp, Homo sapiens
ttctggatactgcagttcccgtgaattaatggtcacccctaactaacattctcaggaaaaccagtagggttgccccagagcccctcactctgctgcttatttggaaggagcctttatagttctgctgtgtgagaggctctgagccaccatatgttcctaaatgagagaagccgttgcccagacatggatctgtttaatttaatatgatttaccacaaattacgaagcatgacttcaaaattgaatttgtgcaaaattactgatggccaattcagtggaagggaagggaaatcttgttattcctattccagaatctcttcctgatttcctcatttgattctttcacgccttggggtaggggaggggaatgcattcgcggctctataaagaattgtccttattttcgaactttctccctggtcacaca

SEQ ID NO: 442496 - DNA, 929 bp, Homo sapiens
ggagaaggcttaccagccactctgtttactttattggggccattgccttcctacttttgaagttcattgggaccaagtgcttatcatccaaacccagtcaacatctaatccacttttatgagtatgcgtgcctcactttgagtgttccatatggccaagaggggtccctgacctctcaaatcatctcttgatttttagtattccaagtaacttctgtcttgctaattattttcccccaaaattaaagttacttaggaaggactatattctggtgctgctgtctgcaaaactctgagatactgaaatgaccctgtttctcagttgtatagagttatttaagtccgtctgattctctctttatcatctggatagacaaaaggaagaaaacctttccaccttcctgtaggagaaggagataaatcctctttccagccttggaggtaaaatatccaactgcattgcattgctttcctttctctctccctctccttccctctcttccttactcttctagcaatttgaagtttgaaaacaaagggagtagggactatttgattaccttgaaagtggaggctacaatcaaacaccagaaatcctcatatgtgaatctataaatggtcatttaatggttacacaaagtaacatattcagaatgtgagaaattaatttatataataggctataaacatgacaggtgaatgatttcatttaaaaatagcttttaacaaggtgtagtagggtatgagagcctttccaggtctatagcattataatcttaccccgacaacaagcctgaatcaggtgttcacaggaataaataaaaataattaaaggaaagaagggagagagagagaagaaatgaaaaccagtgggatgactgcagagattcactgcagggcttgatcttagtgatgaaatatttcttctgt

SEQ ID NO: 442497 - DNA, 485 bp, Homo sapiens
ggaaaggggaacagttaaatttgtaatttgggttgtgtgaaaacttctttgggcctcataaacaaccacagaaccacaagttgggtagcctggcagtgtcagaagtctgaacccagcatagtggtcagcaggcaggacgaatcacactgaatgcaaaccacagggtttcgcagcgtgggtaaaagaaatcattgagtcccccgccttcagaagagggtgcattttcaggaggaagcgatggcttcagacagcatatttgagtcatttccttcgtacccacagtgcttcatgagagggacaacgcttactccatagagttcttgtgaagttagtgggagatgatgcaagtcaagttctcttctagtccagggcctggaacacagtaagcactcaacagatgctcctttgcttcctccttcctatgtgatcactaagtatgcctagtaggccattgactttcgcatgatcaaagcctgagatgagtt

SEQ ID NO: 442498 - DNA, 7942 bp, Homo sapiens
ctacaaggcccgggagcaagccgcgtggctgctttcaactttccttccagccgcgcgttcttggggtctttcctgactaggaaactcctcgctggccgctgacgcacgcagcaagtgagacgcgcggagggatcgagccgcggcccgggcgcagcggtaaaaaacacccattacagaaaccgacccaagggaagacgctgagagcaaacggcacgcgcggacgccgtccggcctcatgcaaggaatcagcgccgcttcgccgcagctgccagccggacggtgcaggagcgcggagtggctcccccgggccccgcggccaaatcgcacccccgccctggaagcggaggcctggccctgggcggccgcgcaggatctggggccgtccgcgggctgcagccccggttcgggagcctcgtggcggccactgcgcctgcctgcagcggctcgcggggccgggcctctccgggtgcggcgcgccggccgggtcctcctcgggccggcggggcctgctttctttttccaggtctccggaccgtggccactcgcggagccgcacaagcctgcgtgtggctgcggaaaggggtccgcacgcgggcggggccccgggccagcatgcaggcttggatgcggggcgcgggggtggcctccgactccccgcccgggctgcgtacagtagcgcgcggcgcggcggcgggggcgcgcgggccaattccaggagccggcggcggcgagccgcgccctggctgataccggaaaggcctgtgattggccgccggccgcccctatgcaaacgagctgagggaatggaattcctccggccgggcttacagtaaaagcacgttcatttccaggcactctcattcatagagccagcgggcgcgggcgggacgggcgccccgcggccggacccagccagggcaccacgctgcccggccctgcgccgccaggcacttctttccggggctcctagggacgccagaaggaagtcaacctctgctgcttctccttggcctgcgttggaccttcctttttttgttgtttttttttgtttttcccctttcttccttttgaattaactggcttcttggctggatgttttcaacttctttcctggctgcgaacttttccccaattgttttccttttacaacagggggagaaagtgctctgtggtccgaggcgagccgtgaagttgcgtgtgcgtggcagtgtgcgtggcaggatgtgcgtgcgtgtgtaacccgagccgcccgatctgtttcgatctgcgccgcggagccctccctcaaggcccgctccacctgctgcggttacgcggcgctcgtgggtgttcgtgcctcggagcagctaaccggcgggtgctgggcgacggtggaggagtatcgtctcgctgctgcccgagtcagggctgagtcacccagctgatgtagacagtggctgccttccgaagagtgcgtgtttgcatgtgtgtgactctgcggctgctcaactcccaacaaaccagaggaccagccacaaacttaaccaacatccccaaacccgagttcacagatgtgggagagctgtagaaccctgagtgtcatcgactgggccttcttatgattgttgttttaagattagctgaagatctctgaaacgctgaattttctgcactgagcgttttgacagaattcattgagagaacagagaacatgacaagtacttctagctcagcactgctccaactactgaagctgattttcaaggctacttaaaaaaatctgcagcgtacattaatggatttctgttgtgtttaaattctccacagattgtattgtaaatattttatgaagtagagcatatgtatatatttatatatacgtgcacatacattagtagcactacctttggaagtctcagctcttgcttttcgggactgaagccagttttgcatgataaaagtggccttgttacgggagataattgtgttctgttgggactttagacaaaactcacctgcaaaaaactgacaggcattaactactggaacttccaaataatgtgtttgctgatcgttttactcttcgcataaatattttaggaagtgtatgagaattttgccttcaggaacttttctaacagccaaagacagaacttaacctctgcaagcaagattcgtggaagatagtctccactttttaatgcactaagcaatcggttgctaggagcccatcctgggtcagaggccgatccgcagaaccagaacgttttcccctcctggactgttagtaacttagtctccctcctcccctaaccacccccgcccccccccaccccccgcagtaataaaggcccctgaacgtgtatgttggtctcccgggagctgcttgctgaagatccgcgcccctgtcgccgtctggtaggagctgtttgcagggtcctaactcaatcggcttgttgtgatgcgtatccccgtagatgccagcacgagccgccgcttcacgccgccttccaccgcgctgagcccaggcaagatgagcgaggcgttgccgctgggcgccccggacgccggcgctgccctggccggcaagctgaggagcggcgaccgcagcatggtggaggtgctggccgaccacccgggcgagctggtgcgcaccgacagccccaacttcctctgctccgtgctgcctacgcactggcgctgcaacaagaccctgcccatcgctttcaaggtggtggccctaggggatgttccagatggcactctggtcactgtgatggctggcaatgatgaaaactactcggctgagctgagaaatgctaccgcagccatgaagaaccaggttgcaagatttaatgacctcaggtttgtcggtcgaagtggaagagggaaaagcttcactctgaccatcactgtcttcacaaacccaccgcaagtcgccacctaccacagagccatcaaaatcacagtggatgggccccgagaacctcgaaatacaaggcagatccaaccatccccaccgtggtcctacgatcagtcctaccaatacctgggatccattgcctctccttctgtgcacccagcaacgcccatttcacctggacgtgccagcggcatgacaaccctctctgcagaactttccagtcgactctcaacggcacccgacctgacagcgttcagcgacccgcgccagttccccgcgctgccctccatctccgacccccgcatgcactatccaggcgccttcacctactccccgacgccggtcacctcgggcatcggcatcggcatgtcggccatgggctcggccacgcgctaccacacctacctgccgccgccctaccccggctcgtcgcaagcgcagggaggcccgttccaagccagctcgccctcctaccacctgtactacggcgcctcggccggctcctaccagttctccatggtgggcggcgagcgctcgccgccgcgcatcctgccgccctgcaccaacgcctccaccggctccgcgctgctcaaccccagcctcccgaaccagagcgacgtggtggaggccgagggcagccacagcaactcccccaccaacatggcgccctccgcgcgcctggaggaggccgtgtggaggccctactgaggcgccaggcctggcccggctgggccacgcgggccgccgccttcgcctccgggcgcgcgggcctcctgttcgcgacaagcccgccgggatcccgggccctgggcccggccaccgtcctggggccgagggcgcccgacggccaggatctcgctgtaggtcaggcccgcgcagcctcctgcgcccagaagcccacgccgccgccgtctgctggcgccccggccctcgcggaggtgtccgaggcgacgcacctcgagggtgtccgccggccccagcacccaggggacgcgctggaaagcaaacaggaagattcccggagggaaactgtgaatgcttctgatttagcaatgctgtgaataaaaagaaagattttatacccttgacttaactttttaaccaagttgtttattccaaagagtgtggaattttggttggggtggggggagaggagggatgcaactcgccctgtttggcatctaattcttatttttaatttttccgcaccttatcaattgcaaaatgcgtatttgcatttgggtggtttttatttttatatacgtttatataaatatatataaattgagcttgcttctttcttgctttgaccatggaaagaaatatgattcccttttctttaagttttatttaacttttcttttggacttttgggtagttgtttttttttgttttgttttgtttttttgagaaacagctacagctttgggtcatttttaactactgtattcccacaaggaatccccagatatttatgtatcttgatgttcagacatttatgtgttgataattttttaattatttaaatgtacttatattaagaaaaatatcaagtactacattttcttttgttcttgatagtagccaaagttaaatgtatcacattgaagaaggctagaaaaaaagaatgagtaatgtgatcgcttggttatccagaagtattgtttacattaaactccctttcatgttaatcaaacaagtgagtagctcacgcagcaacgtttttaataggatttttagacactgagggtcactccaaggatcagaagtatggaattttctgccaggctcaacaagggtctcatatctaacttcctccttaaaacagagaaggtcaatctagttccagagggttgaggcaggtgccaataattacatctttggagaggatttgatttctgcccagggatttgctcaccccaaggtcatctgataatttcacagatgctgtgtaacagaacacagccaaagtaaactgtgtaggggagccacatttacataggaaccaaatcaatgaatttaggggttacgattatagcaatttaagggcccaccagaagcaggcctcgaggagtcaatttgcctctgtgtgcctcagtggagacaagtgggaaaacatggtcccacctgtgcgagaccccctgtcctgtgctgctcactcaacaacatctttgtgttgctttcaccaggctgagaccctaccctatggggtatatgggcttttacctgtgcaccagtgtgacaggaaagattcatgtcactactgtccgtggctacaattcaaaggtatccaatgtcgctgtaaattttatggcactatttttattggaggatttggtcagaatgcagttgttgtacaactcataaatactaactgctgattttgacacatgtgtgctccaaatgatctggtggttatttaacgtacctcttaaaattcgttgaaacgatttcaggtcaactctgaagagtatttgaaagcaggacttcagaacagtgtttgatttttattttataaatttaagcattcaaattaggcaaatctttggctgcaggcagcaaaaacagctggacttatttaaaacaacttgtttttgagttttcttatatatatattgattatttgttttacacacatgcagtagcactttggtaagagttaaagagtaaagcagcttatgttgtcaggtcgttcttatctagagaagagctatagcagatctcggacaaactcagaatatattcactttcatttttgacaggattccctccacaactcagtttcatatattattccgtattacatttttgcagctaaattaccataaaatgtcagcaaatgtaaaaatttaatttctgaaaagcaccattagcccatttcccccaaattaaacgtaaatgttttttttcagcacatgttaccatgtctgacctgcaaaaatgctggagaaaaatgaaggaaaaaattatgtttttcagtttaattctgttaactgaagatattccaactcaaaaccagcctcatgctctgattagataatcttttacattgaacctttactctcaaagccatgtgtggagggggcttgtcactattgtaggctcactggattggtcatttagagtttcacagactcttaccagcatatatagtatttaattgtttcaaaaaaaatcaaactgtagttgttttggcgataggtctcacgcaacacatttttgtatgtgtgtgtgtgtgcgtgtgtgtgtgtgtgtgtgaaaaattgcattcattgacttcaggtagattaaggtatctttttattcattgccctcaggaaagttaaggtatcaatgagacccttaagccaatcatgtaataactgcatgtgtctggtccaggagaagtattgaataagccatttctactgcttactcatgtccctatttatgatttcaacatggatacatatttcagttctttctttttctcactatctgaaaatacatttccctccctctcttccccccaatatctccctttttttctctcttcctctatcttccaaaccccactttctccctcctccttttcctgtgttctcttaagcagatagcacatacccccacccagtaccaaatttcagaacacaagaaggtccagttcttcccccttcacataaaggaacatggtttgtcagcctttctcctgtttatgggtttcttccagcagaacagagacattgccaaccatattggatctgcttgctgtccaaaccagcaaactttcctgggcaaatcacaatcagtgagtaaatagacagcctttctgctgccttgggtttctgtgcagataaacagaaatgctctgattagaaaggaaatgaatggttccactcaaatgtcctgcaatttaggattgcagatttctgccttgaaatacctgtttctttgggacattccgtcctgatgatttttatttttgttggtttttatttttggggggaatgacatgtttgggtcttttatacatgaaaatttgtttgacaataatctcacaaaacatattttacatctgaacaaaatgcctttttgtttaccgtagcgtatacatttgttttgggatttttgtgtgtttgttgggaattttgtttttagccaggtcagtattgatgaggctgatcatttggctctttttttccttccagaagagttgcatcaacaaagttaattgtatttatgtatgtaaatagattttaagcttcattataaaatattgttaatgcctataactttttttcaatttttttgtgtgtgtttctaaggactttttcttaggtttgctaaatactgtagggaaaaaaatgcttctttctactttgtttattttagactttaaaatgagctacttcttattcacttttgtaaacagctaatagcatggttccaattttttttaagttcactttttttgttctaggggaaatgaatgtgcaaaaaaagaaaaagaactgttggttatttgtgttattctggatgtataaaaatcaatggaaaaaaataaactttcaaattgaaatgacggtataacacatctactgaaaaagcaacgggaaatgtggtcctatttaagccagcccccacctagggtctatttgtgtggcagttattgggtttggtcacaaaacatcctgaaaattcgtgcgtgggcttctttctccctggtacaaacgtatggaatgcttcttaaaggggaactgtcaagctggtgtcttcagccagatgacatgagagaatatcccagaaccctctctccaaggtgtttctagatagcacaggagagcaggcactgcactgtccacagtccacggtacacagtcgggtgggccgcctcccctctcctgggagcattcgtcgtgcccagcctgagcagggcagctggactgctgctgttcaggagccaccagagccttcctctctttgtaccacagtttcttctgtaaatccagtgttacaatcagtgtgaatggcaaataaacagtttgacaagtacatacacca

SEQ ID NO: 442499 - DNA, 6041 bp, Homo sapiens
ggaaaggggaacagttaaatttgtaatttgggttgtgtgaaaacttctttgggcctcataaacaaccacagaaccacaagttgggtagcctggcagtgtcagaagtctgaacccagcatagtggtcagcaggcaggacgaatcacactgaatgcaaaccacagggtttcgcagcgtggtgagcatcaccaacccacagccaaggcggcgctggctttttttttttttttaatctttaacaatttgaatatttgtttttacaaaggtaaaagaaatcattgagtcccccgccttcagaagagggtgcattttcaggaggaagcgatggcttcagacagcatatttgagtcatttccttcgtacccacagtgcttcatgagagaatgcatacttggaatgaatccttctagagacgtccacgatgccagcacgagccgccgcttcacgccgccttccaccgcgctgagcccaggcaagatgagcgaggcgttgccgctgggcgccccggacgccggcgctgccctggccggcaagctgaggagcggcgaccgcagcatggtggaggtgctggccgaccacccgggcgagctggtgcgcaccgacagccccaacttcctctgctccgtgctgcctacgcactggcgctgcaacaagaccctgcccatcgctttcaaggtggtggccctaggggatgttccagatggcactctggtcactgtgatggctggcaatgatgaaaactactcggctgagctgagaaatgctaccgcagccatgaagaaccaggttgcaagatttaatgacctcaggtttgtcggtcgaagtggaagagggaaaagcttcactctgaccatcactgtcttcacaaacccaccgcaagtcgccacctaccacagagccatcaaaatcacagtggatgggccccgagaacctcgaagacatcggcagaaactagatgatcagaccaagcccgggagcttgtccttttccgagcggctcagtgaactggagcagctgcggcgcacagccatgagggtcagcccacaccacccagcccccacgcccaaccctcgtgcctccctgaaccactccactgcctttaaccctcagcctcagagtcagatgcaggatacaaggcagatccaaccatccccaccgtggtcctacgatcagtcctaccaatacctgggatccattgcctctccttctgtgcacccagcaacgcccatttcacctggacgtgccagcggcatgacaaccctctctgcagaactttccagtcgactctcaacggcacccgacctgacagcgttcagcgacccgcgccagttccccgcgctgccctccatctccgacccccgcatgcactatccaggcgccttcacctactccccgacgccggtcacctcgggcatcggcatcggcatgtcggccatgggctcggccacgcgctaccacacctacctgccgccgccctaccccggctcgtcgcaagcgcagggaggcccgttccaagccagctcgccctcctaccacctgtactacggcgcctcggccggctcctaccagttctccatggtgggcggcgagcgctcgccgccgcgcatcctgccgccctgcaccaacgcctccaccggctccgcgctgctcaaccccagcctcccgaaccagagcgacgtggtggaggccgagggcagccacagcaactcccccaccaacatggcgccctccgcgcgcctggaggaggccgtgtggaggccctactgaggcgccaggcctggcccggctgggccacgcgggccgccgccttcgcctccgggcgcgcgggcctcctgttcgcgacaagcccgccgggatcccgggccctgggcccggccaccgtcctggggccgagggcgcccgacggccaggatctcgctgtaggtcaggcccgcgcagcctcctgcgcccagaagcccacgccgccgccgtctgctggcgccccggccctcgcggaggtgtccgaggcgacgcacctcgagggtgtccgccggccccagcacccaggggacgcgctggaaagcaaacaggaagattcccggagggaaactgtgaatgcttctgatttagcaatgctgtgaataaaaagaaagattttatacccttgacttaactttttaaccaagttgtttattccaaagagtgtggaattttggttggggtggggggagaggagggatgcaactcgccctgtttggcatctaattcttatttttaatttttccgcaccttatcaattgcaaaatgcgtatttgcatttgggtggtttttatttttatatacgtttatataaatatatataaattgagcttgcttctttcttgctttgaccatggaaagaaatatgattcccttttctttaagttttatttaacttttcttttggacttttgggtagttgtttttttttgttttgttttgtttttttgagaaacagctacagctttgggtcatttttaactactgtattcccacaaggaatccccagatatttatgtatcttgatgttcagacatttatgtgttgataattttttaattatttaaatgtacttatattaagaaaaatatcaagtactacattttcttttgttcttgatagtagccaaagttaaatgtatcacattgaagaaggctagaaaaaaagaatgagtaatgtgatcgcttggttatccagaagtattgtttacattaaactccctttcatgttaatcaaacaagtgagtagctcacgcagcaacgtttttaataggatttttagacactgagggtcactccaaggatcagaagtatggaattttctgccaggctcaacaagggtctcatatctaacttcctccttaaaacagagaaggtcaatctagttccagagggttgaggcaggtgccaataattacatctttggagaggatttgatttctgcccagggatttgctcaccccaaggtcatctgataatttcacagatgctgtgtaacagaacacagccaaagtaaactgtgtaggggagccacatttacataggaaccaaatcaatgaatttaggggttacgattatagcaatttaagggcccaccagaagcaggcctcgaggagtcaatttgcctctgtgtgcctcagtggagacaagtgggaaaacatggtcccacctgtgcgagaccccctgtcctgtgctgctcactcaacaacatctttgtgttgctttcaccaggctgagaccctaccctatggggtatatgggcttttacctgtgcaccagtgtgacaggaaagattcatgtcactactgtccgtggctacaattcaaaggtatccaatgtcgctgtaaattttatggcactatttttattggaggatttggtcagaatgcagttgttgtacaactcataaatactaactgctgattttgacacatgtgtgctccaaatgatctggtggttatttaacgtacctcttaaaattcgttgaaacgatttcaggtcaactctgaagagtatttgaaagcaggacttcagaacagtgtttgatttttattttataaatttaagcattcaaattaggcaaatctttggctgcaggcagcaaaaacagctggacttatttaaaacaacttgtttttgagttttcttatatatatattgattatttgttttacacacatgcagtagcactttggtaagagttaaagagtaaagcagcttatgttgtcaggtcgttcttatctagagaagagctatagcagatctcggacaaactcagaatatattcactttcatttttgacaggattccctccacaactcagtttcatatattattccgtattacatttttgcagctaaattaccataaaatgtcagcaaatgtaaaaatttaatttctgaaaagcaccattagcccatttcccccaaattaaacgtaaatgttttttttcagcacatgttaccatgtctgacctgcaaaaatgctggagaaaaatgaaggaaaaaattatgtttttcagtttaattctgttaactgaagatattccaactcaaaaccagcctcatgctctgattagataatcttttacattgaacctttactctcaaagccatgtgtggagggggcttgtcactattgtaggctcactggattggtcatttagagtttcacagactcttaccagcatatatagtatttaattgtttcaaaaaaaatcaaactgtagttgttttggcgataggtctcacgcaacacatttttgtatgtgtgtgtgtgtgcgtgtgtgtgtgtgtgtgtgaaaaattgcattcattgacttcaggtagattaaggtatctttttattcattgccctcaggaaagttaaggtatcaatgagacccttaagccaatcatgtaataactgcatgtgtctggtccaggagaagtattgaataagccatttctactgcttactcatgtccctatttatgatttcaacatggatacatatttcagttctttctttttctcactatctgaaaatacatttccctccctctcttccccccaatatctccctttttttctctcttcctctatcttccaaaccccactttctccctcctccttttcctgtgttctcttaagcagatagcacatacccccacccagtaccaaatttcagaacacaagaaggtccagttcttccagcagaacagagacattgccaaccatattggatctgcttgctgtccaaaccagcaaactttcctgggcaaatcacaatcagtgagtaaatagacagcctttctgctgccttgggtttctgtgcagataaacagaaatgctctgattagaaaggaaatgaatggttccactcaaatgtcctgcaatttaggattgcagatttctgccttgaaatacctgtttctttgggacattccgtcctgatgatttttatttttgttggtttttatttttggggggaatgacatgtttgggtcttttatacatgaaaatttgtttgacaataatctcacaaaacatattttacatctgaacaaaatgcctttttgtttaccgtagcgtatacatttgttttgggatttttgtgtgtttgttgggaattttgtttttagccaggtcagtattgatgaggctgatcatttggctctttttttccttccagaagagttgcatcaacaaagttaattgtatttatgtatgtaaatagattttaagcttcattataaaatattgttaatgcctataactttttttcaatttttttgtgtgtgtttctaaggactttttcttaggtttgctaaatactgtagggaaaaaaatgcttctttctactttgtttattttagactttaaaatgagctacttcttattcacttttgtaaacagctaatagcatggttccaattttttttaagttcactttttttgttctaggggaaatgaatgtgcaaaaaaagaaaaagaactgttggttatttgtgttattctggatgtataaaaatcaatggaaaaaaataaactttcaaattgaaatgacggtataacacatctactgaaaaagcaacgggaaatgtggtcctatttaagccagcccccacctagggtctatttgtgtggcagttattgggtttggtcacaaaacatcctgaaaattcgtgcgtgggcttctttctccctggtacaaacgtatggaatgcttcttaaaggggaactgtcaagctggtgtcttcagccagatgacatgagagaatatcccagaaccctctctccaaggtgtttctagatagcacaggagagcaggcactgcactgtccacagtccacggtacacagtcgggtgggccgcctcccctctcctgggagcattcgtcgtgcccagcctgagcagggcagctggactgctgctgttcaggagccaccagagccttcctctctttgtaccacagtttcttctgtaaatccagtgttacaatcagtgtgaatggcaaataaacagtttgacaagtacatacacca

SEQ ID NO: 442500 - DNA, 5424 bp, Homo sapiens
cccgtcctcctgggcatagcatcctgggtgacctcatctttttgggtggcagattctgggtagaaaccctctccctaggcagcagcatcctcagtagcccccatcctcccaggtggtagcaatcctgtgtggttccaatcttcctgggcggtaaattctgatagaaacccatctccctggacagtagcatcctgggtgtcccccgtcctcctaggcggtagcatcctgggtggtctccatcctcccaggtggtgtcatcctgggtggtctccgtcctctcaggaggtggcatcctgagtggtccccgacctcctgggcatagcatcatgggtagtccccatcctcttgggaggtgacatgctgggtgatcctcgtcatctcaggaggtggcatcctgggtggtccctgtccccctgggtatagcatcctgggtaatcctcgtcctcttgggagtagcatcccgggtggtccccgtcctccccggcagtagcatcctgggtggcttcccatcctcctaggcggtatcatcctgggtagccccctggggcagagggaagagctgtggcctccgcaacctcctactcacttccgctccgttctcttgcccgccctgcagcggcacccgacctgacagcgttcagcgacccgcgccagttccccgcgctgccctccatctccgacccccgcatgcactatccaggcgccttcacctactccccgacgccggtcacctcgggcatcggcatcggcatgtcggccatgggctcggccacgcgctaccacacctacctgccgccgccctaccccggctcgtcgcaagcgcagggaggcccgttccaagccagctcgccctcctaccacctgtactacggcgcctcggccggctcctaccagttctccatggtgggcggcgagcgctcgccgccgcgcatcctgccgccctgcaccaacgcctccaccggctccgcgctgctcaaccccagcctcccgaaccagagcgacgtggtggaggccgagggcagccacagcaactcccccaccaacatggcgccctccgcgcgcctggaggaggccgtgtggaggccctactgaggcgccaggcctggcccggctgggccacgcgggccgccgccttcgcctccgggcgcgcgggcctcctgttcgcgacaagcccgccgggatcccgggccctgggcccggccaccgtcctggggccgagggcgcccgacggccaggatctcgctgtaggtcaggcccgcgcagcctcctgcgcccagaagcccacgccgccgccgtctgctggcgccccggccctcgcggaggtgtccgaggcgacgcacctcgagggtgtccgccggccccagcacccaggggacgcgctggaaagcaaacaggaagattcccggagggaaactgtgaatgcttctgatttagcaatgctgtgaataaaaagaaagattttatacccttgacttaactttttaaccaagttgtttattccaaagagtgtggaattttggttggggtggggggagaggagggatgcaactcgccctgtttggcatctaattcttatttttaatttttccgcaccttatcaattgcaaaatgcgtatttgcatttgggtggtttttatttttatatacgtttatataaatatatataaattgagcttgcttctttcttgctttgaccatggaaagaaatatgattcccttttctttaagttttatttaacttttcttttggacttttgggtagttgtttttttttgttttgttttgtttttttgagaaacagctacagctttgggtcatttttaactactgtattcccacaaggaatccccagatatttatgtatcttgatgttcagacatttatgtgttgataattttttaattatttaaatgtacttatattaagaaaaatatcaagtactacattttcttttgttcttgatagtagccaaagttaaatgtatcacattgaagaaggctagaaaaaaagaatgagtaatgtgatcgcttggttatccagaagtattgtttacattaaactccctttcatgttaatcaaacaagtgagtagctcacgcagcaacgtttttaataggatttttagacactgagggtcactccaaggatcagaagtatggaattttctgccaggctcaacaagggtctcatatctaacttcctccttaaaacagagaaggtcaatctagttccagagggttgaggcaggtgccaataattacatctttggagaggatttgatttctgcccagggatttgctcaccccaaggtcatctgataatttcacagatgctgtgtaacagaacacagccaaagtaaactgtgtaggggagccacatttacataggaaccaaatcaatgaatttaggggttacgattatagcaatttaagggcccaccagaagcaggcctcgaggagtcaatttgcctctgtgtgcctcagtggagacaagtgggaaaacatggtcccacctgtgcgagaccccctgtcctgtgctgctcactcaacaacatctttgtgttgctttcaccaggctgagaccctaccctatggggtatatgggcttttacctgtgcaccagtgtgacaggaaagattcatgtcactactgtccgtggctacaattcaaaggtatccaatgtcgctgtaaattttatggcactatttttattggaggatttggtcagaatgcagttgttgtacaactcataaatactaactgctgattttgacacatgtgtgctccaaatgatctggtggttatttaacgtacctcttaaaattcgttgaaacgatttcaggtcaactctgaagagtatttgaaagcaggacttcagaacagtgtttgatttttattttataaatttaagcattcaaattaggcaaatctttggctgcaggcagcaaaaacagctggacttatttaaaacaacttgtttttgagttttcttatatatatattgattatttgttttacacacatgcagtagcactttggtaagagttaaagagtaaagcagcttatgttgtcaggtcgttcttatctagagaagagctatagcagatctcggacaaactcagaatatattcactttcatttttgacaggattccctccacaactcagtttcatatattattccgtattacatttttgcagctaaattaccataaaatgtcagcaaatgtaaaaatttaatttctgaaaagcaccattagcccatttcccccaaattaaacgtaaatgttttttttcagcacatgttaccatgtctgacctgcaaaaatgctggagaaaaatgaaggaaaaaattatgtttttcagtttaattctgttaactgaagatattccaactcaaaaccagcctcatgctctgattagataatcttttacattgaacctttactctcaaagccatgtgtggagggggcttgtcactattgtaggctcactggattggtcatttagagtttcacagactcttaccagcatatatagtatttaattgtttcaaaaaaaatcaaactgtagttgttttggcgataggtctcacgcaacacatttttgtatgtgtgtgtgtgtgcgtgtgtgtgtgtgtgtgtgaaaaattgcattcattgacttcaggtagattaaggtatctttttattcattgccctcaggaaagttaaggtatcaatgagacccttaagccaatcatgtaataactgcatgtgtctggtccaggagaagtattgaataagccatttctactgcttactcatgtccctatttatgatttcaacatggatacatatttcagttctttctttttctcactatctgaaaatacatttccctccctctcttccccccaatatctccctttttttctctcttcctctatcttccaaaccccactttctccctcctccttttcctgtgttctcttaagcagatagcacatacccccacccagtaccaaatttcagaacacaagaaggtccagttcttcccccttcacataaaggaacatggtttgtcagcctttctcctgtttatgggtttcttccagcagaacagagacattgccaaccatattggatctgcttgctgtccaaaccagcaaactttcctgggcaaatcacaatcagtgagtaaatagacagcctttctgctgccttgggtttctgtgcagataaacagaaatgctctgattagaaaggaaatgaatggttccactcaaatgtcctgcaatttaggattgcagatttctgccttgaaatacctgtttctttgggacattccgtcctgatgatttttatttttgttggtttttatttttggggggaatgacatgtttgggtcttttatacatgaaaatttgtttgacaataatctcacaaaacatattttacatctgaacaaaatgcctttttgtttaccgtagcgtatacatttgttttgggatttttgtgtgtttgttgggaattttgtttttagccaggtcagtattgatgaggctgatcatttggctctttttttccttccagaagagttgcatcaacaaagttaattgtatttatgtatgtaaatagattttaagcttcattataaaatattgttaatgcctataactttttttcaatttttttgtgtgtgtttctaaggactttttcttaggtttgctaaatactgtagggaaaaaaatgcttctttctactttgtttattttagactttaaaatgagctacttcttattcacttttgtaaacagctaatagcatggttccaattttttttaagttcactttttttgttctaggggaaatgaatgtgcaaaaaaagaaaaagaactgttggttatttgtgttattctggatgtataaaaatcaatggaaaaaaataaactttcaaattgaaatgacggtataacacatctactgaaaaagcaacgggaaatgtggtcctatttaagccagcccccacctagggtctatttgtgtggcagttattgggtttggtcacaaaacatcctgaaaattcgtgcgtgggcttctttctccctggtacaaacgtatggaatgcttcttaaaggggaactgtcaagctggtgtcttcagccagatgacatgagagaatatcccagaaccctctctccaaggtgtttctagatagcacaggagagcaggcactgcactgtccacagtccacggtacacagtcgggtgggccgcctcccctctcctgggagcattcgtcgtgcccagcctgagcagggcagctggactgctgctgttcaggagccaccagagccttcctctctttgtaccacagtttcttctgtaaatccagtgttacaatcagtgtgaatggcaaataaacagtttgacaagtacatacacca

SEQ ID NO: 442501 - DNA, 6313 bp, Homo sapiens
ggaaaggggaacagttaaatttgtaatttgggttgtgtgaaaacttctttgggcctcataaacaaccacagaaccacaagttgggtagcctggcagtgtcagaagtctgaacccagcatagtggtcagcaggcaggacgaatcacactgaatgcaaaccacagggtttcgcagcgtggtgagcatcaccaacccacagccaaggcggcgctggctttttttttttttttaatctttaacaatttgaatatttgtttttacaaaggtaaaagaaatcattgagtcccccgccttcagaagagggtgcattttcaggaggaagcgatggcttcagacagcatatttgagtcatttccttcgtacccacagtgcttcatgagagaatgcatacttggaatgaatccttctagagacgtccacgatgccagcacgagccgccgcttcacgccgccttccaccgcgctgagcccaggcaagatgagcgaggcgttgccgctgggcgccccggacgccggcgctgccctggccggcaagctgaggagcggcgaccgcagcatggtggaggtgctggccgaccacccgggcgagctggtgcgcaccgacagccccaacttcctctgctccgtgctgcctacgcactggcgctgcaacaagaccctgcccatcgctttcaaggtggtggccctaggggatgttccagatggcactctggtcactgtgatggctggcaatgatgaaaactactcggctgagctgagaaatgctaccgcagccatgaagaaccaggttgcaagatttaatgacctcaggtttgtcggtcgaagtggaagagggaaaagcttcactctgaccatcactgtcttcacaaacccaccgcaagtcgccacctaccacagagccatcaaaatcacagtggatgggccccgagaacctcgaagacatcggcagaaactagatgatcagaccaagcccgggagcttgtccttttccgagcggctcagtgaactggagcagctgcggcgcacagccatgagggtcagcccacaccacccagcccccacgcccaaccctcgtgcctccctgaaccactccactgcctttaaccctcagcctcagagtcagatgcaggatacaaggcagatccaaccatccccaccgtggtcctacgatcagtcctaccaatacctgggatccattgcctctccttctgtgcacccagcaacgcccatttcacctggacgtgccagcggcatgacaaccctctctgcagaactttccagtcgactctcaacggcacccgacctgacagcgttcagcgacccgcgccagttccccgcgctgccctccatctccgacccccgcatgcactatccaggcgccttcacctactccccgacgccggtcacctcgggcatcggcatcggcatgtcggccatgggctcggccacgcgctaccacacctacctgccgccgccctaccccggctcgtcgcaagcgcagggaggcccgttccaagccagctcgccctcctaccacctgtactacggcgcctcggccggctcctaccagttctccatggtgggcggcgagcgctcgccgccgcgcatcctgccgccctgcaccaacgcctccaccggctccgcgctgctcaaccccagcctcccgaaccagagcgacgtggtggaggccgagggcagccacagcaactcccccaccaacatggcgccctccgcgcgcctggaggaggccgtgtggaggccctactgaggcgccaggcctggcccggctgggccacgcgggccgccgccttcgcctccgggcgcgcgggcctcctgttcgcgacaagcccgccgggatcccgggccctgggcccggccaccgtcctggggccgagggcgcccgacggccaggatctcgctgtaggtcaggcccgcgcagcctcctgcgcccagaagcccacgccgccgccgtctgctggcgccccggccctcgcggaggtgtccgaggcgacgcacctcgagggtgtccgccggccccagcacccaggggacgcgctggaaagcaaacaggaagattcccggagggaaactgtgaatgcttctgatttagcaatgctgtgaataaaaagaaagattttatacccttgacttaactttttaaccaagttgtttattccaaagagtgtggaattttggttggggtggggggagaggagggatgcaactcgccctgtttggcatctaattcttatttttaatttttccgcaccttatcaattgcaaaatgcgtatttgcatttgggtggtttttatttttatatacgtttatataaatatatataaattgagcttgcttctttcttgctttgaccatggaaagaaatatgattcccttttctttaagttttatttaacttttcttttggacttttgggtagttgtttttttttgttttgttttgtttttttgagaaacagctacagctttgggtcatttttaactactgtattcccacaaggaatccccagatatttatgtatcttgatgttcagacatttatgtgttgataattttttaattatttaaatgtacttatattaagaaaaatatcaagtactacattttcttttgttcttgatagtagccaaagttaaatgtatcacattgaagaaggctagaaaaaaagaatgagtaatgtgatcgcttggttatccagaagtattgtttacattaaactccctttcatgttaatcaaacaagtgagtagctcacgcagcaacgtttttaataggatttttagacactgagggtcactccaaggatcagaagtatggaattttctgccaggctcaacaagggtctcatatctaacttcctccttaaaacagagaaggtcaatctagttccagagggttgaggcaggtgccaataattacatctttggagaggatttgatttctgcccagggatttgctcaccccaaggtcatctgataatttcacagatgctgtgtaacagaacacagccaaagtaaactgtgtaggggagccacatttacataggaaccaaatcaatgaatttaggggttacgattatagcaatttaagggcccaccagaagcaggcctcgaggagtcaatttgcctctgtgtgcctcagtggagacaagtgggaaaacatggtcccacctgtgcgagaccccctgtcctgtgctgctcactcaacaacatctttgtgttgctttcaccaggctgagaccctaccctatggggtatatgggcttttacctgtgcaccagtgtgacaggaaagattcatgtcactactgtccgtggctacaattcaaaggtatccaatgtcgctgtaaattttatggcactatttttattggaggatttggtcagaatgcagttgttgtacaactcataaatactaactgctgattttgacacatgtgtgctccaaatgatctggtggttatttaacgtacctcttaaaattcgttgaaacgatttcaggtcaactctgaagagtatttgaaagcaggacttcagaacagtgtttgatttttattttataaatttaagcattcaaattaggcaaatctttggctgcaggcagcaaaaacagctggacttatttaaaacaacttgtttttgagttttcttatatatatattgattatttgttttacacacatgcagtagcactttggtaagagttaaagagtaaagcagcttatgttgtcaggtcgttcttatctagagaagagctatagcagatctcggacaaactcagaatatattcactttcatttttgacaggattccctccacaactcagtttcatatattattccgtattacatttttgcagctaaattaccataaaatgtcagcaaatgtaaaaatttaatttctgaaaagcaccattagcccatttcccccaaattaaacgtaaatgttttttttcagcacatgttaccatgtctgacctgcaaaaatgctggagaaaaatgaaggaaaaaattatgtttttcagtttaattctgttaactgaagatattccaactcaaaaccagcctcatgctctgattagataatcttttacattgaacctttactctcaaagccatgtgtggagggggcttgtcactattgtaggctcactggattggtcatttagagtttcacagactcttaccagcatatatagtatttaattgtttcaaaaaaaatcaaactgtagttgttttggcgataggtctcacgcaacacatttttgtatgtgtgtgtgtgtgcgtgtgtgtgtgtgtgtgtgaaaaattgcattcattgacttcaggtagattaaggtatctttttattcattgccctcaggaaagttaaggtatcaatgagacccttaagccaatcatgtaataactgcatgtgtctggtccaggagaagtattgaataagccatttctactgcttactcatgtccctatttatgatttcaacatggatacatatttcagttctttctttttctcactatctgaaaatacatttccctccctctcttccccccaatatctccctttttttctctcttcctctatcttccaaaccccactttctccctcctccttttcctgtgttctcttaagcagatagcacatacccccacccagtaccaaatttcagaacacaagaaggtccagttcttcccccttcacataaaggaacatggtttgtcagcctttctcctgtttatgggtttcttccagcagaacagagacattgccaaccatattggatctgcttgctgtccaaaccagcaaactttcctgggcaaatcacaatcagtgagtaaatagacagcctttctgctgccttgggtttctgtgcagataaacagaaatgctctgattagaaaggaaatgaatggttccactcaaatgtcctgcaatttaggattgcagatttctgccttgaaatacctgtttctttgggacattccgtcctgatgatttttatttttgttggtttttatttttggggggaatgacatgtttgggtcttttatacatgaaaatttgtttgacaataatctcacaaaacatattttacatctgaacaaaatgcctttttgtttaccgtagcgtatacatttgttttgggatttttgtgtgtttgttgggaattttgtttttagccaggtcagtattgatgaggctgatcatttggctctttttttccttccagaagagttgcatcaacaaagttaattgtatttatgtatgtaaatagattttaagcttcattataaaatattgttaatgcctataactttttttcaatttttttgtgtgtgtttctaaggactttttcttaggtttgctaaatactgtagggaaaaaaatgcttctttctactttgtttattttagactttaaaatgagctacttcttattcacttttgtaaacagctaatagcatggttccaattttttttaagttcactttttttgttctaggggaaatgaatgtgcaaaaaaagaaaaagaactgttggttatttgtgttattctggatgtataaaaatcaatggaaaaaaataaactttcaaattgaaatgacggtataacacatctactgaaaaagcaacgggaaatgtggtcctatttaagccagcccccacctagggtctatttgtgtggcagttattgggtttggtcacaaaacatcctgaaaattcgtgcgtgggcttctttctccctggtacaaacgtatggaatgcttcttaaaggggaactgtcaagctggtgtcttcagccagatgacatgagagaatatcccagaaccctctctccaaggtgtttctagatagcacaggagagcaggcactgcactgtccacagtccacggtacacagtcgggtgggccgcctcccctctcctgggagcattcgtcgtgcccagcctgagcagggcagctggactgctgctgttcaggagccaccagagccttcctctctttgtaccacagtttcttctgtaaatccagtgttacaatcagtgtgaatggcaaataaacagtttgacaagtacatacaccacataaaaaaaatagtttagctgataatattttttttttataattatattgtgtatagaaaaataaacttcgtgggggggcccgggaaccaatttcccctatagggaagttattttcgccccccttaattgggggttgttttaaaacgtcgggaatggggaaaacccgggttttacccaatttaatggacgttgaaaaaaattcccctttttgcaa

SEQ ID NO: 442502 - DNA, 4181 bp, Homo sapiens
  misc_feature (57)..(57): n is a, c, g, or t
tctctctctctctctctctctctctctctctctctctctctctctctctctctcctntggcgccccggccctcgcggaggtgtccgaggcgacgcacctcgagggtgtccgccggccccagcacccaggggacgcgctggaaagcaaacaggaagattcccggagggaaactgtgaatgcttctgatttagcaatgctgtgaataaaaagaaagattttatacccttgacttaactttttaaccaagttgtttattccaaagagtgtggaattttggttggggtggggggagaggagggatgcaactcgccctgtttggcatctaattcttatttttaatttttccgcaccttatcaattgcaaaatgcgtatttgcatttgggtggtttttatttttatatacgtttatataaatatatataaattgagcttgcttctttcttgctttgaccatggaaagaaatatgattcccttttctttaagttttatttaacttttcttttggacttttgggtagttgtttttttttgttttgttttgtttttttgagaaacagctacagctttgggtcatttttaactactgtattcccacaaggaatccccagatatttatgtatcttgatgttcagacatttatgtgttgataattttttaattatttaaatgtacttatattaagaaaaatatcaagtactacattttcttttgttcttgatagtagccaaagttaaatgtatcacattgaagaaggctagaaaaaaagaatgagtaatgtgatcgcttggttatccagaagtattgtttacattaaactccctttcatgttaatcaaacaagtgagtagctcacgcagcaacgtttttaataggatttttagacactgagggtcactccaaggatcagaagtatggaattttctgccaggctcaacaagggtctcatatctaacttcctccttaaaacagagaaggtcaatctagttccagagggttgaggcaggtgccaataattacatctttggagaggatttgatttctgcccagggatttgctcaccccaaggtcatctgataatttcacagatgctgtgtaacagaacacagccaaagtaaactgtgtaggggagccacatttacataggaaccaaatcaatgaatttaggggttacgattatagcaatttaagggcccaccagaagcaggcctcgaggagtcaatttgcctctgtgtgcctcagtggagacaagtgggaaaacatggtcccacctgtgcgagaccccctgtcctgtgctgctcactcaacaacatctttgtgttgctttcaccaggctgagaccctaccctatggggtatatgggcttttacctgtgcaccagtgtgacaggaaagattcatgtcactactgtccgtggctacaattcaaaggtatccaatgtcgctgtaaattttatggcactatttttattggaggatttggtcagaatgcagttgttgtacaactcataaatactaactgctgattttgacacatgtgtgctccaaatgatctggtggttatttaacgtacctcttaaaattcgttgaaacgatttcaggtcaactctgaagagtatttgaaagcaggacttcagaacagtgtttgatttttattttataaatttaagcattcaaattaggcaaatctttggctgcaggcagcaaaaacagctggacttatttaaaacaacttgtttttgagttttcttatatatatattgattatttgttttacacacatgcagtagcactttggtaagagttaaagagtaaagcagcttatgttgtcaggtcgttcttatctagagaagagctatagcagatctcggacaaactcagaatatattcactttcatttttgacaggattccctccacaactcagtttcatatattattccgtattacatttttgcagctaaattaccataaaatgtcagcaaatgtaaaaatttaatttctgaaaagcaccattagcccatttcccccaaattaaacgtaaatgttttttttcagcacatgttaccatgtctgacctgcaaaaatgctggagaaaaatgaaggaaaaaattatgtttttcagtttaattctgttaactgaagatattccaactcaaaaccagcctcatgctctgattagataatcttttacattgaacctttactctcaaagccatgtgtggagggggcttgtcactattgtaggctcactggattggtcatttagagtttcacagactcttaccagcatatatagtatttaattgtttcaaaaaaaatcaaactgtagttgttttggcgataggtctcacgcaacacatttttgtatgtgtgtgtgtgtgcgtgtgtgtgtgtgtgtgtgaaaaattgcattcattgacttcaggtagattaaggtatctttttattcattgccctcaggaaagttaaggtatcaatgagacccttaagccaatcatgtaataactgcatgtgtctggtccaggagaagtattgaataagccatttctactgcttactcatgtccctatttatgatttcaacatggatacatatttcagttctttctttttctcactatctgaaaatacatttccctccctctcttccccccaatatctccctttttttctctcttcctctatcttccaaaccccactttctccctcctccttttcctgtgttctcttaagcagatagcacatacccccacccagtaccaaatttcagaacacaagaaggtccagttcttcccccttcacataaaggaacatggtttgtcagcctttctcctgtttatgggtttcttccagcagaacagagacattgccaaccatattggatctgcttgctgtccaaaccagcaaactttcctgggcaaatcacaatcagtgagtaaatagacagcctttctgctgccttgggtttctgtgcagataaacagaaatgctctgattagaaaggaaatgaatggttccactcaaatgtcctgcaatttaggattgcagatttctgccttgaaatacctgtttctttgggacattccgtcctgatgatttttatttttgttggtttttatttttggggggaatgacatgtttgggtcttttatacatgaaaatttgtttgacaataatctcacaaaacatattttacatctgaacaaaatgcctttttgtttaccgtagcgtatacatttgttttgggatttttgtgtgtttgttgggaattttgtttttagccaggtcagtattgatgaggctgatcatttggctctttttttccttccagaagagttgcatcaacaaagttaattgtatttatgtatgtaaatagattttaagcttcattataaaatattgttaatgcctataactttttttcaatttttttgtgtgtgtttctaaggactttttcttaggtttgctaaatactgtagggaaaaaaatgcttctttctactttgtttattttagactttaaaatgagctacttcttattcacttttgtaaacagctaatagcatggttccaattttttttaagttcactttttttgttctaggggaaatgaatgtgcaaaaaaagaaaaagaactgttggttatttgtgttattctggatgtataaaaatcaatggaaaaaaataaactttcaaattgaaatgacggtataacacatctactgaaaaagcaacgggaaatgtggtcctatttaagccagcccccacctagggtctatttgtgtggcagttattgggtttggtcacaaaacatcctgaaaattcgtgcgtgggcttctttctccctggtacaaacgtatggaatgcttcttaaaggggaactgtcaagctggtgtcttcagccagatgacatgagagaatatcccagaaccctctctccaaggtgtttctagatagcacaggagagcaggcactgcactgtccacagtccacggtacacagtcgggtgggccgcctcccctctcctgggagcattcgtcgtgcccagcctgagcagggcagctggactgctgctgttcaggagccaccagagccttcctctctttgtaccacagtttcttctgtaaatccagtgttacaatcagtgtgaatggcaaataaacagtttgacaagtacatacacca

SEQ ID NO: 442503 - DNA, 6049 bp, Homo sapiens
ggaaaggggaacagttaaatttgtaatttgggttgtgtgaaaacttctttgggcctcataaacaaccacagaaccacaagttgggtagcctggcagtgtcagaagtctgaacccagcatagtggtcagcaggcaggacgaatcacactgaatgcaaaccacagggtttcgcagcgtggtgagcatcaccaacccacagccaaggcggcgctggctttttttttttttttaatctttaacaatttgaatatttgtttttacaaaggtaaaagaaatcattgagtcccccgccttcagaagagggtgcattttcaggaggaagcgatggcttcagacagcatatttgagtcatttccttcgtacccacagtgcttcatgagagaatgcatacttggaatgaatccttctagagacgtccacgatgccagcacgagccgccgcttcacgccgccttccaccgcgctgagcccaggcaagatgagcgaggcgttgccgctgggcgccccggacgccggcgctgccctggccggcaagctgaggagcggcgaccgcagcatggtggaggtgctggccgaccacccgggcgagctggtgcgcaccgacagccccaacttcctctgctccgtgctgcctacgcactggcgctgcaacaagaccctgcccatcgctttcaaggtggtggccctaggggatgttccagatggcactctggtcactgtgatggctggcaatgatgaaaactactcggctgagctgagaaatgctaccgcagccatgaagaaccaggttgcaagatttaatgacctcaggtttgtcggtcgaagtggaagagggaaaagcttcactctgaccatcactgtcttcacaaacccaccgcaagtcgccacctaccacagagccatcaaaatcacagtggatgggccccgagaacctcgaagacatcggcagaaactagatgatcagaccaagcccgggagcttgtccttttccgagcggctcagtgaactggagcagctgcggcgcacagccatgagggtcagcccacaccacccagcccccacgcccaaccctcgtgcctccctgaaccactccactgcctttaaccctcagcctcagagtcagatgcaggatacaaggcagatccaaccatccccaccgtggtcctacgatcagtcctaccaatacctgggatccattgcctctccttctgtgcacccagcaacgcccatttcacctggacgtgccagcggcatgacaaccctctctgcagaactttccagtcgactctcaacggcacccgacctgacagcgttcagcgacccgcgccagttccccgcgctgccctccatctccgacccccgcatgcactatccaggcgccttcacctactccccgacgccggtcacctcgggcatcggcatcggcatgtcggccatgggctcggccacgcgctaccacacctacctgccgccgccctaccccggctcgtcgcaagcgcagggaggcccgttccaagccagctcgccctcctaccacctgtactacggcgcctcggccggctcctaccagttctccatggtgggcggcgagcgctcgccgccgcgcatcctgccgccctgcaccaacgcctccaccggctccgcgctgctcaaccccagcctcccgaaccagagcgacgtggtggaggccgagggcagccacagcaactcccccaccaacatggcgccctccgcgcgcctggaggaggccgtgtggaggccctactgaggcgccaggcctggcccggctgggccacgcgggccgccgccttcgcctccgggcgcgcgggcctcctgttcgcgacaagcccgccgggatcccgggccctgggcccggccaccgtcctggggccgagggcgcccgacggccaggatctcgctgtaggtcaggcccgcgcagcctcctgcgcccagaagcccacgccgccgccgtctgctggcgccccggccctcgcggaggtgtccgaggcgacgcacctcgagggtgtccgccggccccagcacccaggggacgcgctggaaagcaaacaggaagattcccggagggaaactgtgaatgcttctgatttagcaatgctgtgaataaaaagaaagattttatacccttgacttaactttttaaccaagttgtttattccaaagagtgtggaattttggttggggtggggggagaggagggatgcaactcgccctgtttggcatctaattcttatttttaatttttccgcaccttatcaattgcaaaatgcgtatttgcatttgggtggtttttatttttatatacgtttatataaatatatataaattgagcttgcttctttcttgctttgaccatggaaagaaatatgattcccttttctttaagttttatttaacttttcttttggacttttgggtagttgtttttttttgttttgttttgtttttttgagaaacagctacagctttgggtcatttttaactactgtattcccacaaggaatccccagatatttatgtatcttgatgttcagacatttatgtgttgataattttttaattatttaaatgtacttatattaagaaaaatatcaagtactacattttcttttgttcttgatagtagccaaagttaaatgtatcacattgaagaaggctagaaaaaaagaatgagtaatgtgatcgcttggttatccagaagtattgtttacattaaactccctttcatgttaatcaaacaagtgagtagctcacgcagcaacgtttttaataggatttttagacactgagggtcactccaaggatcagaagtatggaattttctgccaggctcaacaagggtctcatatctaacttcctccttaaaacagagaaggtcaatctagttccagagggttgaggcaggtgccaataattacatctttggagaggatttgatttctgcccagggatttgctcaccccaaggtcatctgataatttcacagatgctgtgtaacagaacacagccaaagtaaactgtgtaggggagccacatttacataggaaccaaatcaatgaatttaggggttacgattatagcaatttaagggcccaccagaagcaggcctcgaggagtcaatttgcctctgtgtgcctcagtggagacaagtgggaaaacatggtcccacctgtgcgagaccccctgtcctgtgctgctcactcaacaacatctttgtgttgctttcaccaggctgagaccctaccctatggggtatatgggcttttacctgtgcaccagtgtgacaggaaagattcatgtcactactgtccgtggctacaattcaaaggtatccaatgtcgctgtaaattttatggcactatttttattggaggatttggtcagaatgcagttgttgtacaactcataaatactaactgctgattttgacacatgtgtgctccaaatgatctggtggttatttaacgtacctcttaaaattcgttgaaacgatttcaggtcaactctgaagagtatttgaaagcaggacttcagaacagtgtttgatttttattttataaatttaagcattcaaattaggcaaatctttggctgcaggcagcaaaaacagctggacttatttaaaacaacttgtttttgagttttcttatatatatattgattatttgttttacacacatgcagtagcactttggtaagagttaaagagtaaagcagcttatgttgtcaggtcgttcttatctagagaagagctatagcagatctcggacaaactcagaatatattcactttcatttttgacaggattccctccacaactcagtttcatatattattccgtattacatttttgcagctaaattaccataaaatgtcagcaaatgtaaaaatttaatttctgaaaagcaccattagcccatttcccccaaattaaacgtaaatgttttttttcagcacatgttaccatgtctgacctgcaaaaatgctggagaaaaatgaaggaaaaaattatgtttttcagtttaattctgttaactgaagatattccaactcaaaaccagcctcatgctctgattagataatcttttacattgaacctttactctcaaagccatgtgtggagggggcttgtcactattgtaggctcactggattggtcatttagagtttcacagactcttaccagcatatatagtatttaattgtttcaaaaaaaatcaaactgtagttgttttggcgataggtctcacgcaacacatttttgtatgtgtgtgtgtgtgcgtgtgtgtgtgtgtgtgtgaaaaattgcattcattgacttcaggtagattaaggtatctttttattcattgccctcaggaaagttaaggtatcaatgagacccttaagccaatcatgtaataactgcatgtgtctggtccaggagaagtattgaataagccatttctactgcttactcatgtccctatttatgatttcaacatggatacatatttcagttctttctttttctcactatctgaaaatacatttccctccctctcttccccccaatatctccctttttttctctcttcctctatcttccaaaccccactttctccctcctccttttcctgtgttctcttaagcagatagcacatacccccacccagtaccaaatttcagaacacaagaaggtccagttcttcccccttcacataaaggaacatggtttgtcagcctttctcctgtttatgggtttcttccagcagaacagagacattgccaaccatattggatctgcttgctgtccaaaccagcaaactttcctgggcaaatcacaatcagtgagtaaatagacagcctttctgctgccttgggtttctgtgcagataaacagaaatgctctgattagaaaggaaatgaatggttccactcaaatgtcctgcaatttaggattgcagatttctgccttgaaatacctgtttctttgggacattccgtcctgatgatttttatttttgttggtttttatttttggggggaatgacatgtttgggtcttttatacatgaaaatttgtttgacaataatctcacaaaacatattttacatctgaacaaaatgcctttttgtttaccgtagcgtatacatttgttttgggatttttgtgtgtttgttgggaattttgtttttagccaggtcagtattgatgaggctgatcatttggctctttttttccttccagaagagttgcatcaacaaagttaattgtatttatgtatgtaaatagattttaagcttcattataaaatattgttaatgcctataactttttttcaatttttttgtgtgtgtttctaaggactttttcttaggtttgctaaatactgtagggaaaaaaatgcttctttctactttgtttattttagactttaaaatgagctacttcttattcacttttgtaaacagctaatagcatggttccaattttttttaagttcactttttttgttctaggggaaatgaatgtgcaaaaaaagaaaaagaactgttggttatttgtgttattctggatgtataaaaatcaatggaaaaaaataaactttcaaattgaaatgacggtataacacatctactgaaaaagcaacgggaaatgtggtcctatttaagccagcccccacctagggtctatttgtgtggcagttattgggtttggtcacaaaacatcctgaaaattcgtgcgtgggcttctttctccctggtacaccagatgacatgagagaatatcccagaaccctctctccaaggtgtttctagatagcacaggagagcaggcactgcactgtccacagtccacggtacacagtcgggtgggccgcctcccctctcctgggagcattcgtcgtgcccagcctgagcagggcagctggactgctgctgttcaggagccaccagagccttcctctctttgtaccacagtttcttctgtaaatccagtgttacaatcagtgtgaatggcaaataaacagtttgacaagtacatacacca

SEQ ID NO: 442504 - DNA, 5018 bp, Homo sapiens
ggaaaggggaacagttaaatttgtaatttgggttgtgtgaaaacttctttgggcctcataaacaaccacagaaccacaagttgggtagcctggcagtgtcagaagtctgaacccagcatagtggtcagcaggcaggacgaatcacactgaatgcaaaccacagggtttcgcagcgtggtgagcatcaccaacccacagccaaggcggcgctggctttttttttttttttaatctttaacaatttgaatatttgtttttacaaaggtaaaagaaatcattgagtcccccgccttcagaagagggtgcattttcaggaggaagcgatggcttcagacagcatatttgagtcatttccttcgtacccacagtgcttcatgagagaatgcatacttggaatgaatccttctagagacgtccacgatgccagcacgagccgccgcttcacgccgccttccaccgcgctgagcccaggcaagatgagcgaggcgttgccgctgggcgccccggacgccggcgctgccctggccggcaagctgaggagcggcgaccgcagcatggtggaggtgctggccgaccacccgggcgagctggtgcgcaccgacagccccaacttcctctgctccgtgctgcctacgcactggcgctgcaacaagaccctgcccatcgctttcaaggtggtggccctaggggatgttccagatggcactctggtcactgtgatggctggcaatgatgaaaactactcggctgagctgagaaatgctaccgcagccatgaagaaccaggttgcaagatttaatgacctcaggtttgtcggtcgaagtggaagagggaaaagcttcactctgaccatcactgtcttcacaaacccaccgcaagtcgccacctaccacagagccatcaaaatcacagtggatgggccccgagaacctcgaagacatcggcagaaactagatgatcagaccaagcccgggagcttgtccttttccgagcggctcagtgaactggagcagctgcggcgcacagccatgagggtcagcccacaccacccagcccccacgcccaaccctcgtgcctccctgaaccactccactgcctttaaccctcagcctcagagtcagatgcaggatacaaggcagatccaaccatccccaccgtggtcctacgatcagtcctaccaatacctgggatccattgcctctccttctgtgcacccagcaacgcccatttcacctggacgtgccagcggcatgacaaccctctctgcagaactttccagtcgactctcaacggcacccgacctgacagcgttcagcgacccgcgccagttccccgcgctgccctccatctccgacccccgcatgcactatccaggcgccttcacctactccccgacgccggtcacctcgggcatcggcatcggcatgtcggccatgggctcggccacgcgctaccacacctacctgccgccgccctaccccggctcgtcgcaagcgcagggaggcccgttccaagccagctcgccctcctaccacctgtactacggcgcctcggccggctcctaccagttctccatggtgggcggcgagcgctcgccgccgcgcatcctgccgccctgcaccaacgcctccaccggctccgcgctgctcaaccccagcctcccgaaccagagcgacgtggtggaggccgagggcagccacagcaactcccccaccaacatggcgccctccgcgcgcctggaggaggccgtgtggaggccctactgaggcgccaggcctggcccggctgggccacgcgggccgccgccttcgcctccgggcgcgcgggcctcctgttcgcgacaagcccgccgggatcccgggccctgggcccggccaccgtcctggggccgagggcgcccgacggccaggatctcgctgtaggtcaggcccgcgcagcctcctgcgcccagaagcccacgccgccgccgtctgctggcgccccggccctcgcggaggtgtccgaggcgacgcacctcgagggtgtccgccggccccagcacccaggggacgcgctggaaagcaaacaggaagattcccggagggaaactgtgaatgcttctgatttagcaatgctgtgaataaaaagaaagattttatacccttgacttaactttttaaccaagttgtttattccaaagagtgtggaattttggttggggtggggggagaggagggatgcaactcgccctgtttggcatctaattcttatttttaatttttccgcaccttatcaattgcaaaatgcgtatttgcatttgggtggtttttatttttatatacgtttatataaatatatataaattgagcttgcttctttcttgctttgaccatggaaagaaatatgattcccttttctttaagttttatttaacttttcttttggacttttgggtagttgtttttttttgttttgttttgtttttttgagaaacagctacagctttgggtcatttttaactactgtattcccacaaggaatccccagatatttatgtatcttgatgttcagacatttatgtgttgataattttttaattatttaaatgtacttatattaagaaaaatatcaagtactacattttcttttgttcttgatagtagccaaagttaaatgtatcacattgaagaaggctagaaaaaaagaatgagtaatgtgatcgcttggttatccagaagtattgtttacattaaactccctttcatgttaatcaaacaagtgagtagctcacgcagcaacgtttttaataggatttttagacactgagggtcactccaaggatcagaagtatggaattttctgccaggctcaacaagggtctcatatctaacttcctccttaaaacagagaaggtcaatctagttccagagggttgaggcaggtgccaataattacatctttggagaggatttgatttctgcccagggatttgctcaccccaaggtcatctgataatttcacagatgctgtgtaacagaacacagccaaagtaaactgtgtaggggagccacatttacataggaaccaaatcaatgaatttaggggttacgattatagcaatttaagggcccaccagaagcaggcctcgaggagtcaatttgcctctgtgtgcctcagtggagacaagtgggaaaacatggtcccacctgtgcgagaccccctgtcctgtgctgctcactcaacaacatctttgtgttgctttcaccaggctgagaccctaccctatggggtatatgggcttttacctgtgcaccagtgtgacaggaaagattcatgtcactactgtccgtggctacaattcaaaggtatccaatgtcgctgtaaattttatggcactatttttattggaggatttggtcagaatgcagttgttgtacaactcataaatactaactgctgattttgacacatgtgtgctccaaatgatctggtggttatttaacgtacctcttaaaattcgttgaaacgatttcaggtcaactctgaagagtatttgaaagcaggacttcagaacagtgtttgatttttattttataaatttaagcattcaaattaggcaaatctttggctgcaggcagcaaaaacagctggacttatttaaaacaacttgtttttgagttttcttatatatatattgattatttgttttacacacatgcagtagcactttggtaagagttaaagagtaaagcagcttatgttgtcaggtcgttcttatctagagaagagctatagcagatctcggacaaactcagaatatattcactttcatttttgacaggattccctccacaactcagtttcatatattattccgtattacatttttgcagctaaattaccataaaatgtcagcaaatgtaaaaatttaatttctgaaaagcaccattagcccatttcccccaaattaaacgtaaatgttttttttcagcacatgttaccatgtctgacctgcaaaaatgctggagaaaaatgaaggaaaaaattatgtttttcagtttaattctgttaactgaagatattccaactcaaaaccagcctcatgctctgattagataatcttttacattgaacctttactctcaaagccatgtgtggagggggcttgtcactattgtaggctcactggattggtcatttagagtttcacagactcttaccagcatatatagtatttaattgtttcaaaaaaaatcaaactgtagttgttttggcgataggtctcacgcaacacatttttgtatgtgtgtgtgtgtgcgtgtgtgtgtgtgtgtgtgaaaaattgcattcattgacttcaggtagattaaggtatctttttattcattgccctcaggaaagttaaggtatcaatgagacccttaagccaatcatgtaataactgcatgtgtctggtccaggagaagtattgaataagccatttctactgcttactcatgtccctatttatgatttcaacatggatacatatttcagttctttctttttctcactatctgaaaatacatttccctccctctcttccccccaatatctccctttttttctctcttcctctatcttccaaaccccactttctccctcctccttttcctgtgttctcttaagcagatagcacatacccccacccagtaccaaatttcagaacacaagaaggtccagttcttcccccttcacataaaggaacatggtttgtcagcctttctcctgtttatgggtttcttccagcagaacagagacattgccaaccatattggatctgcttgctgtccaaaccagcaaactttcctgggcaaatcacaatcagtgagtaaatagacagcctttctgctgccttgggtttctgtgcagataaacagaaatgctctgattagtatgaccatgaatgcgacatcgcgatcgtcatcagtttggactacagactagctgctcgatatatctgcatctatgggacagtcgtcctgatattagttactgtg

SEQ ID NO: 442505 - DNA, 3748 bp, Homo sapiens
ggaaaggggaacagttaaatttgtaatttgggttgtgtgaaaacttctttgggcctcataaacaaccacagaaccacaagttgggtagcctggcagtgtcagaagtctgaacccagcatagtggtcagcaggcaggacgaatcacactgaatgcaaaccacagggtttcgcagcgtggtgagcatcaccaacccacagccaaggcggcgctggctttttttttttttttaatctttaacaatttgaatatttgtttttacaaaggtaaaagaaatcattgagtcccccgccttcagaagagggtgcattttcaggaggaagcgatggcttcagacagcatatttgagtcatttccttcgtacccacagtgcttcatgagagaatgcatacttggaatgaatccttctagagacgtccacgatgccagcacgagccgccgcttcacgccgccttccaccgcgctgagcccaggcaagatgagcgaggcgttgccgctgggcgccccggacgccggcgctgccctggccggcaagctgaggagcggcgaccgcagcatggtggaggtgctggccgaccacccgggcgagctggtgcgcaccgacagccccaacttcctctgctccgtgctgcctacgcactggcgctgcaacaagaccctgcccatcgctttcaaggtggtggccctaggggatgttccagatggcactctggtcactgtgatggctggcaatgatgaaaactactcggctgagctgagaaatgctaccgcagccatgaagaaccaggttgcaagatttaatgacctcaggtttgtcggtcgaagtggaagagggaaaagcttcactctgaccatcactgtcttcacaaacccaccgcaagtcgccacctaccacagagccatcaaaatcacagtggatgggccccgagaacctcgaagacatcggcagaaactagatgatcagaccaagcccgggagcttgtccttttccgagcggctcagtgaactggagcagctgcggcgcacagccatgagggtcagcccacaccacccagcccccacgcccaaccctcgtgcctccctgaaccactccactgcctttaaccctcagcctcagagtcagatgcaggatacaaggcagatccaaccatccccaccgtggtcctacgatcagtcctaccaatacctgggatccattgcctctccttctgtgcacccagcaacgcccatttcacctggacgtgccagcggcatgacaaccctctctgcagaactttccagtcgactctcaacggcacccgacctgacagcgttcagcgacccgcgccagttccccgcgctgccctccatctccgacccccgcatgcactatccaggcgccttcacctactccccgacgccggtcacctcgggcatcggcatcggcatgtcggccatgggctcggccacgcgctaccacacctacctgccgccgccctaccccggctcgtcgcaagcgcagggaggcccgttccaagccagctcgccctcctaccacctgtactacggcgcctcggccggctcctaccagttctccatggtgggcggcgagcgctcgccgccgcgcatcctgccgccctgcaccaacgcctccaccggctccgcgctgctcaaccccagcctcccgaaccagagcgacgtggtggaggccgagggcagccacagcaactcccccaccaacatggcgccctccgcgcgcctggaggaggccgtgtggaggccctactgaggcgccaggcctggcccggctgggccacgcgggccgccgccttcgcctccgggcgcgcgggcctcctgttcgcgacaagcccgccgggatcccgggccctgggcccggccaccgtcctggggccgagggcgcccgacggccaggatctcgctgtaggtcaggcccgcgcagcctcctgcgcccagaagcccacgccgccgccgtctgctggcgccccggccctcgcggaggtgtccgaggcgacgcacctcgagggtgtccgccggccccagcacccaggggacgcgctggaaagcaaacaggaagattcccggagggaaactgtgaatgcttctgatttagcaatgctgtgaataaaaagaaagattttatacccttgacttaactttttaaccaagttgtttattccaaagagtgtggaattttggttggggtggggggagaggagggatgcaactcgccctgtttggcatctaattcttatttttaatttttccgcaccttatcaattgcaaaatgcgtatttgcatttgggtggtttttatttttatatacgtttatataaatatatataaattgagcttgcttctttcttgctttgaccatggaaagaaatatgattcccttttctttaagttttatttaacttttcttttggacttttgggtagttgtttttttttgttttgttttgtttttttgagaaacagctacagctttgggtcatttttaactactgtattcccacaaggaatccccagatatttatgtatcttgatgttcagacatttatgtgttgataattttttaattatttaaatgtacttatattaagaaaaatatcaagtactacattttcttttgttcttgatagtagccaaagttaaatgtatcacattgaagaaggctagaaaaaaagaatgagtaatgtgatcgcttggttatccagaagtattgtttacattaaactccctttcatgttaatcaaacaagtgagtagctcacgcagcaacgtttttaataggatttttagacactgagggtcactccaaggatcagaagtatggaattttctgccaggctcaacaagggtctcatatctaacttcctccttaaaacagagaaggtcaatctagttccagagggttgaggcaggtgccaataattacatctttggagaggatttgatttctgcccagggatttgctcaccccaaggtcatctgataatttcacagatgctgtgtaacagaacacagccaaagtaaactgtgtaggggagccacatttacataggaaccaaatcaatgaatttaggggttacgattatagcaatttaagggcccaccagaagcaggcctcgaggagtcaatttgcctctgtgtgcctcagtggagacaagtgggaaaacatggtcccacctgtgcgagaccccctgtcctgtgctgctcactcaacaacatctttgtgttgctttcaccaggctgagaccctaccctatggggtatatgggcttttacctgtgcaccagtgtgacaggaaagattcatgtcactactgtccgtggctacaattcaaaggtatccaatgtcgctgtaaattttatggcactatttttattggaggatttggtcagaatgcagttgttgtacaactcataaatactaactgctgattttgacacatgtgtgctccaaatgatctggtggttatttaacgtacctcttaaaattcgttgaaacgatttcaggtcaactctgaagagtatttgaaagcaggacttcagaacagtgtttgatttttattttataaatttaagcattcaaattaggcaaatctttggctgcaggcagcaaaaacagctggatgctgctgttcaggagccaccagagccttcctctctttgtaccacagtttcttctgtaaatccagtgttacaatcagtgtgaatggcaaataaacagtttgacaagtacatacacca

SEQ ID NO: 442506 - DNA, 3217 bp, Homo sapiens
ctacaaggcccgggagcaagccgcgtggctgctttcaactttccttccagccgcgcgttcttggggtctttcctgactaggaaactcctcgctggccgctgacgcacgcagcaagtgagacgcgcggagggatcgagccgcggcccgggcgcagcggtaaaaaacacccattacagaaaccgacccaagggaagacgctgagagcaaacggcacgcgcggacgccgtccggcctcatgcaaggaatcagcgccgcttcgccgcagctgccagccggacggtgcaggagcgcggagtggctcccccgggccccgcggccaaatcgcacccccgccctggaagcggaggcctggccctgggcggccgcgcaggatctggggccgtccgcgggctgcagccccggttcgggagcctcgtggcggccactgcgcctgcctgcagcggctcgcggggccgggcctctccgggtgcggcgcgccggccgggtcctcctcgggccggcggggcctgctttctttttccaggtctccggaccgtggccactcgcggagccgcacaagcctgcgtgtggctgcggaaaggggtccgcacgcgggcggggccccgggccagcatgcaggcttggatgcggggcgcgggggtggcctccgactccccgcccgggctgcgtacagtagcgcgcggcgcggcggcgggggcgcgcgggccaattccaggagccggcggcggcgagccgcgccctggctgataccggaaaggcctgtgattggccgccggccgcccctatgcaaacgagctgagggaatggaattcctccggccgggcttacagtaaaagcacgttcatttccaggcactctcattcatagagccagcgggcgcgggcgggacgggcgccccgcggccggacccagccagggcaccacgctgcccggccctgcgccgccaggcacttctttccggggctcctagggacgccagaaggaagtcaacctctgctgcttctccttggcctgcgttggaccttcctttttttgttgtttttttttgtttttcccctttcttccttttgaattaactggcttcttggctggatgttttcaacttctttcctggctgcgaacttttccccaattgttttccttttacaacagggggagaaagtgctctgtggtccgaggcgagccgtgaagttgcgtgtgcgtggcagtgtgcgtggcaggatgtgcgtgcgtgtgtaacccgagccgcccgatctgtttcgatctgcgccgcggagccctccctcaaggcccgctccacctgctgcggttacgcggcgctcgtgggtgttcgtgcctcggagcagctaaccggcgggtgctgggcgacggtggaggagtatcgtctcgctgctgcccgagtcagggctgagtcacccagctgatgtagacagtggctgccttccgaagagtgcgtgtttgcatgtgtgtgactctgcggctgctcaactcccaacaaaccagaggaccagccacaaacttaaccaacatccccaaacccgagttcacagatgtgggagagctgtagaaccctgagtgtcatcgactgggccttcttatgattgttgttttaagattagctgaagatctctgaaacgctgaattttctgcactgagcgttttgacagaattcattgagagaacagagaacatgacaagtacttctagctcagcactgctccaactactgaagctgattttcaaggctacttaaaaaaatctgcagcgtacattaatggatttctgttgtgtttaaattctccacagattgtattgtaaatattttatgaagtagagcatatgtatatatttatatatacgtgcacatacattagtagcactacctttggaagtctcagctcttgcttttcgggactgaagccagttttgcatgataaaagtggccttgttacgggagataattgtgttctgttgggactttagacaaaactcacctgcaaaaaactgacaggcattaactactggaacttccaaataatgtgtttgctgatcgttttactcttcgcataaatattttaggaagtgtatgagaattttgccttcaggaacttttctaacagccaaagacagaacttaacctctgcaagcaagattcgtggaagatagtctccactttttaatgcactaagcaatcggttgctaggagcccatcctgggtcagaggccgatccgcagaaccagaacgttttcccctcctggactgttagtaacttagtctccctcctcccctaaccacccccgcccccccccaccccccgcagtaataaaggcccctgaacgtgtatgttggtctcccgggagctgcttgctgaagatccgcgcccctgtcgccgtctggtaggagctgtttgcagggtcctaactcaatcggcttgttgtgatgcgtatccccgtagatgccagcacgagccgccgcttcacgccgccttccaccgcgctgagcccaggcaagatgagcgaggcgttgccgctgggcgccccggacgccggcgctgccctggccggcaagctgaggagcggcgaccgcagcatggtggaggtgctggccgaccacccgggcgagctggtgcgcaccgacagccccaacttcctctgctccgtgctgcctacgcactggcgctgcaacaagaccctgcccatcgctttcaaggtggtggccctaggggatgttccagatggcactctggtcactgtgatggctggcaatgatgaaaactactcggctgagctgagaaatgctaccgcagccatgaagaaccaggttgcaagatttaatgacctcaggtttgtcggtcgaagtggaagagggaaaagcttcactctgaccatcactgtcttcacaaacccaccgcaagtcgccacctaccacagagccatcaaaatcacagtggatgggccccgagaacctcgaactgcctccaaattatgaagcccgtgaaccaagacagaccaattagcttgtgaccaattgtctaacttcggacctatacttatgaggaagctcatctttctccctaattcatcccaggacaagcctaggaaaccctggtgttacctccaagaggaaagacatacacatcaaatgcagcggtatgctgataaatgttacccctggatccccagaaaataaataaagtcccaatttatagaaaaaaaa

SEQ ID NO: 442507 - DNA, 3655 bp, Homo sapiens
ctacaaggcccgggagcaagccgcgtggctgctttcaactttccttccagccgcgcgttcttggggtctttcctgactaggaaactcctcgctggccgctgacgcacgcagcaagtgagacgcgcggagggatcgagccgcggcccgggcgcagcggtaaaaaacacccattacagaaaccgacccaagggaagacgctgagagcaaacggcacgcgcggacgccgtccggcctcatgcaaggaatcagcgccgcttcgccgcagctgccagccggacggtgcaggagcgcggagtggctcccccgggccccgcggccaaatcgcacccccgccctggaagcggaggcctggccctgggcggccgcgcaggatctggggccgtccgcgggctgcagccccggttcgggagcctcgtggcggccactgcgcctgcctgcagcggctcgcggggccgggcctctccgggtgcggcgcgccggccgggtcctcctcgggccggcggggcctgctttctttttccaggtctccggaccgtggccactcgcggagccgcacaagcctgcgtgtggctgcggaaaggggtccgcacgcgggcggggccccgggccagcatgcaggcttggatgcggggcgcgggggtggcctccgactccccgcccgggctgcgtacagtagcgcgcggcgcggcggcgggggcgcgcgggccaattccaggagccggcggcggcgagccgcgccctggctgataccggaaaggcctgtgattggccgccggccgcccctatgcaaacgagctgagggaatggaattcctccggccgggcttacagtaaaagcacgttcatttccaggcactctcattcatagagccagcgggcgcgggcgggacgggcgccccgcggccggacccagccagggcaccacgctgcccggccctgcgccgccaggcacttctttccggggctcctagggacgccagaaggaagtcaacctctgctgcttctccttggcctgcgttggaccttcctttttttgttgtttttttttgtttttcccctttcttccttttgaattaactggcttcttggctggatgttttcaacttctttcctggctgcgaacttttccccaattgttttccttttacaacagggggagaaagtgctctgtggtccgaggcgagccgtgaagttgcgtgtgcgtggcagtgtgcgtggcaggatgtgcgtgcgtgtgtaacccgagccgcccgatctgtttcgatctgcgccgcggagccctccctcaaggcccgctccacctgctgcggttacgcggcgctcgtgggtgttcgtgcctcggagcagctaaccggcgggtgctgggcgacggtggaggagtatcgtctcgctgctgcccgagtcagggctgagtcacccagctgatgtagacagtggctgccttccgaagagtgcgtgtttgcatgtgtgtgactctgcggctgctcaactcccaacaaaccagaggaccagccacaaacttaaccaacatccccaaacccgagttcacagatgtgggagagctgtagaaccctgagtgtcatcgactgggccttcttatgattgttgttttaagattagctgaagatctctgaaacgctgaattttctgcactgagcgttttgacagaattcattgagagaacagagaacatgacaagtacttctagctcagcactgctccaactactgaagctgattttcaaggctacttaaaaaaatctgcagcgtacattaatggatttctgttgtgtttaaattctccacagattgtattgtaaatattttatgaagtagagcatatgtatatatttatatatacgtgcacatacattagtagcactacctttggaagtctcagctcttgcttttcgggactgaagccagttttgcatgataaaagtggccttgttacgggagataattgtgttctgttgggactttagacaaaactcacctgcaaaaaactgacaggcattaactactggaacttccaaataatgtgtttgctgatcgttttactcttcgcataaatattttaggaagtgtatgagaattttgccttcaggaacttttctaacagccaaagacagaacttaacctctgcaagcaagattcgtggaagatagtctccactttttaatgcactaagcaatcggttgctaggagcccatcctgggtcagaggccgatccgcagaaccagaacgttttcccctcctggactgttagtaacttagtctccctcctcccctaaccacccccgcccccccccaccccccgcagtaataaaggcccctgaacgtgtatgttggtctcccgggagctgcttgctgaagatccgcgcccctgtcgccgtctggtaggagctgtttgcagggtcctaactcaatcggcttgttgtgatgcgtatccccgtagatgccagcacgagccgccgcttcacgccgccttccaccgcgctgagcccaggcaagatgagcgaggcgttgccgctgggcgccccggacgccggcgctgccctggccggcaagctgaggagcggcgaccgcagcatggtggaggtgctggccgaccacccgggcgagctggtgcgcaccgacagccccaacttcctctgctccgtgctgcctacgcactggcgctgcaacaagaccctgcccatcgctttcaaggtggtggccctaggggatgttccagatggcactctggtcactgtgatggctggcaatgatgaaaactactcggctgagctgagaaatgctaccgcagccatgaagaaccaggttgcaagatttaatgacctcaggtttgtcggtcgaagtggaagagggaaaagcttcactctgaccatcactgtcttcacaaacccaccgcaagtcgccacctaccacagagccatcaaaatcacagtggatgggccccgagaacctcgaagacatcggcagaaactagatgatcagaccaagcccgggagcttgtccttttccgagcggctcagtgaactggagcagctgcggcgcacagccatgagggtcagcccacaccacccagcccccacgcccaaccctcgtgcctccctgaaccactccactgcctttaaccctcagcctcagagtcagatgcaggatacaaggcagatccaaccatccccaccgtggtcctacgatcagtcctaccaatacctgggatccattgcctctccttctgtgcacccagcaacgcccatttcacctggacgtgccagcggcatgacaaccctctctgcagaactttccagtcgactctcaaacagttgtgattacttcaggtttcaccagatgccttagctgctgttcagagcttcacagaatgccttctaagagcttcacaacggcagtactattgacatttggggccaaataattctttgttggggggggtctgtcctgagcatcggagaatatttagcagcatccttggcctctagatgccaatagcatccccctcaccccagttaggacaataaaaaatgtttccagacattgccaaatttcccaaggggcaaaactgtccccaggtgagaaccactgccttccagtgttcttgggtggtacagtaaaataggaaaaccaacttaa

SEQ ID NO: 442508 - DNA, 689 bp, Homo sapiens
ggaaaggggaacagttaaatttgtaatttgggttgtgtgaaaacttctttgggcctcataaacaaccacagaaccacaagttgggtagcctggcagtgtcagaagtctgaacccagcatagtggtcagcaggcaggacgaatcacactgaatgcaaaccacagggtttcgcagcgtggtgagcatcaccaacccacagccaaggcggcgctggctttttttttttttttaatctttaacaatttgaatatttgtttttacaaaggtgcattttttaatagggcttggggagtcccagaggtatccagcagaggggagaagaaagagagatgtagggctagaggggtgaggctgaaacagtgacctgtcttggttttcgctccgaaggtgtaaaagaaatcattgagtcccccgccttcagaagagggtgcattttcaggaggaagcgatggcttcagacagcatatttgagtcatttccttcgtacccacagtgcttcatgagagctctaagagactctgcgaagagacacattgctttggaggaatcagccccaggccaaagcaacaagcaacaccagagtcctgcggagagctgagaagcaactcgcccactcagacatagcccatcgtttgtctaactgttagcattctgctctaatccaatctgcatgcctcttgctccattccc

SEQ ID NO: 442509 - DNA, 172 bp, Homo sapiens
atcaaattatagcagattagggggcaggcacaggggcagtggagtcatgtctgccattttaaatgttgtgtaatgttgtgttttccagacagttgtgattacttcaggtttcaccagatgccttagctgctgttcagagcttcacagaatgccttctaagagcttcacaacg

SEQ ID NO: 442510 - DNA, 6222 bp, Homo sapiens
ggaaaggggaacagttaaatttgtaatttgggttgtgtgaaaacttctttgggcctcataaacaaccacagaaccacaagttgggtagcctggcagtgtcagaagtctgaacccagcatagtggtcagcaggcaggacgaatcacactgaatgcaaaccacagggtttcgcagcgtggtgagcatcaccaacccacagccaaggcggcgctggctttttttttttttttaatctttaacaatttgaatatttgtttttacaaaggtgcattttttaatagggcttggggagtcccagaggtatccagcagaggggagaagaaagagagatgtagggctagaggggtgaggctgaaacagtgacctgtcttggttttcgctccgaaggtgtaaaagaaatcattgagtcccccgccttcagaagagggtgcattttcaggaggaagcgatggcttcagacagcatatttgagtcatttccttcgtacccacagtgcttcatgagagaatgcatacttggaatgaatccttctagagacgtccacgatgccagcacgagccgccgcttcacgccgccttccaccgcgctgagcccaggcaagatgagcgaggcgttgccgctgggcgccccggacgccggcgctgccctggccggcaagctgaggagcggcgaccgcagcatggtggaggtgctggccgaccacccgggcgagctggtgcgcaccgacagccccaacttcctctgctccgtgctgcctacgcactggcgctgcaacaagaccctgcccatcgctttcaaggtggtggccctaggggatgttccagatggcactctggtcactgtgatggctggcaatgatgaaaactactcggctgagctgagaaatgctaccgcagccatgaagaaccaggttgcaagatttaatgacctcaggtttgtcggtcgaagtggaagagggaaaagcttcactctgaccatcactgtcttcacaaacccaccgcaagtcgccacctaccacagagccatcaaaatcacagtggatgggccccgagaacctcgaagacatcggcagaaactagatgatcagaccaagcccgggagcttgtccttttccgagcggctcagtgaactggagcagctgcggcgcacagccatgagggtcagcccacaccacccagcccccacgcccaaccctcgtgcctccctgaaccactccactgcctttaaccctcagcctcagagtcagatgcaggatacaaggcagatccaaccatccccaccgtggtcctacgatcagtcctaccaatacctgggatccattgcctctccttctgtgcacccagcaacgcccatttcacctggacgtgccagcggcatgacaaccctctctgcagaactttccagtcgactctcaacggcacccgacctgacagcgttcagcgacccgcgccagttccccgcgctgccctccatctccgacccccgcatgcactatccaggcgccttcacctactccccgacgccggtcacctcgggcatcggcatcggcatgtcggccatgggctcggccacgcgctaccacacctacctgccgccgccctaccccggctcgtcgcaagcgcagggaggcccgttccaagccagctcgccctcctaccacctgtactacggcgcctcggccggctcctaccagttctccatggtgggcggcgagcgctcgccgccgcgcatcctgccgccctgcaccaacgcctccaccggctccgcgctgctcaaccccagcctcccgaaccagagcgacgtggtggaggccgagggcagccacagcaactcccccaccaacatggcgccctccgcgcgcctggaggaggccgtgtggaggccctactgaggcgccaggcctggcccggctgggccacgcgggccgccgccttcgcctccgggcgcgcgggcctcctgttcgcgacaagcccgccgggatcccgggccctgggcccggccaccgtcctggggccgagggcgcccgacggccaggatctcgctgtaggtcaggcccgcgcagcctcctgcgcccagaagcccacgccgccgccgtctgctggcgccccggccctcgcggaggtgtccgaggcgacgcacctcgagggtgtccgccggccccagcacccaggggacgcgctggaaagcaaacaggaagattcccggagggaaactgtgaatgcttctgatttagcaatgctgtgaataaaaagaaagattttatacccttgacttaactttttaaccaagttgtttattccaaagagtgtggaattttggttggggtggggggagaggagggatgcaactcgccctgtttggcatctaattcttatttttaatttttccgcaccttatcaattgcaaaatgcgtatttgcatttgggtggtttttatttttatatacgtttatataaatatatataaattgagcttgcttctttcttgctttgaccatggaaagaaatatgattcccttttctttaagttttatttaacttttcttttggacttttgggtagttgtttttttttgttttgttttgtttttttgagaaacagctacagctttgggtcatttttaactactgtattcccacaaggaatccccagatatttatgtatcttgatgttcagacatttatgtgttgataattttttaattatttaaatgtacttatattaagaaaaatatcaagtactacattttcttttgttcttgatagtagccaaagttaaatgtatcacattgaagaaggctagaaaaaaagaatgagtaatgtgatcgcttggttatccagaagtattgtttacattaaactccctttcatgttaatcaaacaagtgagtagctcacgcagcaacgtttttaataggatttttagacactgagggtcactccaaggatcagaagtatggaattttctgccaggctcaacaagggtctcatatctaacttcctccttaaaacagagaaggtcaatctagttccagagggttgaggcaggtgccaataattacatctttggagaggatttgatttctgcccagggatttgctcaccccaaggtcatctgataatttcacagatgctgtgtaacagaacacagccaaagtaaactgtgtaggggagccacatttacataggaaccaaatcaatgaatttaggggttacgattatagcaatttaagggcccaccagaagcaggcctcgaggagtcaatttgcctctgtgtgcctcagtggagacaagtgggaaaacatggtcccacctgtgcgagaccccctgtcctgtgctgctcactcaacaacatctttgtgttgctttcaccaggctgagaccctaccctatggggtatatgggcttttacctgtgcaccagtgtgacaggaaagattcatgtcactactgtccgtggctacaattcaaaggtatccaatgtcgctgtaaattttatggcactatttttattggaggatttggtcagaatgcagttgttgtacaactcataaatactaactgctgattttgacacatgtgtgctccaaatgatctggtggttatttaacgtacctcttaaaattcgttgaaacgatttcaggtcaactctgaagagtatttgaaagcaggacttcagaacagtgtttgatttttattttataaatttaagcattcaaattaggcaaatctttggctgcaggcagcaaaaacagctggacttatttaaaacaacttgtttttgagttttcttatatatatattgattatttgttttacacacatgcagtagcactttggtaagagttaaagagtaaagcagcttatgttgtcaggtcgttcttatctagagaagagctatagcagatctcggacaaactcagaatatattcactttcatttttgacaggattccctccacaactcagtttcatatattattccgtattacatttttgcagctaaattaccataaaatgtcagcaaatgtaaaaatttaatttctgaaaagcaccattagcccatttcccccaaattaaacgtaaatgttttttttcagcacatgttaccatgtctgacctgcaaaaatgctggagaaaaatgaaggaaaaaattatgtttttcagtttaattctgttaactgaagatattccaactcaaaaccagcctcatgctctgattagataatcttttacattgaacctttactctcaaagccatgtgtggagggggcttgtcactattgtaggctcactggattggtcatttagagtttcacagactcttaccagcatatatagtatttaattgtttcaaaaaaaatcaaactgtagttgttttggcgataggtctcacgcaacacatttttgtatgtgtgtgtgtgtgcgtgtgtgtgtgtgtgtgtgaaaaattgcattcattgacttcaggtagattaaggtatctttttattcattgccctcaggaaagttaaggtatcaatgagacccttaagccaatcatgtaataactgcatgtgtctggtccaggagaagtattgaataagccatttctactgcttactcatgtccctatttatgatttcaacatggatacatatttcagttctttctttttctcactatctgaaaatacatttccctccctctcttccccccaatatctccctttttttctctcttcctctatcttccaaaccccactttctccctcctccttttcctgtgttctcttaagcagatagcacatacccccacccagtaccaaatttcagaacacaagaaggtccagttcttcccccttcacataaaggaacatggtttgtcagcctttctcctgtttatgggtttcttccagcagaacagagacattgccaaccatattggatctgcttgctgtccaaaccagcaaactttcctgggcaaatcacaatcagtgagtaaatagacagcctttctgctgccttgggtttctgtgcagataaacagaaatgctctgattagaaaggaaatgaatggttccactcaaatgtcctgcaatttaggattgcagatttctgccttgaaatacctgtttctttgggacattccgtcctgatgatttttatttttgttggtttttatttttggggggaatgacatgtttgggtcttttatacatgaaaatttgtttgacaataatctcacaaaacatattttacatctgaacaaaatgcctttttgtttaccgtagcgtatacatttgttttgggatttttgtgtgtttgttgggaattttgtttttagccaggtcagtattgatgaggctgatcatttggctctttttttccttccagaagagttgcatcaacaaagttaattgtatttatgtatgtaaatagattttaagcttcattataaaatattgttaatgcctataactttttttcaatttttttgtgtgtgtttctaaggactttttcttaggtttgctaaatactgtagggaaaaaaatgcttctttctactttgtttattttagactttaaaatgagctacttcttattcacttttgtaaacagctaatagcatggttccaattttttttaagttcactttttttgttctaggggaaatgaatgtgcaaaaaaagaaaaagaactgttggttatttgtgttattctggatgtataaaaatcaatggaaaaaaataaactttcaaattgaaatgacggtataacacatctactgaaaaagcaacgggaaatgtggtcctatttaagccagcccccacctagggtctatttgtgtggcagttattgggtttggtcacaaaacatcctgaaaattcgtgcgtgggcttctttctccctggtacaaacgtatggaatgcttcttaaaggggaactgtcaagctggtgtcttcagccagatgacatgagagaatatcccagaaccctctctccaaggtgtttctagatagcacaggagagcaggcactgcactgtccacagtccacggtacacagtcgggtgggccgcctcccctctcctgggagcattcgtcgtgcccagcctgagcagggcagctggactgctgctgttcaggagccaccagagccttcctctctttgtaccacagtttcttctgtaaatccagtgttacaatcagtgtgaatggcaaataaacagtttgacaagtacatacacca

SEQ ID NO: 442511 - DNA, 4085 bp, Homo sapiens
ctacaaggcccgggagcaagccgcgtggctgctttcaactttccttccagccgcgcgttcttggggtctttcctgactaggaaactcctcgctggccgctgacgcacgcagcaagtgagacgcgcggagggatcgagccgcggcccgggcgcagcggtaaaaaacacccattacagaaaccgacccaagggaagacgctgagagcaaacggcacgcgcggacgccgtccggcctcatgcaaggaatcagcgccgcttcgccgcagctgccagccggacggtgcaggagcgcggagtggctcccccgggccccgcggccaaatcgcacccccgccctggaagcggaggcctggccctgggcggccgcgcaggatctggggccgtccgcgggctgcagccccggttcgggagcctcgtggcggccactgcgcctgcctgcagcggctcgcggggccgggcctctccgggtgcggcgcgccggccgggtcctcctcgggccggcggggcctgctttctttttccaggtctccggaccgtggccactcgcggagccgcacaagcctgcgtgtggctgcggaaaggggtccgcacgcgggcggggccccgggccagcatgcaggcttggatgcggggcgcgggggtggcctccgactccccgcccgggctgcgtacagtagcgcgcggcgcggcggcgggggcgcgcgggccaattccaggagccggcggcggcgagccgcgccctggctgataccggaaaggcctgtgattggccgccggccgcccctatgcaaacgagctgagggaatggaattcctccggccgggcttacagtaaaagcacgttcatttccaggcactctcattcatagagccagcgggcgcgggcgggacgggcgccccgcggccggacccagccagggcaccacgctgcccggccctgcgccgccaggcacttctttccggggctcctagggacgccagaaggaagtcaacctctgctgcttctccttggcctgcgttggaccttcctttttttgttgtttttttttgtttttcccctttcttccttttgaattaactggcttcttggctggatgttttcaacttctttcctggctgcgaacttttccccaattgttttccttttacaacagggggagaaagtgctctgtggtccgaggcgagccgtgaagttgcgtgtgcgtggcagtgtgcgtggcaggatgtgcgtgcgtgtgtaacccgagccgcccgatctgtttcgatctgcgccgcggagccctccctcaaggcccgctccacctgctgcggttacgcggcgctcgtgggtgttcgtgcctcggagcagctaaccggcgggtgctgggcgacggtggaggagtatcgtctcgctgctgcccgagtcagggctgagtcacccagctgatgtagacagtggctgccttccgaagagtgcgtgtttgcatgtgtgtgactctgcggctgctcaactcccaacaaaccagaggaccagccacaaacttaaccaacatccccaaacccgagttcacagatgtgggagagctgtagaaccctgagtgtcatcgactgggccttcttatgattgttgttttaagattagctgaagatctctgaaacgctgaattttctgcactgagcgttttgacagaattcattgagagaacagagaacatgacaagtacttctagctcagcactgctccaactactgaagctgattttcaaggctacttaaaaaaatctgcagcgtacattaatggatttctgttgtgtttaaattctccacagattgtattgtaaatattttatgaagtagagcatatgtatatatttatatatacgtgcacatacattagtagcactacctttggaagtctcagctcttgcttttcgggactgaagccagttttgcatgataaaagtggccttgttacgggagataattgtgttctgttgggactttagacaaaactcacctgcaaaaaactgacaggcattaactactggaacttccaaataatgtgtttgctgatcgttttactcttcgcataaatattttaggaagtgtatgagaattttgccttcaggaacttttctaacagccaaagacagaacttaacctctgcaagcaagattcgtggaagatagtctccactttttaatgcactaagcaatcggttgctaggagcccatcctgggtcagaggccgatccgcagaaccagaacgttttcccctcctggactgttagtaacttagtctccctcctcccctaaccacccccgcccccccccaccccccgcagtaataaaggcccctgaacgtgtatgttggtctcccgggagctgcttgctgaagatccgcgcccctgtcgccgtctggtaggagctgtttgcagggtcctaactcaatcggcttgttgtgatgcgtatccccgtagatgccagcacgagccgccgcttcacgccgccttccaccgcgctgagcccaggcaagatgagcgaggcgttgccgctgggcgccccggacgccggcgctgccctggccggcaagctgaggagcggcgaccgcagcatggtggaggtgctggccgaccacccgggcgagctggtgcgcaccgacagccccaacttcctctgctccgtgctgcctacgcactggcgctgcaacaagaccctgcccatcgctttcaaggtggtggccctaggggatgttccagatggcactctggtcactgtgatggctggcaatgatgaaaactactcggctgagctgagaaatgctaccgcagccatgaagaaccaggttgcaagatttaatgacctcaggtttgtcggtcgaagtggaagagggaaaagcttcactctgaccatcactgtcttcacaaacccaccgcaagtcgccacctaccacagagccatcaaaatcacagtggatgggccccgagaacctcgaagacatcggcagaaactagatgatcagaccaagcccgggagcttgtccttttccgagcggctcagtgaactggagcagctgcggcgcacagccatgagggtcagcccacaccacccagcccccacgcccaaccctcgtgcctccctgaaccactccactgcctttaaccctcagcctcagagtcagatgcaggatacaaggcagatccaaccatccccaccgtggtcctacgatcagtcctaccaatacctgggatccattgcctctccttctgtgcacccagcaacgcccatttcacctggacgtgccagcggcatgacaaccctctctgcagaactttccagtcgactctcaacggcacccgacctgacagcgttcagcgacccgcgccagttccccgcgctgccctccatctccgacccccgcatgcactatccaggcgccttcacctactccccgacgccggtcacctcgggcatcggcatcggcatgtcggccatgggctcggccacgcgctaccacacctacctgccgccgccctaccccggctcgtcgcaagcgcagggaggcccgttccaagccagctcgccctcctaccacctgtactacggcgcctcggccggctcctaccagttctccatggtgggcggcgagcgctcgccgccgcgcatcctgccgccctgcaccaacgcctccaccggctccgcgctgctcaaccccagcctcccgaaccagagcgacgtggtggaggccgagggcagccacagcaactcccccaccaacatgggcgcgggcctcctgttcgcgacaagcccgccgggatcccgggccctgggcccggccaccgtcctggggccgagggcgcccgacggccaggatctcgctgtaggtcaggcccgcgcagcctcctgcgcccagaagcccacgccgccgccgtctgctggcgccccggccctcgcggaggtgtccgaggcgacgcacctcgagggtgtccgccggccccagcacccaggggacgcgctggaaagcaaacaggaagattcccggagggaaactgtgaatgcttctgatttagcaatgctgtgaataaaaagaaagattttatacccttgac

SEQ ID NO: 442512 - DNA, 3326 bp, Homo sapiens
ctacaaggcccgggagcaagccgcgtggctgctttcaactttccttccagccgcgcgttcttggggtctttcctgactaggaaactcctcgctggccgctgacgcacgcagcaagtgagacgcgcggagggatcgagccgcggcccgggcgcagcggtaaaaaacacccattacagaaaccgacccaagggaagacgctgagagcaaacggcacgcgcggacgccgtccggcctcatgcaaggaatcagcgccgcttcgccgcagctgccagccggacggtgcaggagcgcggagtggctcccccgggccccgcggccaaatcgcacccccgccctggaagcggaggcctggccctgggcggccgcgcaggatctggggccgtccgcgggctgcagccccggttcgggagcctcgtggcggccactgcgcctgcctgcagcggctcgcggggccgggcctctccgggtgcggcgcgccggccgggtcctcctcgggccggcggggcctgctttctttttccaggtctccggaccgtggccactcgcggagccgcacaagcctgcgtgtggctgcggaaaggggtccgcacgcgggcggggccccgggccagcatgcaggcttggatgcggggcgcgggggtggcctccgactccccgcccgggctgcgtacagtagcgcgcggcgcggcggcgggggcgcgcgggccaattccaggagccggcggcggcgagccgcgccctggctgataccggaaaggcctgtgattggccgccggccgcccctatgcaaacgagctgagggaatggaattcctccggccgggcttacagtaaaagcacgttcatttccaggcactctcattcatagagccagcgggcgcgggcgggacgggcgccccgcggccggacccagccagggcaccacgctgcccggccctgcgccgccaggcacttctttccggggctcctagggacgccagaaggaagtcaacctctgctgcttctccttggcctgcgttggaccttcctttttttgttgtttttttttgtttttcccctttcttccttttgaattaactggcttcttggctggatgttttcaacttctttcctggctgcgaacttttccccaattgttttccttttacaacagggggagaaagtgctctgtggtccgaggcgagccgtgaagttgcgtgtgcgtggcagtgtgcgtggcaggatgtgcgtgcgtgtgtaacccgagccgcccgatctgtttcgatctgcgccgcggagccctccctcaaggcccgctccacctgctgcggttacgcggcgctcgtgggtgttcgtgcctcggagcagctaaccggcgggtgctgggcgacggtggaggagtatcgtctcgctgctgcccgagtcagggctgagtcacccagctgatgtagacagtggctgccttccgaagagtgcgtgtttgcatgtgtgtgactctgcggctgctcaactcccaacaaaccagaggaccagccacaaacttaaccaacatccccaaacccgagttcacagatgtgggagagctgtagaaccctgagtgtcatcgactgggccttcttatgattgttgttttaagattagctgaagatctctgaaacgctgaattttctgcactgagcgttttgacagaattcattgagagaacagagaacatgacaagtacttctagctcagcactgctccaactactgaagctgattttcaaggctacttaaaaaaatctgcagcgtacattaatggatttctgttgtgtttaaattctccacagattgtattgtaaatattttatgaagtagagcatatgtatatatttatatatacgtgcacatacattagtagcactacctttggaagtctcagctcttgcttttcgggactgaagccagttttgcatgataaaagtggccttgttacgggagataattgtgttctgttgggactttagacaaaactcacctgcaaaaaactgacaggcattaactactggaacttccaaataatgtgtttgctgatcgttttactcttcgcataaatattttaggaagtgtatgagaattttgccttcaggaacttttctaacagccaaagacagaacttaacctctgcaagcaagattcgtggaagatagtctccactttttaatgcactaagcaatcggttgctaggagcccatcctgggtcagaggccgatccgcagaaccagaacgttttcccctcctggactgttagtaacttagtctccctcctcccctaaccacccccgcccccccccaccccccgcagtaataaaggcccctgaacgtgtatgttggtctcccgggagctgcttgctgaagatccgcgcccctgtcgccgtctggtaggagctgtttgcagggtcctaactcaatcggcttgttgtgatgcgtatccccgtagatgccagcacgagccgccgcttcacgccgccttccaccgcgctgagcccaggcaagatgagcgaggcgttgccgctgggcgccccggacgccggcgctgccctggccggcaagctgaggagcggcgaccgcagcatggtggaggtgctggccgaccacccgggcgagctggtgcgcaccgacagccccaacttcctctgctccgtgctgcctacgcactggcgctgcaacaagaccctgcccatcgctttcaaggtggtggccctaggggatgttccagatggcactctggtcactgtgatggctggcaatgatgaaaactactcggctgagctgagaaatgctaccgcagccatgaagaaccaggttgcaagatttaatgacctcaggtttgtcggtcgaagtggaagagggaaaagcttcactctgaccatcactgtcttcacaaacccaccgcaagtcgccacctaccacagagccatcaaaatcacagtggatgggccccgagaacctcgaagacatcggcagaaactagatgatcagaccaagcccgggagcttgtccttttccgagcggctcagtgaactggagcagctgcggcgcacagccatgagggtcagcccacaccacccagcccccacgcccaaccctcgtgcctccctgaaccactccactgcctttaaccctcagcctcagagtcagatgcaggatacaaggcagatccaaccatccccaccgtggtcctacgatcagtcctaatgcagggtcgggcagtggttttaatggaggctttggctcaagcatggattctaagtcttctggctggggaatgtagacagtggggttgtggttggttggtatagaatggtgg

SEQ ID NO: 442513 - DNA, 6098 bp, Homo sapiens
ggaaaggggaacagttaaatttgtaatttgggttgtgtgaaaacttctttgggcctcataaacaaccacagaaccacaagttgggtagcctggcagtgtcagaagtctgaacccagcatagtggtcagcaggcaggacgaatcacactgaatgcaaaccacagggtttcgcagcgtggtgagcatcaccaacccacagccaaggcggcgctggctttttttttttttttaatctttaacaatttgaatatttgtttttacaaaggtaaaagaaatcattgagtcccccgccttcagaagagggtgcattttcaggaggaagcgatggcttcagacagcatatttgagtcatttccttcgtacccacagtgcttcatgagagaatgcatacttggaatgaatccttctagagacgtccacgatgccagcacgagccgccgcttcacgccgccttccaccgcgctgagcccaggcaagatgagcgaggcgttgccgctgggcgccccggacgccggcgctgccctggccggcaagctgaggagcggcgaccgcagcatggtggaggtgctggccgaccacccgggcgagctggtgcgcaccgacagccccaacttcctctgctccgtgctgcctacgcactggcgctgcaacaagaccctgcccatcgctttcaaggtggtggccctaggggatgttccagatggcactctggtcactgtgatggctggcaatgatgaaaactactcggctgagctgagaaatgctaccgcagccatgaagaaccaggttgcaagatttaatgacctcaggtttgtcggtcgaagtggaagagggaaaagcttcactctgaccatcactgtcttcacaaacccaccgcaagtcgccacctaccacagagccatcaaaatcacagtggatgggccccgagaacctcgaagacatcggcagaaactagatgatcagaccaagcccgggagcttgtccttttccgagcggctcagtgaactggagcagctgcggcgcacagccatgagggtcagcccacaccacccagcccccacgcccaaccctcgtgcctccctgaaccactccactgcctttaaccctcagcctcagagtcagatgcaggatacaaggcagatccaaccatccccaccgtggtcctacgatcagtcctaccaatacctgggatccattgcctctccttctgtgcacccagcaacgcccatttcacctggacgtgccagcggcatgacaaccctctctgcagaactttccagtcgactctcaacggcacccgacctgacagcgttcagcgacccgcgccagttccccgcgctgccctccatctccgacccccgcatgcactatccaggcgccttcacctactccccgacgccggtcacctcgggcatcggcatcggcatgtcggccatgggctcggccacgcgctaccacacctacctgccgccgccctaccccggctcgtcgcaagcgcagggaggcccgttccaagccagctcgccctcctaccacctgtactacggcgcctcggccggctcctaccagttctccatggtgggcggcgagcgctcgccgccgcgcatcctgccgccctgcaccaacgcctccaccggctccgcgctgctcaaccccagcctcccgaaccagagcgacgtggtggaggccgagggcagccacagcaactcccccaccaacatggcgccctccgcgcgcctggaggaggccgtgtggaggccctactgaggcgccaggcctggcccggctgggccacgcgggccgccgccttcgcctccgggcgcgcgggcctcctgttcgcgacaagcccgccgggatcccgggccctgggcccggccaccgtcctggggccgagggcgcccgacggccaggatctcgctgtaggtcaggcccgcgcagcctcctgcgcccagaagcccacgccgccgccgtctgctggcgccccggccctcgcggaggtgtccgaggcgacgcacctcgagggtgtccgccggccccagcacccaggggacgcgctggaaagcaaacaggaagattcccggagggaaactgtgaatgcttctgatttagcaatgctgtgaataaaaagaaagattttatacccttgacttaactttttaaccaagttgtttattccaaagagtgtggaattttggttggggtggggggagaggagggatgcaactcgccctgtttggcatctaattcttatttttaatttttccgcaccttatcaattgcaaaatgcgtatttgcatttgggtggtttttatttttatatacgtttatataaatatatataaattgagcttgcttctttcttgctttgaccatggaaagaaatatgattcccttttctttaagttttatttaacttttcttttggacttttgggtagttgtttttttttgttttgttttgtttttttgagaaacagctacagctttgggtcatttttaactactgtattcccacaaggaatccccagatatttatgtatcttgatgttcagacatttatgtgttgataattttttaattatttaaatgtacttatattaagaaaaatatcaagtactacattttcttttgttcttgatagtagccaaagttaaatgtatcacattgaagaaggctagaaaaaaagaatgagtaatgtgatcgcttggttatccagaagtattgtttacattaaactccctttcatgttaatcaaacaagtgagtagctcacgcagcaacgtttttaataggatttttagacactgagggtcactccaaggatcagaagtatggaattttctgccaggctcaacaagggtctcatatctaacttcctccttaaaacagagaaggtcaatctagttccagagggttgaggcaggtgccaataattacatctttggagaggatttgatttctgcccagggatttgctcaccccaaggtcatctgataatttcacagatgctgtgtaacagaacacagccaaagtaaactgtgtaggggagccacatttacataggaaccaaatcaatgaatttaggggttacgattatagcaatttaagggcccaccagaagcaggcctcgaggagtcaatttgcctctgtgtgcctcagtggagacaagtgggaaaacatggtcccacctgtgcgagaccccctgtcctgtgctgctcactcaacaacatctttgtgttgctttcaccaggctgagaccctaccctatggggtatatgggcttttacctgtgcaccagtgtgacaggaaagattcatgtcactactgtccgtggctacaattcaaaggtatccaatgtcgctgtaaattttatggcactatttttattggaggatttggtcagaatgcagttgttgtacaactcataaatactaactgctgattttgacacatgtgtgctccaaatgatctggtggttatttaacgtacctcttaaaattcgttgaaacgatttcaggtcaactctgaagagtatttgaaagcaggacttcagaacagtgtttgatttttattttataaatttaagcattcaaattaggcaaatctttggctgcaggcagcaaaaacagctggacttatttaaaacaacttgtttttgagttttcttatatatatattgattatttgttttacacacatgcagtagcactttggtaagagttaaagagtaaagcagcttatgttgtcaggtcgttcttatctagagaagagctatagcagatctcggacaaactcagaatatattcactttcatttttgacaggattccctccacaactcagtttcatatattattccgtattacatttttgcagctaaattaccataaaatgtcagcaaatgtaaaaatttaatttctgaaaagcaccattagcccatttcccccaaattaaacgtaaatgttttttttcagcacatgttaccatgtctgacctgcaaaaatgctggagaaaaatgaaggaaaaaattatgtttttcagtttaattctgttaactgaagatattccaactcaaaaccagcctcatgctctgattagataatcttttacattgaacctttactctcaaagccatgtgtggagggggcttgtcactattgtaggctcactggattggtcatttagagtttcacagactcttaccagcatatatagtatttaattgtttcaaaaaaaatcaaactgtagttgttttggcgataggtctcacgcaacacatttttgtatgtgtgtgtgtgtgcgtgtgtgtgtgtgtgtgtgaaaaattgcattcattgacttcaggtagattaaggtatctttttattcattgccctcaggaaagttaaggtatcaatgagacccttaagccaatcatgtaataactgcatgtgtctggtccaggagaagtattgaataagccatttctactgcttactcatgtccctatttatgatttcaacatggatacatatttcagttctttctttttctcactatctgaaaatacatttccctccctctcttccccccaatatctccctttttttctctcttcctctatcttccaaaccccactttctccctcctccttttcctgtgttctcttaagcagatagcacatacccccacccagtaccaaatttcagaacacaagaaggtccagttcttcccccttcacataaaggaacatggtttgtcagcctttctcctgtttatgggtttcttccagcagaacagagacattgccaaccatattggatctgcttgctgtccaaaccagcaaactttcctgggcaaatcacaatcagtgagtaaatagacagcctttctgctgccttgggtttctgtgcagataaacagaaatgctctgattagaaaggaaatgaatggttccactcaaatgtcctgcaatttaggattgcagatttctgccttgaaatacctgtttctttgggacattccgtcctgatgatttttatttttgttggtttttatttttggggggaatgacatgtttgggtcttttatacatgaaaatttgtttgacaataatctcacaaaacatattttacatctgaacaaaatgcctttttgtttaccgtagcgtatacatttgttttgggatttttgtgtgtttgttgggaattttgtttttagccaggtcagtattgatgaggctgatcatttggctctttttttccttccagaagagttgcatcaacaaagttaattgtatttatgtatgtaaatagattttaagcttcattataaaatattgttaatgcctataactttttttcaatttttttgtgtgtgtttctaaggactttttcttaggtttgctaaatactgtagggaaaaaaatgcttctttctactttgtttattttagactttaaaatgagctacttcttattcacttttgtaaacagctaatagcatggttccaattttttttaagttcactttttttgttctaggggaaatgaatgtgcaaaaaaagaaaaagaactgttggttatttgtgttattctggatgtataaaaatcaatggaaaaaaataaactttcaaattgaaatgacggtataacacatctactgaaaaagcaacgggaaatgtggtcctatttaagccagcccccacctagggtctatttgtgtggcagttattgggtttggtcacaaaacatcctgaaaattcgtgcgtgggcttctttctccctggtacaaacgtatggaatgcttcttaaaggggaactgtcaagctggtgtcttcagccagatgacatgagagaatatcccagaaccctctctccaaggtgtttctagatagcacaggagagcaggcactgcactgtccacagtccacggtacacagtcgggtgggccgcctcccctctcctgggagcattcgtcgtgcccagcctgagcagggcagctggactgctgctgttcaggagccaccagagccttcctctctttgtaccacagtttcttctgtaaatccagtgttacaatcagtgtgaatggcaaataaacagtttgacaagtacatacacca

SEQ ID NO: 442514 - DNA, 5635 bp, Homo sapiens
ggaaaggggaacagttaaatttgtaatttgggttgtgtgaaaacttctttgggcctcataaacaaccacagaaccacaagttgggtagcctggcagtgtcagaagtctgaacccagcatagtggtcagcaggcaggacgaatcacactgaatgcaaaccacagggtttcgcagcgtggtgagcatcaccaacccacagccaaggcggcgctggctttttttttttttttaatctttaacaatttgaatatttgtttttacaaaggtaaaagaaatcattgagtcccccgccttcagaagagggtgcattttcaggaggaagcgatggcttcagacagcatatttgagtcatttccttcgtacccacagtgcttcatgagagaatgcatacttggaatgaatccttctagagacgtccacgatgccagcacgagccgccgcttcacgccgccttccaccgcgctgagcccaggcaagatgagcgaggcgttgccgctgggcgccccggacgccggcgctgccctggccggcaagctgaggagcggcgaccgcagcatggtggaggtgctggccgaccacccgggcgagctggtgcgcaccgacagccccaacttcctctgctccgtgctgcctacgcactggcgctgcaacaagaccctgcccatcgctttcaaggtggtggccctaggggatgttccagatggcactctggtcactgtgatggctggcaatgatgaaaactactcggctgagctgagaaatgctaccgcagccatgaagaaccaggttgcaagatttaatgacctcaggtttgtcggtcgaagtggaagagggaaaagcttcactctgaccatcactgtcttcacaaacccaccgcaagtcgccacctaccacagagccatcaaaatcacagtggatgggccccgagaacctcgaagacatcggcagaaactagatgatcagaccaagcccgggagcttgtccttttccgagcggctcagtgaactggagcagctgcggcgcacagccatgagggtcagcccacaccacccagcccccacgcccaaccctcgtgcctccctgaaccactccactgcctttaaccctcagcctcagagtcagatgcaggatacaaggcagatccaaccatccccaccgtggtcctacgatcagtcctaccaatacctgggatccattgcctctccttctgtgcacccagcaacgcccatttcacctggacgtgccagcggcatgacaaccctctctgcagaactttccagtcgactctcaacggcacccgacctgacagcgttcagcgacccgcgccagttccccgcgctgccctccatctccgacccccgcatgcactatccaggcgccttcacctactccccgacgccggtcacctcgggcatcggcatcggcatgtcggccatgggctcggccacgcgctaccacacctacctgccgccgccctaccccggctcgtcgcaagcgcagggaggcccgttccaagccagctcgccctcctaccacctgtactacggcgcctcggccggctcctaccagttctccatggtgggcggcgagcgctcgccgccgcgcatcctgccgccctgcaccaacgcctccaccggctccgcgctgctcaaccccagcctcccgaaccagagcgacgtggtggaggccgagggcagccacagcaactcccccaccaacatggcgccctccgcgcgcctggaggaggccgtgtggaggccctactgaggcgccaggcctggcccggctgggccacgcgggccgccgccttcgcctccgggcgcgcgggcctcctgttcgcgacaagcccgccgggatcccgggccctgggcccggccaccgtcctggggccgagggcgcccgacggccaggatctcgctgtaggtcaggcccgcgcagcctcctgcgcccagaagcccacgccgccgccgtctgctggcgccccggccctcgcggaggtgtccgaggcgacgcacctcgagggtgtccgccggccccagcacccaggggacgcgctggaaagcaaacaggaagattcccggagggaaactgtgaatgcttctgatttagcaatgctgtgaataaaaagaaagattttatacccttgacttaactttttaaccaagttgtttattccaaagagtgtggaattttggttggggtggggggagaggagggatgcaactcgccctgtttggcatctaattcttatttttaatttttccgcaccttatcaattgcaaaatgcgtatttgcatttgggtggtttttatttttatatacgtttatataaatatatataaattgagcttgcttctttcttgctttgaccatggaaagaaatatgattcccttttctttaagttttatttaacttttcttttggacttttgggtagttgtttttttttgttttgttttgtttttttgagaaacagctacagctttgggtcatttttaactactgtattcccacaaggaatccccagatatttatgtatcttgatgttcagacatttatgtgttgataattttttaattatttaaatgtacttatattaagaaaaatatcaagtactacattttcttttgttcttgatagtagccaaagttaaatgtatcacattgaagaaggctagaaaaaaagaatgagtaatgtgatcgcttggttatccagaagtattgtttacattaaactccctttcatgttaatcaaacaagtgagtagctcacgcagcaacgtttttaataggatttttagacactgagggtcactccaaggatcagaagtatggaattttctgccaggctcaacaagggtctcatatctaacttcctccttaaaacagagaaggtcaatctagttccagagggttgaggcaggtgccaataattacatctttggagaggatttgatttctgcccagggatttgctcaccccaaggtcatctgataatttcacagatgctgtgtaacagaacacagccaaagtaaactgtgtaggggagccacatttacataggaaccaaatcaatgaatttaggggttacgattatagcaatttaagggcccaccagaagcaggcctcgaggagtcaatttgcctctgtgtgcctcagtggagacaagtgggaaaacatggtcccacctgtgcgagaccccctgtcctgtgctgctcactcaacaacatctttgtgttgctttcaccaggctgagaccctaccctatggggtatatgggcttttacctgtgcaccagtgtgacaggaaagattcatgtcactactgtccgtggctacaattcaaaggtatccaatgtcgctgtaaattttatggcactatttttattggaggatttggtcagaatgcagttgttgtacaactcataaatactaactgctgattttgacacatgtgtgctccaaatgatctggtggttatttaacgtacctcttaaaattcgttgaaacgatttcaggtcaactctgaagagtatttgaaagcaggacttcagaacagtgtttgatttttattttataaatttaagcattcaaattaggcaaatctttggctgcaggcagcaaaaacagctggacttatttaaaacaacttgtttttgagttttcttatatatatattgattatttgttttacacacatgcagtagcactttggtaagagttaaagagtaaagcagcttatgttgtcaggtcgttcttatctagagaagagctatagcagatctcggacaaactcagaatatattcactttcatttttgacaggattccctccacaactcagtttcatatattattccgtattacatttttgcagctaaattaccataaaatgtcagcaaatgtaaaaatttaatttctgaaaagcaccattagcccatttcccccaaattaaacgtaaatgttttttttcagcacatgttaccatgtctgacctgcaaaaatgctggagaaaaatgaaggaaaaaattatgtttttcagtttaattctgttaactgaagatattccaactcaaaaccagcctcatgctctgattagataatcttttacattgaaccttttttttctctcttcctctatcttccaaaccccactttctccctcctccttttcctgtgttctcttaagcagatagcacatacccccacccagtaccaaatttcagaacacaagaaggtccagttcttcccccttcacataaaggaacatggtttgtcagcctttctcctgtttatgggtttcttccagcagaacagagacattgccaaccatattggatctgcttgctgtccaaaccagcaaactttcctgggcaaatcacaatcagtgagtaaatagacagcctttctgctgccttgggtttctgtgcagataaacagaaatgctctgattagaaaggaaatgaatggttccactcaaatgtcctgcaatttaggattgcagatttctgccttgaaatacctgtttctttgggacattccgtcctgatgatttttatttttgttggtttttatttttggggggaatgacatgtttgggtcttttatacatgaaaatttgtttgacaataatctcacaaaacatattttacatctgaacaaaatgcctttttgtttaccgtagcgtatacatttgttttgggatttttgtgtgtttgttgggaattttgtttttagccaggtcagtattgatgaggctgatcatttggctctttttttccttccagaagagttgcatcaacaaagttaattgtatttatgtatgtaaatagattttaagcttcattataaaatattgttaatgcctataactttttttcaatttttttgtgtgtgtttctaaggactttttcttaggtttgctaaatactgtagggaaaaaaatgcttctttctactttgtttattttagactttaaaatgagctacttcttattcacttttgtaaacagctaatagcatggttccaattttttttaagttcactttttttgttctaggggaaatgaatgtgcaaaaaaagaaaaagaactgttggttatttgtgttattctggatgtataaaaatcaatggaaaaaaataaactttcaaattgaaatgacggtataacacatctactgaaaaagcaacgggaaatgtggtcctatttaagccagcccccacctagggtctatttgtgtggcagttattgggtttggtcacaaaacatcctgaaaattcgtgcgtgggcttctttctccctggtacaaacgtatggaatgcttcttaaaggggaactgtcaagctggtgtcttcagccagatgacatgagagaatatcccagaaccctctctccaaggtgtttctagatagcacaggagagcaggcactgcactgtccacagtccacggtacacagtcgggtgggccgcctcccctctcctgggagcattcgtcgtgcccagcctgagcagggcagctggactgctgctgttcaggagccaccagagccttcctctctttgtaccacagtttcttctgtaaatccagtgttacaatcagtgtgaatggcaaataaacagtttgacaagtacatacacca

SEQ ID NO: 442515 - DNA, 5185 bp, Homo sapiens
tatcaggtgaaaatctccaagaatcagtctcttttgggggaaaataatccaacagaggcagatacttggacttgagtaggcttattaaaccctggtacataggccacatacatgtatgtgacatatttgaacaagggccactcatttcttattaaaagacattttttaaatcccaccccactttacatataattgacctttctgattctcttcagatacaaggcagatccaaccatccccaccgtggtcctacgatcagtcctaccaatacctgggatccattgcctctccttctgtgcacccagcaacgcccatttcacctggacgtgccagcggcatgacaaccctctctgcagaactttccagtcgactctcaacggcacccgacctgacagcgttcagcgacccgcgccagttccccgcgctgccctccatctccgacccccgcatgcactatccaggcgccttcacctactccccgacgccggtcacctcgggcatcggcatcggcatgtcggccatgggctcggccacgcgctaccacacctacctgccgccgccctaccccggctcgtcgcaagcgcagggaggcccgttccaagccagctcgccctcctaccacctgtactacggcgcctcggccggctcctaccagttctccatggtgggcggcgagcgctcgccgccgcgcatcctgccgccctgcaccaacgcctccaccggctccgcgctgctcaaccccagcctcccgaaccagagcgacgtggtggaggccgagggcagccacagcaactcccccaccaacatggcgccctccgcgcgcctggaggaggccgtgtggaggccctactgaggcgccaggcctggcccggctgggccacgcgggccgccgccttcgcctccgggcgcgcgggcctcctgttcgcgacaagcccgccgggatcccgggccctgggcccggccaccgtcctggggccgagggcgcccgacggccaggatctcgctgtaggtcaggcccgcgcagcctcctgcgcccagaagcccacgccgccgccgtctgctggcgccccggccctcgcggaggtgtccgaggcgacgcacctcgagggtgtccgccggccccagcacccaggggacgcgctggaaagcaaacaggaagattcccggagggaaactgtgaatgcttctgatttagcaatgctgtgaataaaaagaaagattttatacccttgacttaactttttaaccaagttgtttattccaaagagtgtggaattttggttggggtggggggagaggagggatgcaactcgccctgtttggcatctaattcttatttttaatttttccgcaccttatcaattgcaaaatgcgtatttgcatttgggtggtttttatttttatatacgtttatataaatatatataaattgagcttgcttctttcttgctttgaccatggaaagaaatatgattcccttttctttaagttttatttaacttttcttttggacttttgggtagttgtttttttttgttttgttttgtttttttgagaaacagctacagctttgggtcatttttaactactgtattcccacaaggaatccccagatatttatgtatcttgatgttcagacatttatgtgttgataattttttaattatttaaatgtacttatattaagaaaaatatcaagtactacattttcttttgttcttgatagtagccaaagttaaatgtatcacattgaagaaggctagaaaaaaagaatgagtaatgtgatcgcttggttatccagaagtattgtttacattaaactccctttcatgttaatcaaacaagtgagtagctcacgcagcaacgtttttaataggatttttagacactgagggtcactccaaggatcagaagtatggaattttctgccaggctcaacaagggtctcatatctaacttcctccttaaaacagagaaggtcaatctagttccagagggttgaggcaggtgccaataattacatctttggagaggatttgatttctgcccagggatttgctcaccccaaggtcatctgataatttcacagatgctgtgtaacagaacacagccaaagtaaactgtgtaggggagccacatttacataggaaccaaatcaatgaatttaggggttacgattatagcaatttaagggcccaccagaagcaggcctcgaggagtcaatttgcctctgtgtgcctcagtggagacaagtgggaaaacatggtcccacctgtgcgagaccccctgtcctgtgctgctcactcaacaacatctttgtgttgctttcaccaggctgagaccctaccctatggggtatatgggcttttacctgtgcaccagtgtgacaggaaagattcatgtcactactgtccgtggctacaattcaaaggtatccaatgtcgctgtaaattttatggcactatttttattggaggatttggtcagaatgcagttgttgtacaactcataaatactaactgctgattttgacacatgtgtgctccaaatgatctggtggttatttaacgtacctcttaaaattcgttgaaacgatttcaggtcaactctgaagagtatttgaaagcaggacttcagaacagtgtttgatttttattttataaatttaagcattcaaattaggcaaatctttggctgcaggcagcaaaaacagctggacttatttaaaacaacttgtttttgagttttcttatatatatattgattatttgttttacacacatgcagtagcactttggtaagagttaaagagtaaagcagcttatgttgtcaggtcgttcttatctagagaagagctatagcagatctcggacaaactcagaatatattcactttcatttttgacaggattccctccacaactcagtttcatatattattccgtattacatttttgcagctaaattaccataaaatgtcagcaaatgtaaaaatttaatttctgaaaagcaccattagcccatttcccccaaattaaacgtaaatgttttttttcagcacatgttaccatgtctgacctgcaaaaatgctggagaaaaatgaaggaaaaaattatgtttttcagtttaattctgttaactgaagatattccaactcaaaaccagcctcatgctctgattagataatcttttacattgaacctttactctcaaagccatgtgtggagggggcttgtcactattgtaggctcactggattggtcatttagagtttcacagactcttaccagcatatatagtatttaattgtttcaaaaaaaatcaaactgtagttgttttggcgataggtctcacgcaacacatttttgtatgtgtgtgtgtgtgcgtgtgtgtgtgtgtgtgtgaaaaattgcattcattgacttcaggtagattaaggtatctttttattcattgccctcaggaaagttaaggtatcaatgagacccttaagccaatcatgtaataactgcatgtgtctggtccaggagaagtattgaataagccatttctactgcttactcatgtccctatttatgatttcaacatggatacatatttcagttctttctttttctcactatctgaaaatacatttccctccctctcttccccccaatatctccctttttttctctcttcctctatcttccaaaccccactttctccctcctccttttcctgtgttctcttaagcagatagcacatacccccacccagtaccaaatttcagaacacaagaaggtccagttcttcccccttcacataaaggaacatggtttgtcagcctttctcctgtttatgggtttcttccagcagaacagagacattgccaaccatattggatctgcttgctgtccaaaccagcaaactttcctgggcaaatcacaatcagtgagtaaatagacagcctttctgctgccttgggtttctgtgcagataaacagaaatgctctgattagaaaggaaatgaatggttccactcaaatgtcctgcaatttaggattgcagatttctgccttgaaatacctgtttctttgggacattccgtcctgatgatttttatttttgttggtttttatttttggggggaatgacatgtttgggtcttttatacatgaaaatttgtttgacaataatctcacaaaacatattttacatctgaacaaaatgcctttttgtttaccgtagcgtatacatttgttttgggatttttgtgtgtttgttgggaattttgtttttagccaggtcagtattgatgaggctgatcatttggctctttttttccttccagaagagttgcatcaacaaagttaattgtatttatgtatgtaaatagattttaagcttcattataaaatattgttaatgcctataactttttttcaatttttttgtgtgtgtttctaaggactttttcttaggtttgctaaatactgtagggaaaaaaatgcttctttctactttgtttattttagactttaaaatgagctacttcttattcacttttgtaaacagctaatagcatggttccaattttttttaagttcactttttttgttctaggggaaatgaatgtgcaaaaaaagaaaaagaactgttggttatttgtgttattctggatgtataaaaatcaatggaaaaaaataaactttcaaattgaaatgacggtataacacatctactgaaaaagcaacgggaaatgtggtcctatttaagccagcccccacctagggtctatttgtgtggcagttattgggtttggtcacaaaacatcctgaaaattcgtgcgtgggcttctttctccctggtacaaacgtatggaatgcttcttaaaggggaactgtcaagctggtgtcttcagccagatgacatgagagaatatcccagaaccctctctccaaggtgtttctagatagcacaggagagcaggcactgcactgtccacagtccacggtacacagtcgggtgggccgcctcccctctcctgggagcattcgtcgtgcccagcctgagcagggcagctggactgctgctgttcaggagccaccagagccttcctctctttgtaccacagtttcttctgtaaatccagtgttacaatcagtgtgaatggcaaataaacagtttgacaagtacatacacca

SEQ ID NO: 442516 - DNA, 4942 bp, Homo sapiens
ctgcctcgcaggtcagactcctagacggatcccacgaatactcgacaacgttgtgcacccagcaacgcccatttcacctggacgtgccagcggcatgacaaccctctctgcagaactttccagtcgactctcaacggcacccgacctgacagcgttcagcgacccgcgccagttccccgcgctgccctccatctccgacccccgcatgcactatccaggcgccttcacctactccccgacgccggtcacctcgggcatcggcatcggcatgtcggccatgggctcggccacgcgctaccacacctacctgccgccgccctaccccggctcgtcgcaagcgcagggaggcccgttccaagccagctcgccctcctaccacctgtactacggcgcctcggccggctcctaccagttctccatggtgggcggcgagcgctcgccgccgcgcatcctgccgccctgcaccaacgcctccaccggctccgcgctgctcaaccccagcctcccgaaccagagcgacgtggtggaggccgagggcagccacagcaactcccccaccaacatggcgccctccgcgcgcctggaggaggccgtgtggaggccctactgaggcgccaggcctggcccggctgggccacgcgggccgccgccttcgcctccgggcgcgcgggcctcctgttcgcgacaagcccgccgggatcccgggccctgggcccggccaccgtcctggggccgagggcgcccgacggccaggatctcgctgtaggtcaggcccgcgcagcctcctgcgcccagaagcccacgccgccgccgtctgctggcgccccggccctcgcggaggtgtccgaggcgacgcacctcgagggtgtccgccggccccagcacccaggggacgcgctggaaagcaaacaggaagattcccggagggaaactgtgaatgcttctgatttagcaatgctgtgaataaaaagaaagattttatacccttgacttaactttttaaccaagttgtttattccaaagagtgtggaattttggttggggtggggggagaggagggatgcaactcgccctgtttggcatctaattcttatttttaatttttccgcaccttatcaattgcaaaatgcgtatttgcatttgggtggtttttatttttatatacgtttatataaatatatataaattgagcttgcttctttcttgctttgaccatggaaagaaatatgattcccttttctttaagttttatttaacttttcttttggacttttgggtagttgtttttttttgttttgttttgtttttttgagaaacagctacagctttgggtcatttttaactactgtattcccacaaggaatccccagatatttatgtatcttgatgttcagacatttatgtgttgataattttttaattatttaaatgtacttatattaagaaaaatatcaagtactacattttcttttgttcttgatagtagccaaagttaaatgtatcacattgaagaaggctagaaaaaaagaatgagtaatgtgatcgcttggttatccagaagtattgtttacattaaactccctttcatgttaatcaaacaagtgagtagctcacgcagcaacgtttttaataggatttttagacactgagggtcactccaaggatcagaagtatggaattttctgccaggctcaacaagggtctcatatctaacttcctccttaaaacagagaaggtcaatctagttccagagggttgaggcaggtgccaataattacatctttggagaggatttgatttctgcccagggatttgctcaccccaaggtcatctgataatttcacagatgctgtgtaacagaacacagccaaagtaaactgtgtaggggagccacatttacataggaaccaaatcaatgaatttaggggttacgattatagcaatttaagggcccaccagaagcaggcctcgaggagtcaatttgcctctgtgtgcctcagtggagacaagtgggaaaacatggtcccacctgtgcgagaccccctgtcctgtgctgctcactcaacaacatctttgtgttgctttcaccaggctgagaccctaccctatggggtatatgggcttttacctgtgcaccagtgtgacaggaaagattcatgtcactactgtccgtggctacaattcaaaggtatccaatgtcgctgtaaattttatggcactatttttattggaggatttggtcagaatgcagttgttgtacaactcataaatactaactgctgattttgacacatgtgtgctccaaatgatctggtggttatttaacgtacctcttaaaattcgttgaaacgatttcaggtcaactctgaagagtatttgaaagcaggacttcagaacagtgtttgatttttattttataaatttaagcattcaaattaggcaaatctttggctgcaggcagcaaaaacagctggacttatttaaaacaacttgtttttgagttttcttatatatatattgattatttgttttacacacatgcagtagcactttggtaagagttaaagagtaaagcagcttatgttgtcaggtcgttcttatctagagaagagctatagcagatctcggacaaactcagaatatattcactttcatttttgacaggattccctccacaactcagtttcatatattattccgtattacatttttgcagctaaattaccataaaatgtcagcaaatgtaaaaatttaatttctgaaaagcaccattagcccatttcccccaaattaaacgtaaatgttttttttcagcacatgttaccatgtctgacctgcaaaaatgctggagaaaaatgaaggaaaaaattatgtttttcagtttaattctgttaactgaagatattccaactcaaaaccagcctcatgctctgattagataatcttttacattgaacctttactctcaaagccatgtgtggagggggcttgtcactattgtaggctcactggattggtcatttagagtttcacagactcttaccagcatatatagtatttaattgtttcaaaaaaaatcaaactgtagttgttttggcgataggtctcacgcaacacatttttgtatgtgtgtgtgtgtgcgtgtgtgtgtgtgtgtgtgaaaaattgcattcattgacttcaggtagattaaggtatctttttattcattgccctcaggaaagttaaggtatcaatgagacccttaagccaatcatgtaataactgcatgtgtctggtccaggagaagtattgaataagccatttctactgcttactcatgtccctatttatgatttcaacatggatacatatttcagttctttctttttctcactatctgaaaatacatttccctccctctcttccccccaatatctccctttttttctctcttcctctatcttccaaaccccactttctccctcctccttttcctgtgttctcttaagcagatagcacatacccccacccagtaccaaatttcagaacacaagaaggtccagttcttcccccttcacataaaggaacatggtttgtcagcctttctcctgtttatgggtttcttccagcagaacagagacattgccaaccatattggatctgcttgctgtccaaaccagcaaactttcctgggcaaatcacaatcagtgagtaaatagacagcctttctgctgccttgggtttctgtgcagataaacagaaatgctctgattagaaaggaaatgaatggttccactcaaatgtcctgcaatttaggattgcagatttctgccttgaaatacctgtttctttgggacattccgtcctgatgatttttatttttgttggtttttatttttggggggaatgacatgtttgggtcttttatacatgaaaatttgtttgacaataatctcacaaaacatattttacatctgaacaaaatgcctttttgtttaccgtagcgtatacatttgttttgggatttttgtgtgtttgttgggaattttgtttttagccaggtcagtattgatgaggctgatcatttggctctttttttccttccagaagagttgcatcaacaaagttaattgtatttatgtatgtaaatagattttaagcttcattataaaatattgttaatgcctataactttttttcaatttttttgtgtgtgtttctaaggactttttcttaggtttgctaaatactgtagggaaaaaaatgcttctttctactttgtttattttagactttaaaatgagctacttcttattcacttttgtaaacagctaatagcatggttccaattttttttaagttcactttttttgttctaggggaaatgaatgtgcaaaaaaagaaaaagaactgttggttatttgtgttattctggatgtataaaaatcaatggaaaaaaataaactttcaaattgaaatgacggtataacacatctactgaaaaagcaacgggaaatgtggtcctatttaagccagcccccacctagggtctatttgtgtggcagttattgggtttggtcacaaaacatcctgaaaattcgtgcgtgggcttctttctccctggtacaaacgtatggaatgcttcttaaaggggaactgtcaagctggtgtcttcagccagatgacatgagagaatatcccagaaccctctctccaaggtgtttctagatagcacaggagagcaggcactgcactgtccacagtccacggtacacagtcgggtgggccgcctcccctctcctgggagcattcgtcgtgcccagcctgagcagggcagctggactgctgctgttcaggagccaccagagccttcctctctttgtaccacagtttcttctgtaaatccagtgttacaatcagtgtgaatggcaaataaacagtttgacaagtacatacacca

SEQ ID NO: 442517 - DNA, 5650 bp, Homo sapiens
ggaaaggggaacagttaaatttgtaatttgggttgtgtgaaaacttctttgggcctcataaacaaccacagaaccacaagttgggtagcctggcagtgtcagaagtctgaacccagcatagtggtcagcaggcaggacgaatcacactgaatgcaaaccacagggtttcgcagcgtggtgagcatcaccaacccacagccaaggcggcgctggctttttttttttttttaatctttaacaatttgaatatttgtttttacaaaggtaaaagaaatcattgagtcccccgccttcagaagagggtgcattttcaggaggaagcgatggcttcagacagcatatttgagtcatttccttcgtacccacagtgcttcatgagagaatgcatacttggaatgaatccttctagagacgtccacgatgccagcacgagccgccgcttcacgccgccttccaccgcgctgagcccaggcaagatgagcgaggcgttgccgctgggcgccccggacgccggcgctgccctggccggcaagctgaggagcggcgaccgcagcatggtggaggtgctggccgaccacccgggcgagctggtgcgcaccgacagccccaacttcctctgctccgtgctgcctacgcactggcgctgcaacaagaccctgcccatcgctttcaaggtggtggccctaggggatgttccagatggcactctggtcactgtgatggctggcaatgatgaaaactactcggctgagctgagaaatgctaccgcagccatgaagaaccaggttgcaagatttaatgacctcaggtttgtcggtcgaagtggaagagggaaaagcttcactctgaccatcactgtcttcacaaacccaccgcaagtcgccacctaccacagagccatcaaaatcacagtggatgggccccgagaacctcgaagacatcggcagaaactagatgatcagaccaagcccgggagcttgtccttttccgagcggctcagtgaactggagcagctgcggcgcacagccatgagggtcagcccacaccacccagcccccacgcccaaccctcgtgcctccctgaaccactccactgcctttaaccctcagcctcagagtcagatgcaggatacaaggcagatccaaccatccccaccgtggtcctacgatcagtcctaccaatacctgggatccattgcctctccttctgtgcacccagcaacgcccatttcacctggacgtgccagcggcatgacaaccctctctgcagaactttccagtcgactctcaacggcacccgacctgacagcgttcagcgacccgcgccagttccccgcgctgccctccatctccgacccccgcatgcactatccaggcgccttcacctactccccgacgccggtcacctcgggcatcggcatcggcatgtcggccatgggctcggccacgcgctaccacacctacctgccgccgccctaccccggctcgtcgcaagcgcagggaggcccgttccaagccagctcgccctcctaccacctgtactacggcgcctcggccggctcctaccagttctccatggtgggcggcgagcgctcgccgccgcgcatcctgccgccctgcaccaacgcctccaccggctccgcgctgctcaaccccagcctcccgaaccagagcgacgtggtggaggccgagggcagccacagcaactcccccaccaacatggcgccctccgcgcgcctggaggaggccgtgtggaggccctactgaggcgccaggcctggcccggctgggccacgcgggccgccgccttcgcctccgggcgcgcgggcctcctgttcgcgacaagcccgccgggatcccgggccctgggcccggccaccgtcctggggccgagggcgcccgacggccaggatctcgctgtaggtcaggcccgcgcagcctcctgcgcccagaagcccacgccgccgccgtctgctggcgccccggccctcgcggaggtgtccgaggcgacgcacctcgagggtgtccgccggccccagcacccaggggacgcgctggaaagcaaacaggaagattcccggagggaaactgtgaatgcttctgatttagcaatgctgtgaataaaaagaaagattttatacccttgacttaactttttaaccaagttgtttattccaaagagtgtggaattttggttggggtggggggagaggagggatgcaactcgccctgtttggcatctaattcttatttttaatttttccgcaccttatcaattgcaaaatgcgtatttgcatttgggtggtttttatttttatatacgtttatataaatatatataaattgagcttgcttctttcttgctttgaccatggaaagaaatatgattcccttttctttaagttttatttaacttttcttttggacttttgggtagttgtttttttttgttttgttttgtttttttgagaaacagctacagctttgggtcatttttaactactgtattcccacaaggaatccccagatatttatgtatcttgatgttcagacatttatgtgttgataattttttaattatttaaatgtacttatattaagaaaaatatcaagtactacattttcttttgttcttgatagtagccaaagttaaatgtatcacattgaagaaggctagaaaaaaagaatgagtaatgtgatcgcttggttatccagaagtattgtttacattaaactccctttcatgttaatcaaacaagtgagtagctcacgcagcaacgtttttaataggatttttagacactgagggtcactccaaggatcagaagtatggaattttctgccaggctcaacaagggtctcatatctaacttcctccttaaaacagagaaggtcaatctagttccagagggttgaggcaggtgccaataattacatctttggagaggatttgatttctgcccagggatttgctcaccccaaggtcatctgataatttcacagatgctgtgtaacagaacacagccaaagtaaactgtgtaggggagccacatttacataggaaccaaatcaatgaatttaggggttacgattatagcaatttaagggcccaccagaagcaggcctcgaggagtcaatttgcctctgtgtgcctcagtggagacaagtgggaaaacatggtcccacctgtgcgagaccccctgtcctgtgctgctcactcaacaacatctttgtgttgctttcaccaggctgagaccctaccctatggggtatatgggcttttacctgtgcaccagtgtgacaggaaagattcatgtcactactgtccgtggctacaattcaaaggtatccaatgtcgctgtaaattttatggcactatttttattggaggatttggtcagaatgcagttgttgtacaactcataaatactaactgctgattttgacacatgtgtgctccaaatgatctggtggttatttaacgtacctcttaaaattcgttgaaacgatttcaggtcaactctgaagagtatttgaaagcaggacttcagaacagtgtttgatttttattttataaatttaagcattcaaattaggcaaatctttggctgcaggcagcaaaaacagctggacttatttaaaacaacttgtttttgagttttcttatatatatattgattatttgttttacacacatgcagtagcactttggtaagagttaaagagtaaagcagcttatgttgtcaggtcgttcttatctagagaagagctatagcagatctcggacaaactcagaatatattcactttcatttttgacaggattccctccacaactcagtttcatatattattccgtattacatttttgcagctaaattaccataaaatgtcagcaaatgtaaaaatttaatttctgaaaagcaccattagcccatttcccccaaattaaacgtaaatgttttttttcagcacatgttaccatgtctgacctgcaaaaatgctggagaaaaatgaaggaaaaaattatgtttttcagtttaattctgttaactgaagatattccaactcaaaaccagcctcatgctctgattagataatcttttacattgaacctttactctcaaagccatgtgtggagggggcttgtcactattgtaggctcactggattggtcatttagagtttcacagactcttaccagcatatatagtatttaattgtttcaaaaaaaatcaaactgtagttgttttggcgataggtctcacgcaacacatttttgtatgtgtgtgtgtgtgcgtgtgtgtgtgtgtgtgtgaaaaattgcattcattgacttcaggtagattaaggtatctttttattcattgccctcaggaaagttaaggtatcaatgagacccttaagccaatcatgtaataactgcatgtgtctggtccaggagaagtattgaataagccatttctactgcttactcatgtccctatttatgatttcaacatggatacatatttcagttctttctttttctcactatctgaaaatacatttccctccctctcttccccccaatatctccctttttttctctcttcctctatcttccaaaccccactttctccctcctccttttcctgtgttctcttaagcagatagcacatacccccacccagtaccaaatttcagaacacaagaaggtccagttcttcccccttcacataaaggaacatggtttgtcagcctttctcctgtttatgggtttcttccagcagaacagagacattgccaaccatattggatctgcttgctgtccaaaccagcaaactttcctgggcaaatcacaatcagtgagtaaatagacagcctttctgctgccttgggtttctgtgcagataaacagaaatgctctgattagaaaggaaatgaatggttccactcaaatgtcctgcaatttaggattgcagatttctgccttgaaatacctgtttctttgggacattccgtcctgatgatttttatttttgttggtttttatttttggggggaatgacatgtttgggtcttttatacatgaaaatttgtttgacaataatctcacaaaacatattttacatctgaacaaaatgcctttttgtttaccgtagcgtatacatttgttttgggatttttgtgtgtttgttgggaattttgtttttagccaggtcagtattgatgaggctgatcatttggctctttttttccttccagaagagttgcatcaacaaagttaattgtatttatgtatgtaaatagattttaagcttcattataaaatattacagcataactatacagcataaactattacagcataaactattatagcataaactattacagcataaactattacagcataaactattacagcataaactattacagcataaactattgaataacaatctccaggctgtcacctgctagactggctaaaatccaaaagtaaccactctggagaaacaggcattcctagacagtactggtgggatacagatatggtacaattctcatgaaatttcacagtagttaacaaatttaacatatttatactttttaacccaggaatcccatgtttaggagttccagtgagatagatacagtcctacctat

SEQ ID NO: 442518 - DNA, 3320 bp, Homo sapiens
ctacaaggcccgggagcaagccgcgtggctgctttcaactttccttccagccgcgcgttcttggggtctttcctgactaggaaactcctcgctggccgctgacgcacgcagcaagtgagacgcgcggagggatcgagccgcggcccgggcgcagcggtaaaaaacacccattacagaaaccgacccaagggaagacgctgagagcaaacggcacgcgcggacgccgtccggcctcatgcaaggaatcagcgccgcttcgccgcagctgccagccggacggtgcaggagcgcggagtggctcccccgggccccgcggccaaatcgcacccccgccctggaagcggaggcctggccctgggcggccgcgcaggatctggggccgtccgcgggctgcagccccggttcgggagcctcgtggcggccactgcgcctgcctgcagcggctcgcggggccgggcctctccgggtgcggcgcgccggccgggtcctcctcgggccggcggggcctgctttctttttccaggtctccggaccgtggccactcgcggagccgcacaagcctgcgtgtggctgcggaaaggggtccgcacgcgggcggggccccgggccagcatgcaggcttggatgcggggcgcgggggtggcctccgactccccgcccgggctgcgtacagtagcgcgcggcgcggcggcgggggcgcgcgggccaattccaggagccggcggcggcgagccgcgccctggctgataccggaaaggcctgtgattggccgccggccgcccctatgcaaacgagctgagggaatggaattcctccggccgggcttacagtaaaagcacgttcatttccaggcactctcattcatagagccagcgggcgcgggcgggacgggcgccccgcggccggacccagccagggcaccacgctgcccggccctgcgccgccaggcacttctttccggggctcctagggacgccagaaggaagtcaacctctgctgcttctccttggcctgcgttggaccttcctttttttgttgtttttttttgtttttcccctttcttccttttgaattaactggcttcttggctggatgttttcaacttctttcctggctgcgaacttttccccaattgttttccttttacaacagggggagaaagtgctctgtggtccgaggcgagccgtgaagttgcgtgtgcgtggcagtgtgcgtggcaggatgtgcgtgcgtgtgtaacccgagccgcccgatctgtttcgatctgcgccgcggagccctccctcaaggcccgctccacctgctgcggttacgcggcgctcgtgggtgttcgtgcctcggagcagctaaccggcgggtgctgggcgacggtggaggagtatcgtctcgctgctgcccgagtcagggctgagtcacccagctgatgtagacagtggctgccttccgaagagtgcgtgtttgcatgtgtgtgactctgcggctgctcaactcccaacaaaccagaggaccagccacaaacttaaccaacatccccaaacccgagttcacagatgtgggagagctgtagaaccctgagtgtcatcgactgggccttcttatgattgttgttttaagattagctgaagatctctgaaacgctgaattttctgcactgagcgttttgacagaattcattgagagaacagagaacatgacaagtacttctagctcagcactgctccaactactgaagctgattttcaaggctacttaaaaaaatctgcagcgtacattaatggatttctgttgtgtttaaattctccacagattgtattgtaaatattttatgaagtagagcatatgtatatatttatatatacgtgcacatacattagtagcactacctttggaagtctcagctcttgcttttcgggactgaagccagttttgcatgataaaagtggccttgttacgggagataattgtgttctgttgggactttagacaaaactcacctgcaaaaaactgacaggcattaactactggaacttccaaataatgtgtttgctgatcgttttactcttcgcataaatattttaggaagtgtatgagaattttgccttcaggaacttttctaacagccaaagacagaacttaacctctgcaagcaagattcgtggaagatagtctccactttttaatgcactaagcaatcggttgctaggagcccatcctgggtcagaggccgatccgcagaaccagaacgttttcccctcctggactgttagtaacttagtctccctcctcccctaaccacccccgcccccccccaccccccgcagtaataaaggcccctgaacgtgtatgttggtctcccgggagctgcttgctgaagatccgcgcccctgtcgccgtctggtaggagctgtttgcagggtcctaactcaatcggcttgttgtgatgcgtatccccgtagatgccagcacgagccgccgcttcacgccgccttccaccgcgctgagcccaggcaagatgagcgaggcgttgccgctgggcgccccggacgccggcgctgccctggccggcaagctgaggagcggcgaccgcagcatggtggaggtgctggccgaccacccgggcgagctggtgcgcaccgacagccccaacttcctctgctccgtgctgcctacgcactggcgctgcaacaagaccctgcccatcgctttcaaggtggtggccctaggggatgttccagatggcactctggtcactgtgatggctggcaatgatgaaaactactcggctgagctgagaaatgctaccgcagccatgaagaaccaggttgcaagatttaatgacctcaggtttgtcggtcgaagtggaagagggaaaagcttcactctgaccatcactgtcttcacaaacccaccgcaagtcgccacctaccacagagccatcaaaatcacagtggatgggccccgagaacctcgaagacatcggcagaaactagatgatcagaccaagcccgggagcttgtccttttccgagcggctcagtgaactggagcagctgcggcgcacagccatgagggtcagcccacaccacccagcccccacgcccaaccctcgtgcctccctgaaccactccactgcctttaaccctcagcctcagagtcagatgcaggctcatctttctccctaattcatcccaggacaagcctaggaaaccctggtgttacctccaagaggaaagacatacacatcaaatgcagcggtatgctgataaatgttacccctggatccccagaaaataaataaagtcccaatttatagaaaaaaaa

SEQ ID NO: 442519 - DNA, 3128 bp, Homo sapiens
ctacaaggcccgggagcaagccgcgtggctgctttcaactttccttccagccgcgcgttcttggggtctttcctgactaggaaactcctcgctggccgctgacgcacgcagcaagtgagacgcgcggagggatcgagccgcggcccgggcgcagcggtaaaaaacacccattacagaaaccgacccaagggaagacgctgagagcaaacggcacgcgcggacgccgtccggcctcatgcaaggaatcagcgccgcttcgccgcagctgccagccggacggtgcaggagcgcggagtggctcccccgggccccgcggccaaatcgcacccccgccctggaagcggaggcctggccctgggcggccgcgcaggatctggggccgtccgcgggctgcagccccggttcgggagcctcgtggcggccactgcgcctgcctgcagcggctcgcggggccgggcctctccgggtgcggcgcgccggccgggtcctcctcgggccggcggggcctgctttctttttccaggtctccggaccgtggccactcgcggagccgcacaagcctgcgtgtggctgcggaaaggggtccgcacgcgggcggggccccgggccagcatgcaggcttggatgcggggcgcgggggtggcctccgactccccgcccgggctgcgtacagtagcgcgcggcgcggcggcgggggcgcgcgggccaattccaggagccggcggcggcgagccgcgccctggctgataccggaaaggcctgtgattggccgccggccgcccctatgcaaacgagctgagggaatggaattcctccggccgggcttacagtaaaagcacgttcatttccaggcactctcattcatagagccagcgggcgcgggcgggacgggcgccccgcggccggacccagccagggcaccacgctgcccggccctgcgccgccaggcacttctttccggggctcctagggacgccagaaggaagtcaacctctgctgcttctccttggcctgcgttggaccttcctttttttgttgtttttttttgtttttcccctttcttccttttgaattaactggcttcttggctggatgttttcaacttctttcctggctgcgaacttttccccaattgttttccttttacaacagggggagaaagtgctctgtggtccgaggcgagccgtgaagttgcgtgtgcgtggcagtgtgcgtggcaggatgtgcgtgcgtgtgtaacccgagccgcccgatctgtttcgatctgcgccgcggagccctccctcaaggcccgctccacctgctgcggttacgcggcgctcgtgggtgttcgtgcctcggagcagctaaccggcgggtgctgggcgacggtggaggagtatcgtctcgctgctgcccgagtcagggctgagtcacccagctgatgtagacagtggctgccttccgaagagtgcgtgtttgcatgtgtgtgactctgcggctgctcaactcccaacaaaccagaggaccagccacaaacttaaccaacatccccaaacccgagttcacagatgtgggagagctgtagaaccctgagtgtcatcgactgggccttcttatgattgttgttttaagattagctgaagatctctgaaacgctgaattttctgcactgagcgttttgacagaattcattgagagaacagagaacatgacaagtacttctagctcagcactgctccaactactgaagctgattttcaaggctacttaaaaaaatctgcagcgtacattaatggatttctgttgtgtttaaattctccacagattgtattgtaaatattttatgaagtagagcatatgtatatatttatatatacgtgcacatacattagtagcactacctttggaagtctcagctcttgcttttcgggactgaagccagttttgcatgataaaagtggccttgttacgggagataattgtgttctgttgggactttagacaaaactcacctgcaaaaaactgacaggcattaactactggaacttccaaataatgtgtttgctgatcgttttactcttcgcataaatattttaggaagtgtatgagaattttgccttcaggaacttttctaacagccaaagacagaacttaacctctgcaagcaagattcgtggaagatagtctccactttttaatgcactaagcaatcggttgctaggagcccatcctgggtcagaggccgatccgcagaaccagaacgttttcccctcctggactgttagtaacttagtctccctcctcccctaaccacccccgcccccccccaccccccgcagtaataaaggcccctgaacgtgtatgttggtctcccgggagctgcttgctgaagatccgcgcccctgtcgccgtctggtaggagctgtttgcagggtcctaactcaatcggcttgttgtgatgcgtatccccgtagatgccagcacgagccgccgcttcacgccgccttccaccgcgctgagcccaggcaagatgagcgaggcgttgccgctgggcgccccggacgccggcgctgccctggccggcaagctgaggagcggcgaccgcagcatggtggaggtgctggccgaccacccgggcgagctggtgcgcaccgacagccccaacttcctctgctccgtgctgcctacgcactggcgctgcaacaagaccctgcccatcgctttcaaggtggtggccctaggggatgttccagatggcactctggtcactgtgatggctggcaatgatgaaaactactcggctgagctgagaaatgctaccgcagccatgaagaaccaggttgcaagatttaatgacctcaggtttgtcggtcgaagtggaagagggaaaagcttcactctgaccatcactgtcttcacaaacccaccgcaagtcgccacctaccacagagccatcaaaatcacagtggatgggccccgagaacctcgaactcatctttctccctaattcatcccaggacaagcctaggaaaccctggtgttacctccaagaggaaagacatacacatcaaatgcagcggtatgctgataaatgttacccctggatccccagaaaataaataaagtcccaatttatagaaaaaaaa

SEQ ID NO: 442520 - DNA, 1420 bp, Homo sapiens
ggaaaggggaacagttaaatttgtaatttgggttgtgtgaaaacttctttgggcctcataaacaaccacagaaccacaagttgggtagcctggcagtgtcagaagtctgaacccagcatagtggtcagcaggcaggacgaatcacactgaatgcaaaccacagggtttcgcagcgtggtgagcatcaccaacccacagccaaggcggcgctggctttttttttttttttaatctttaacaatttgaatatttgtttttacaaaggtaaaagaaatcattgagtcccccgccttcagaagagggtgcattttcaggaggaagcgatggcttcagacagcatatttgagtcatttccttcgtacccacagtgcttcatgagagaatgcatacttggaatgaatccttctagagacgtccacgatgccagcacgagccgccgcttcacgccgccttccaccgcgctgagcccaggcaagatgagcgaggcgttgccgctgggcgccccggacgccggcgctgccctggccggcaagctgaggagcggcgaccgcagcatggtggaggtgctggccgaccacccgggcgagctggtgcgcaccgacagccccaacttcctctgctccgtgctgcctacgcactggcgctgcaacaagaccctgcccatcgctttcaaggtggtggccctaggggatgttccagatggcactctggtcactgtgatggctggcaatgatgaaaactactcggctgagctgagaaatgctaccgcagccatgaagaaccaggttgcaagatttaatgacctcaggtttgtcggtcgaagtggaagagggaaaagcttcactctgaccatcactgtcttcacaaacccaccgcaagtcgccacctaccacagagccatcaaaatcacagtggatgggccccgagaacctcgaagacatcggcagaaactagatgatcagaccaagcccgggagcttgtccttttccgagcggctcagtgaactggagcagctgcggcgcacagccatgagggtcagcccacaccacccagcccccacgcccaaccctcgtgcctccctgaaccactccactgcctttaaccctcagcctcagagtcagatgcaggaatcatggatgctgccaattttgagcagtttttgcaagaaaggatcaaagtgaacggaaaagctgggaaccttggtggaggggtggtgaccatcgaaaggagcaagagcaagatcaccgtgacatccgaggtgcctttctccaaaaggtatttgaaatatctcaccaaaaaatatttgaagaagaataatctacgtgactggttgcgcgtagttgctaacagcaaagagagttacgaattacgttacttccagattaaccaggacgaagaagaggaggaagacgaggattaa

SEQ ID NO: 442521 - DNA, 2352 bp, Homo sapiens
catccccctccccccagtcggcggcgcttggtgccgcccgggagaaccaggtcatcggtcggttcccgtgaaaacaaaaacaatcggccgcgccgtcgcaggcacccgaacgtcgcgagcggggcctggggacgcggggccgagtgcagcgagcgaacgggagcagcggcgactcgccggggggctagggcgccatggggcaggcgggctccggctgcgcggggctcccccggcgccgcggctagtgcgcccgccgcctcggccgcctcagcctcccgcgccgcccgcttggggaacgaggagcaggacgcggcctcggcggggcccgggccgaacggctgcggacacctgggcgccgaggagccgagcgccgccgcctccggcatggatcagtgcgtgacggtggagcgcgagctggagaaggtgctgcacaagttctcgggctacgggcagctgtgcgagcgcggcctggaggagctcatcgactacaccggcggtctcaagcacgagatcctgcagagccacggccaagatgctgaattatcagggacactttcacttgttttgacacagtgctgtaaaagaataaaggatactgttcaaaaattggcctccgaccacaaagacatccacagcagtgtttctcgggttggaaaagccattgataagaattttgattctgacattagcagtgtgggaatagatggctgctggcaggcagacagccaaaggcttctcaatgaagtgatggtggagcacttctttcgacaaggaatgctggatgtggctgaggagctctgtcaggaatctggtctttctgtagacccaagtcagaaggaaccatttgtggagttaaatagaatattagaggcattaaaggtcagagttctgagacctgctctggagtgggcagtgtcaaaccgggaaatgcttatagctcaaaacagctccttggaatttaagctacacagactgtattttattagcttgttaatgggtggaaccacaaatcagcgagaggcattacaatatgctaaaaattttcagccatttgccctaaatcatcaaaaagacattcaggttttgatgggaagccttgtgtacctgagacaagggattgagaactcaccatatgttcacctacttgatgcaaaccagtgggctgatatctgtgacatctttacacgggatgcttgtgccctcctggggctctccgtggagtcccctctcagtgtcagtttctcagcaggttgtgtggcgctgccagctttaattaacatcaaagccgtgattgaacagaggcagtgtactggagtttggaaccagaaagatgaattacctattgaagtggaccttggtaaaaagtgctggtatcactctatatttgcctgccccattcttcgtcagcaaacaacagataacaatccacccatgaaattggtctgtggtcatattatatcaagagatgccctgaataaaatgtttaatggtagcaaattaaaatgtccctactgtccaatggaacaaagtccaggagatgccaaacagatatttttctgaagagataactttagtttgcaatttgtaagtgaaactgaatcgtgggtgcatttcagaagagaacgttccatataatgcagctaaccaaggactcctgtgtttctataagctaatgctccagaaactttgccaacctgttagtgtacacacactgaggggagtgctcccggtgaatattatcatagggctttattatattcttggtcttcatttctgatcaagtaaatacaccagcagttgtcattcaatgcaggtttttgtacttaattatatggtgatttttttactttttaagagcagaaacggaaattgacctccccgccatgtgtttaatattcctcctgcttttacttttgtcattttcttgataatcgtaagccttgagagtgtttgtgaaaaagttttatttcctgttatgtatacataattaaatgaaaattcttcagaaaaagtttgataaattgaattgtggttatgaaactaatttgcatttttatttgcttaagaaagaaagctgtgatagattccagatatgctttttgatgttttcctctgctccagctccaagaagtcagcacacctgcattttagctctgcatgcagccccagcaggctgcgtgtttaagaatttcattgtttaactggctggtgtgagaagtcttccgttagcatagagtggaaggagtactattgtttggttgggtttttgtttgtttgttttttgtttttgcttttattgccaagaggtgcttgttttaaaagtatgtttaataaaatgaaattctaaagtta

SEQ ID NO: 442522 - DNA, 3487 bp, Homo sapiens
catccccctccccccagtcggcggcgcttggtgccgcccgggagaaccaggtcatcggtcggttcccgtgaaaacaaaaacaatcggccgcgccgtcgcaggcacccgaacgtcgcgagcggggcctggggacgcggggccgagtgcagcgagcgaacgggagcagcggcgactcgccggggggctagggcgccatggggcaggcgggctccggctgcgcggggctcccccggcgccgcggctagtgcgcccgccgcctcggccgcctcagcctcccgcgccgcccgcttggggaacgaggagcaggacgcggcctcggcggggcccgggccgaacggctgcggacacctgggcgccgaggagccgagcgccgccgcctccggcatggatcagtgcgtgacggtggagcgcgagctggagaaggtgctgcacaagttctcgggctacgggcagctgtgcgagcgcggcctggaggagctcatcgactacaccggcggtctcaagcacgagatcctgcagagccacggccaagatgctgaattatcagggacactttcacttgttttgacacagtgctgtaaaagaataaaggatactgttcaaaaattggcctccgaccacaaagacatccacagcagtgtttctcgggttggaaaagccattgataagaattttgattctgacattagcagtgtgggaatagatggctgctggcaggcagacagccaaaggcttctcaatgaagtgatggtggagcacttctttcgacaaggaatgctggatgtggctgaggagctctgtcaggaatctggtctttctgtagacccaagtcagaaggaaccatttgtggagttaaatagaatattagaggcattaaaggtcagagttctgagacctgctctggagtgggcagtgtcaaaccgggaaatgcttatagctcaaaacagctccttggaatttaagctacacagactgtattttattagcttgttaatgggtggaaccacaaatcagcgagaggcattacaatatgctaaaaattttcagccatttgccctaaatcatcaaaaagacattcaggttttgatgggaagccttgtgtacctgagacaagggattgagaactcaccatatgttcacctacttgatgcaaaccagtgggctgatatctgtgacatctttacacgggatgcttgtgccctcctggggctctccgtggagtcccctctcagtgtcagtttctcagcaggttgtgtggcgctgccagctttaattaacatcaaagccgtgattgaacagaggcagtgtactggagtttggaaccagaaagatgaattacctattgaagtggaccttggtaaaaagtgctggtatcactctatatttgcctgccccattcttcgtcagcaaacaacagataacaatccacccatgaaattggtctgtggtcatattatatcaagagatgccctgaataaaatgtttaatggtagcaaattaaaatgtccctactgtccaatggaacaaagtccaggagatgccaaacagatatttttctgaagagataactttagtttgcaatttgtaagtgaaactgaatcgtgggtgcatttcagaagagaacgttccatataatgcagctaaccaaggactcctgtgtttctataagctaatgctccagaaactttgccaacctgttagtgtacacacactgaggggagtgctcccggtgaatattatcatagggctttattatattcttggtcttcatttctgatcaagtaaatacaccagcagttgtcattcaatgcaggtttttgtacttaattatatggtgatttttttactttttaagagcagaaacggaaattgacctccccgccatgtgtttaatattcctcctgcttttacttttgtcattttcttgataatcgtaagccttgagagtgtttgtgaaaaagttttatttcctgttatgtatacataattaaatgaaaattcttcagaaaaagtttgataaattgaattgtggttatgaaactaatttgcatttttatttgcttaagaaagaaagctgtgatagattccagatatgctttttgatgttttcctctgctccagctccaagaagtcagcacacctgcattttagctctgcatgcagccccagcaggctgcgtgtttaagaatttcattgtttaactggctggtgtgagaagtcttccgttagcatagagtggaaggagtactattgtttggttgggtttttgtttgtttgttttttgtttttgcttttattgccaagaggtgcttgttttaaaagtatgtttaataaaatgaaattctaaagttagaagtgttcttaagttgatatttactctcttggtcttggtagccctattatatcattgcagacacagtgttgtgcatgtgtgtattgtatatgtgcaccagcatcaaacattgtgtatctggaaggaaagcagcatgttccagttctaaaatgcagttaccagacccatcactttaaatccttaaagttagaagctagcaaattttctgtagtgcagaacgtttattgctgtttttgtgtttgaatagtataatgtttgatgcctctcttctgcaaagcgtatcatctcattgactgtgaatctgtatattattctgatggatacagataatgatcttttctcttgtgaggtatcttcatttatgcactgtccaaaaatagccatgtgtaagagtctttctgtatgacgaactacatggaaaagacttctgtggacataattctgaccgaaacccatgaagttacttcagtataagaagaacgttacacggaaatcaccaaatattttgcaactttatttcttctgacatggagtgaacatcaataggaatactttcaaagaaaatgaaaacacagaagcaaagagaaatgtggcacttcacattttaaactacagatggacttggtttgagggagggggaatcacagatttggtgctaagttaattagaaactggcagcgttttacagtagtacaccagcctggatgttttttctaaaatgtttacctgggagagctggggtttgtttgtgaggagaaagagtactgtggaaaacctctgcttgagtaccatgtggccaggcctatgtggatggctactccgtgctgtgcggcttcaccagcggttgggattggcccagcttggagtgcttgtgtggtccaacctcagtctggccccatagtgacttttgccccatgattctgcttcactgttggaatcctctttgaagttccccctctctttgctaaagcagtgaaggaagagaacagagacaaactctttggactgtgaaagagaaggtagagaattccaggcaacagtctgaccaagggtgtaaaccagtttattatatatatatttttcctttgaattaaaacctagagtgactacaaaaaggattagactgagccgaat

SEQ ID NO: 442523 - DNA, 1124 bp, Homo sapiens
catccccctccccccagtcggcggcgcttggtgccgcccgggagaaccaggtcatcggtcggttcccgtgaaaacaaaaacaatcggccgcgccgtcgcaggcacccgaacgtcgcgagcggggcctggggacgcggggccgagtgcagcgagcgaacgggagcagcggcgactcgccggggggctagggcgccatggggcaggcgggctccggctgcgcggggctcccccggcgccgcggctagtgcgcccgccgcctcggccgcctcagcctcccgcgccgcccgcttggggaacgaggagcaggacgcggcctcggcggggcccgggccgaacggctgcggacacctgggcgccgaggagccgagcgccgccgcctccggcatggatcagtgcgtgacggtggagcgcgagctggagaaggtgctgcacaagttctcgggctacgggcagctgtgcgagcgcggcctggaggagctcatcgactacaccggcggtctcaagcacgagatcctgcagagccacggccaagatgctgaattatcagggacactttcacttgttttgacacagtgctgtaaaagaataaaggatactgttcaaaaattggcctccgaccacaaagacatccacagcagtgtttctcgggttggaaaagccattgataaggattcactttaagagatttggaaactcttccctttggaattgctcttcccatcagagatgcaatttatcactgtcgtgaacagcctgcctcagactggccagaagctgtctgtctcttgattggacgtcaggatctttccaagcaggcctgcgaaggaaacttacccaaagggaagtctgtgctctcatcagatgttccttcaggaacagaactgacgagccagatgccggtttaatgccctgcatccagaagggtccggctattatatcgcagtgaccaattacacggcgcagaatggtcgccagaggctatcccagaggcgcacacaaggaaagcggacagcaaagcgaggacccaaagaccagcgagcccaagcacaagaggccgaacgagacccgacaggccacccgggcagcaacaaaacggacaccgagcagaccagcaagacaccgga

SEQ ID NO: 442524 - DNA, 753 bp, Homo sapiens
ataagaagcctgcaaagccagctgcaaaataaggaaagtgaagtgcttgagggggcagaacgtgtaaggcatatctcaagtaaagtggaagaactgtccgtgtcaatgtagtgcagtacccagagctcagtgaccacgagttcatcgaggaaaaggaaaacaggtgaaagaaaacacgtgcactatctcttgtcatgtttcattgttacatttgtgtcttgtgtatatttgtttttccttcaagtttttagcatttaaaaccctaaagagatttaaaagatactttcaagtgaaaatatgccctgtgttttaagttttcatccaacttcaacaaacacgtgtgttagcaaaatgtctttggcttttgaggacgtaattgttgtatttcatatcgtcctcctcttgaaatacatataacactttactctttagaaaaggtgaatgtaaaactattttgcctgatagttaccttaagaatttacaaacaaagaaaacactggacttgtttttctgtgtcttgatcaggaatagattttgaggttagtggggtttttagtgtagtttaaacttgtatgagtattttttttttttggatatgatagatgatactccaaataaaaatagataagcctttcttctgccactcccctgcacaggatacatcccttgatacattataagactcacatgcctatgacattccagagctattctcttgggacacttctgttttaaaattctctcctgttcttt

SEQ ID NO: 442525 - DNA, 388 bp, Homo sapiens
ccatgattatatgcaaaaaattggtacgtcattaaaaagtaacagattgccgtaaattaccggtttcacctgttactaatttcgcgaccggatccgtcctaacaataaaccttatttaacacaaaccacatccatatcctctgttcatttgattttggaaaaagtagcatatccagtagtttcagggaattcattttaactttaagaattctgatatatttaatttataaatttcggactgatataatagagttttggaaaactataagaaatgctttgttaatgtgtgtattcctatgtaaaacacatggcttttcctgtgtatatttttaaaaattaaagaaatgcacatttaaaaagtgaaaaaaaagtcgacgcggccgcgaat

SEQ ID NO: 442526 - DNA, 6093 bp, Homo sapiens
ccccccagccctcgtccgtggaagaaatgtcttccacgaaactggtccctagtgccaaaaaggttggggaacactgagttagggagtgatggggaaacacctcccccaaactcccaggtttctatatgccagccaagaggtgactttgtaagcaggactttctaagggtagtagtctatgacctgctgtgttaactcctttctgcacatcgtggtacccagggaagtttgttttcttctacctctttatatggaatatgaagcatttgcactaaatcatctctcttgaggaaatttagtaacaaccagaacgttttgagaatgacttgaacagtgtaactgggtttaataagtgagtttattcacttagacatattttctcaaaaataatactgccttgacagtattattcacagcctgtgctggttgttgtaatgataaaaatgattcctttcacagtaaaattttcttatttccaaaaataaaaaaattatatctttctgagtatccatttgaaaaatcacatctatgaatgtgaccatcagcttcaaagcagatactggtttttcttcacttttcttccatctttcatggtccaaaaggcccattagaaacttgccatctttgggtttgcttaagtgagtaaccaatccttcctttgtttttttataggccaagatgctgaattatcagggacactttcacttgttttgacacagtgctgtaaaagaataaaggatactgttcaaaaattggcctccgaccacaaagacatccacagcagtgtttctcgggttggaaaagccattgataagaattttgattctgacattagcagtgtgggaatagatggctgctggcaggcagacagccaaaggcttctcaatgaagtgatggtggagcacttctttcgacaaggaatgctggatgtggctgaggagctctgtcaggaatctggtctttctgtagacccaagtcagaaggaaccatttgtggagttaaatagaatattagaggcattaaaggtcagagttctgagacctgctctggagtgggcagtgtcaaaccgggaaatgcttatagctcaaaacagctccttggaatttaagctacacagactgtattttattagcttgttaatgggtggaaccacaaatcagcgagaggcattacaatatgctaaaaattttcagccatttgccctaaatcatcaaaaagacattcaggttttgatgggaagccttgtgtacctgagacaagggattgagaactcaccatatgttcacctacttgatgcaaaccagtgggctgatatctgtgacatctttacacgggatgcttgtgccctcctggggctctccgtggagtcccctctcagtgtcagtttctcagcaggttgtgtggcgctgccagctttaattaacatcaaagccgtgattgaacagaggcagtgtactggagtttggaaccagaaagatgaattacctattgaagtggaccttggtaaaaagtgctggtatcactctatatttgcctgccccattcttcgtcagcaaacaacagataacaatccacccatgaaattggtctgtggtcatattatatcaagagatgccctgaataaaatgtttaatggtagcaaattaaaatgtccctactgtccaatggaacaaagtccaggagatgccaaacagatatttttctgaagagataactttagtttgcaatttgtaagtgaaactgaatcgtgggtgcatttcagaagagaacgttccatataatgcagctaaccaaggactcctgtgtttctataagctaatgctccagaaactttgccaacctgttagtgtacacacactgaggggagtgctcccggtgaatattatcatagggctttattatattcttggtcttcatttctgatcaagtaaatacaccagcagttgtcattcaatgcaggtttttgtacttaattatatggtgatttttttactttttaagagcagaaacggaaattgacctccccgccatgtgtttaatattcctcctgcttttacttttgtcattttcttgataatcgtaagccttgagagtgtttgtgaaaaagttttatttcctgttatgtatacataattaaatgaaaattcttcagaaaaagtttgataaattgaattgtggttatgaaactaatttgcatttttatttgcttaagaaagaaagctgtgatagattccagatatgctttttgatgttttcctctgctccagctccaagaagtcagcacacctgcattttagctctgcatgcagccccagcaggctgcgtgtttaagaatttcattgtttaactggctggtgtgagaagtcttccgttagcatagagtggaaggagtactattgtttggttgggtttttgtttgtttgttttttgtttttgcttttattgccaagaggtgcttgttttaaaagtatgtttaataaaatgaaattctaaagttagaagtgttcttaagttgatatttactctcttggtcttggtagccctattatatcattgcagacacagtgttgtgcatgtgtgtattgtatatgtgcaccagcatcaaacattgtgtatctggaaggaaagcagcatgttccagttctaaaatgcagttaccagacccatcactttaaatccttaaagttagaagctagcaaattttctgtagtgcagaacgtttattgctgtttttgtgtttgaatagtataatgtttgatgcctctcttctgcaaagcgtatcatctcattgactgtgaatctgtatattattctgatggatacagataatgatcttttctcttgtgaggtatcttcatttatgcactgtccaaaaatagccatgtgtaagagtctttctgtatgacgaactacatggaaaagacttctgtggacataattctgaccgaaacccatgaagttacttcagtataagaagaacgttacacggaaatcaccaaatattttgcaactttatttcttctgacatggagtgaacatcaataggaatactttcaaagaaaatgaaaacacagaagcaaagagaaatgtggcacttcacattttaaactacagatggacttggtttgagggagggggaatcacagatttggtgctaagttaattagaaactggcagcgttttacagtagtacaccagcctggatgttttttctaaaatgtttacctgggagagctggggtttgtttgtgaggagaaagagtactgtggaaaacctctgcttgagtaccatgtggccaggcctatgtggatggctactccgtgctgtgcggcttcaccagcggttgggattggcccagcttggagtgcttgtgtggtccaacctcagtctggccccatagtgacttttgccccatgattctgcttcactgttggaatcctctttgaagttccccctctctttgctaaagcagtgaaggaagagaacagagacaaactctttggactgtgaaagagaaggtagagaattccaggcaacagtctgaccaagggtgtaaaccagtttattatatatatatttttcctttgaattaaaacctagagtgttgtatttttctttctttcttttttttttttttttttttaccctttttctccttaggccaagtttagcttattcttatctttccacccaaacacctacacaacgtttaggcttcctgtaaggtttgaatgagacagatgtactctgaaggctggtggtaaatgtgtttgatgaccagactcttcatacagtcggcttgggccactttaaaggacaaaagccagagctcagctttatccctctcccagtgctgggagccaaaaaactgttgacggttttttgtgcagctcaagaaaactttgaaaagaacatgctttaactgaagcattggactctgcagctttctgtgtaaggcccgtgtactcccactgggcagggtgaggaccaaaaatctgaaactcttatgaatctgacatattatatggaaattatatcttgtgaccgtcttcaagtgcatggacttaaaattcatgagagactaaatgtgagggagaggtggatttaaagaggccagaccttaaccaaagatgctgagatacagcattctgtcccccctgccctagaaactccataaatgctgtcacaaccctatcattgctgatgctttctgcatgtcagcagtccaggaggatgctttttgtctctctttgcctccactttacaaaagataatatgatagaggcaacgtttataacagtcacatttaattataatgtacatcaaaggcagaatttcagaatggtttcttaaatttccttgggaacggtttccacatatcagttatagacaaaggccatgggactatgctaaaccaataaaaccttattagcaaatctttagattctgacttagccagagcatctgagtgttcaagtacagttttacagtggctaaggttgtctcttgatcttttttctccgttgtgtgatcacagatgctatttctgttttattggtgattatacgagacttctaatacataaatgaacgggtattggtgcctctttattttaaaaaatttgaagaaaagagccacctcatattcatagggtgtgtattttttgagtgtgagcatttaattgaaaataagaaagctatgaagtaaatgttaacttctctgtagcagctaatgcatagagacactaaaacccacaccacattttgtgggaaatgaggatcctgatcctcttttgtcctctccaggtagtctcgcaggttatgcagcttaagttcagtcttctttatgctgcgattgatttccacctcagtggcttagcctttgggacagtggatactgcaacagccaagaactcttggttatccgcacaagctgctggtagactacattagccctctggttttccagctcaacctctgataaagtggactgagagccacgctgctcagtctgtttcgtcagccgactcaggttattttcagggaaggcatggaggcatagtttggttagtttcatcactaggatgtataaggtgacgacacaaaccaaatacctttctttcatcacttaactatacgtactttatctctggtaacactagaatgctgtggtcttgagggaatgttagcaaggaacacatagaagatttggtgtttcataagcctgtctaggtgtggcaggttttgtgtggtacactgatgtttaccataagcaggtacaagcttcatgaaccgttcttaatgaactataattgaatagataccaaaaatagaatgacaaatgtattttaatagcagatgaggcagttttaggatgaattttccactgttgattttacttcaagacatagcaagagaaacaaaattttgttttcaagacatttccactgcagtttcaagctgtagtgggcatatgcttcatttacttccaaagaggcaaaagcagctggaattggcttacagcacatgctttgtttcatgttatgggtgaggacctacatacactcttactttagcagtcacttaaccttctccagcaaggcagttgtggggttcactaggatttagtgcctgatcttttttttgggaaggggcgggaatgaatgtgttggggctgggagggaagcagaagaaaatgggagtgtgagtgagtgtgcatgtgtctgaagttcaccattgcccccacctgcacctagcaaggaacaggtgtttgatgtattttgctcatgactgcagtatgcatgtatttttttccttctctgtgttttctaaacttacactaaaggattcatcaaatcatcttgttcagatggctcaggattgtatttattttgcttaccccgtgctcttgggttctatagtatttctataattatgtaacgagaatagtgttgcactgtaatctatcatatagagctatatgtatggaaaattttgatcaattttttaagaaatgtatcctgtttgcaaaggcacagtaaagttgcatcttatagactataggcaataaagctaacaataaaccttatttaaca

SEQ ID NO: 442527 - DNA, 5550 bp, Homo sapiens
acctgcagttataacaaaaggagtttgacagtgtattgcatttcctcaacctctatatattttataatcttagctttaatttttaatgcatgtgaccagaaaataagctatggaagtttacttatctacctcagtagtttatactggaaaatcagaatggtagaagggagctcagaagtgtccagaaaacaatcgaatgcattgcttattcatgcttcttttccaagagcagcaaataagttacgagcttgaatgtagttagattttgagtaattttgattctgacattagcagtgtgggaatagatggctgctggcaggcagacagccaaaggcttctcaatgaagtgatggtggagcacttctttcgacaaggaatgctggatgtggctgaggagctctgtcaggaatctggtctttctgtagacccaagtcagaaggaaccatttgtggagttaaatagaatattagaggcattaaaggtcagagttctgagacctgctctggagtgggcagtgtcaaaccgggaaatgcttatagctcaaaacagctccttggaatttaagctacacagactgtattttattagcttgttaatgggtggaaccacaaatcagcgagaggcattacaatatgctaaaaattttcagccatttgccctaaatcatcaaaaagacattcaggttttgatgggaagccttgtgtacctgagacaagggattgagaactcaccatatgttcacctacttgatgcaaaccagtgggctgatatctgtgacatctttacacgggatgcttgtgccctcctggggctctccgtggagtcccctctcagtgtcagtttctcagcaggttgtgtggcgctgccagctttaattaacatcaaagccgtgattgaacagaggcagtgtactggagtttggaaccagaaagatgaattacctattgaagtggaccttggtaaaaagtgctggtatcactctatatttgcctgccccattcttcgtcagcaaacaacagataacaatccacccatgaaattggtctgtggtcatattatatcaagagatgccctgaataaaatgtttaatggtagcaaattaaaatgtccctactgtccaatggaacaaagtccaggagatgccaaacagatatttttctgaagagataactttagtttgcaatttgtaagtgaaactgaatcgtgggtgcatttcagaagagaacgttccatataatgcagctaaccaaggactcctgtgtttctataagctaatgctccagaaactttgccaacctgttagtgtacacacactgaggggagtgctcccggtgaatattatcatagggctttattatattcttggtcttcatttctgatcaagtaaatacaccagcagttgtcattcaatgcaggtttttgtacttaattatatggtgatttttttactttttaagagcagaaacggaaattgacctccccgccatgtgtttaatattcctcctgcttttacttttgtcattttcttgataatcgtaagccttgagagtgtttgtgaaaaagttttatttcctgttatgtatacataattaaatgaaaattcttcagaaaaagtttgataaattgaattgtggttatgaaactaatttgcatttttatttgcttaagaaagaaagctgtgatagattccagatatgctttttgatgttttcctctgctccagctccaagaagtcagcacacctgcattttagctctgcatgcagccccagcaggctgcgtgtttaagaatttcattgtttaactggctggtgtgagaagtcttccgttagcatagagtggaaggagtactattgtttggttgggtttttgtttgtttgttttttgtttttgcttttattgccaagaggtgcttgttttaaaagtatgtttaataaaatgaaattctaaagttagaagtgttcttaagttgatatttactctcttggtcttggtagccctattatatcattgcagacacagtgttgtgcatgtgtgtattgtatatgtgcaccagcatcaaacattgtgtatctggaaggaaagcagcatgttccagttctaaaatgcagttaccagacccatcactttaaatccttaaagttagaagctagcaaattttctgtagtgcagaacgtttattgctgtttttgtgtttgaatagtataatgtttgatgcctctcttctgcaaagcgtatcatctcattgactgtgaatctgtatattattctgatggatacagataatgatcttttctcttgtgaggtatcttcatttatgcactgtccaaaaatagccatgtgtaagagtctttctgtatgacgaactacatggaaaagacttctgtggacataattctgaccgaaacccatgaagttacttcagtataagaagaacgttacacggaaatcaccaaatattttgcaactttatttcttctgacatggagtgaacatcaataggaatactttcaaagaaaatgaaaacacagaagcaaagagaaatgtggcacttcacattttaaactacagatggacttggtttgagggagggggaatcacagatttggtgctaagttaattagaaactggcagcgttttacagtagtacaccagcctggatgttttttctaaaatgtttacctgggagagctggggtttgtttgtgaggagaaagagtactgtggaaaacctctgcttgagtaccatgtggccaggcctatgtggatggctactccgtgctgtgcggcttcaccagcggttgggattggcccagcttggagtgcttgtgtggtccaacctcagtctggccccatagtgacttttgccccatgattctgcttcactgttggaatcctctttgaagttccccctctctttgctaaagcagtgaaggaagagaacagagacaaactctttggactgtgaaagagaaggtagagaattccaggcaacagtctgaccaagggtgtaaaccagtttattatatatatatttttcctttgaattaaaacctagagtgttgtatttttctttctttcttttttttttttttttttttaccctttttctccttaggccaagtttagcttattcttatctttccacccaaacacctacacaacgtttaggcttcctgtaaggtttgaatgagacagatgtactctgaaggctggtggtaaatgtgtttgatgaccagactcttcatacagtcggcttgggccactttaaaggacaaaagccagagctcagctttatccctctcccagtgctgggagccaaaaaactgttgacggttttttgtgcagctcaagaaaactttgaaaagaacatgctttaactgaagcattggactctgcagctttctgtgtaaggcccgtgtactcccactgggcagggtgaggaccaaaaatctgaaactcttatgaatctgacatattatatggaaattatatcttgtgaccgtcttcaagtgcatggacttaaaattcatgagagactaaatgtgagggagaggtggatttaaagaggccagaccttaaccaaagatgctgagatacagcattctgtcccccctgccctagaaactccataaatgctgtcacaaccctatcattgctgatgctttctgcatgtcagcagtccaggaggatgctttttgtctctctttgcctccactttacaaaagataatatgatagaggcaacgtttataacagtcacatttaattataatgtacatcaaaggcagaatttcagaatggtttcttaaatttccttgggaacggtttccacatatcagttatagacaaaggccatgggactatgctaaaccaataaaaccttattagcaaatctttagattctgacttagccagagcatctgagtgttcaagtacagttttacagtggctaaggttgtctcttgatcttttttctccgttgtgtgatcacagatgctatttctgttttattggtgattatacgagacttctaatacataaatgaacgggtattggtgcctctttattttaaaaaatttgaagaaaagagccacctcatattcatagggtgtgtattttttgagtgtgagcatttaattgaaaataagaaagctatgaagtaaatgttaacttctctgtagcagctaatgcatagagacactaaaacccacaccacattttgtgggaaatgaggatcctgatcctcttttgtcctctccaggtagtctcgcaggttatgcagcttaagttcagtcttctttatgctgcgattgatttccacctcagtggcttagcctttgggacagtggatactgcaacagccaagaactcttggttatccgcacaagctgctggtagactacattagccctctggttttccagctcaacctctgataaagtggactgagagccacgctgctcagtctgtttcgtcagccgactcaggttattttcagggaaggcatggaggcatagtttggttagtttcatcactaggatgtataaggtgacgacacaaaccaaatacctttctttcatcacttaactatacgtactttatctctggtaacactagaatgctgtggtcttgagggaatgttagcaaggaacacatagaagatttggtgtttcataagcctgtctaggtgtggcaggttttgtgtggtacactgatgtttaccataagcaggtacaagcttcatgaaccgttcttaatgaactataattgaatagataccaaaaatagaatgacaaatgtattttaatagcagatgaggcagttttaggatgaattttccactgttgattttacttcaagacatagcaagagaaacaaaattttgttttcaagacatttccactgcagtttcaagctgtagtgggcatatgcttcatttacttccaaagaggcaaaagcagctggaattggcttacagcacatgctttgtttcatgttatgggtgaggacctacatacactcttactttagcagtcacttaaccttctccagcaaggcagttgtggggttcactaggatttagtgcctgatcttttttttgggaaggggcgggaatgaatgtgttggggctgggagggaagcagaagaaaatgggagtgtgagtgagtgtgcatgtgtctgaagttcaccattgcccccacctgcacctagcaaggaacaggtgtttgatgtattttgctcatgactgcagtatgcatgtatttttttccttctctgtgttttctaaacttacactaaaggattcatcaaatcatcttgttcagatggctcaggattgtatttattttgcttaccccgtgctcttgggttctatagtatttctataattatgtaacgagaatagtgttgcactgtaatctatcatatagagctatatgtatggaaaattttgatcaattttttaagaaatgtatcctgtttgcaaaggcacagtaaagttgcatcttatagactataggcaataaagctaacaataaaccttatttaaca

SEQ ID NO: 442528 - DNA, 2705 bp, Homo sapiens
tgggaaattttattaaaagggtttttttcatagaaaaacccgccgatccagggccctggaaccttggggacccaaataaaggggcaattcatatttatgtgcaaacccttagtggtttttatgatgagtattgatggtatattggttatgttcatgtccggagagtatattttgaagaggatagctattagaaggattatggatcgtttgcttgcgtgaggaaaatacttccaaaaaactgttgacggttttttgtgcagctcaagaaaactttgaaaagaacatgctttaactgaagcattggactctgcagctttctgtgtaaggcccgtgtactcccactgggcagggtgaggaccaaaaatctgaaactcttatgaatctgacatattatatggaaattatatcttgtgaccgtcttcaagtgcatggacttaaaattcatgagagactaaatgtgagggagaggtggatttaaagaggccagaccttaaccaaagatgctgagatacagcattctgtcccccctgccctagaaactccataaatgctgtcacaaccctatcattgctgatgctttctgcatgtcagcagtccaggaggatgctttttgtctctctttgcctccactttacaaaagataatatgatagaggcaacgtttataacagtcacatttaattataatgtacatcaaaggcagaatttcagaatggtttcttaaatttccttgggaacggtttccacatatcagttatagacaaaggccatgggactatgctaaaccaataaaaccttattagcaaatctttagattctgacttagccagagcatctgagtgttcaagtacagttttacagtggctaaggttgtctcttgatcttttttctccgttgtgtgatcacagatgctatttctgttttattggtgattatacgagacttctaatacataaatgaacgggtattggtgcctctttattttaaaaaatttgaagaaaagagccacctcatattcatagggtgtgtattttttgagtgtgagcatttaattgaaaataagaaagctatgaagtaaatgttaacttctctgtagcagctaatgcatagagacactaaaacccacaccacattttgtgggaaatgaggatcctgatcctcttttgtcctctccaggtagtctcgcaggttatgcagcttaagttcagtcttctttatgctgcgattgatttccacctcagtggcttagcctttgggacagtggatactgcaacagccaagaactcttggttatccgcacaagctgctggtagactacattagccctctggttttccagctcaacctctgataaagtggactgagagccacgctgctcagtctgtttcgtcagccgactcaggttattttcagggaaggcatggaggcatagtttggttagtttcatcactaggatgtataaggtgacgacacaaaccaaatacctttctttcatcacttaactatacgtactttatctctggtaacactagaatgctgtggtcttgagggaatgttagcaaggaacacatagaagatttggtgtttcataagcctgtctaggtgtggcaggttttgtgtggtacactgatgtttaccataagcaggtacaagcttcatgaaccgttcttaatgaactataattgaatagataccaaaaatagaatgacaaatgtattttaatagcagatgaggcagttttaggatgaattttccactgttgattttacttcaagacatagcaagagaaacaaaattttgttttcaagacatttccactgcagtttcaagctgtagtgggcatatgcttcatttacttccaaagaggcaaaagcagctggaattggcttacagcacatgctttgtttcatgttatgggtgaggacctacatacactcttactttagcagtcacttaaccttctccagcaaggcagttgtggggttcactaggatttagtgcctgatcttttttttgggaaggggcgggaatgaatgtgttggggctgggagggaagcagaagaaaatgggagtgtgagtgagtgtgcatgtgtctgaagttcaccattgcccccacctgcacctagcaaggaacaggtgtttgatgtattttgctcatgactgcagtatgcatgtatttttttccttctctgtgttttctaaacttacactaaaggattcatcaaatcatcttgttcagatggctcaggattgtatttattttgcttaccccgtgctcttgggttctatagtatttctataattatgtaacgagaatagtgttgcactgtaatctatcatatagagctatatgtatggaaaattttgatcaattttttaagaaatgtatcctgtttgcaaaggcacagtaaagttgcatcttatagactataggcaataaagctaacaataaaccttatttaacacaaaccacatccatatcctctgttcatttgattttggaaaaagtagcatatccagtagtttcagggaattcattttaactttaagaattctgatatatttaatttataaatttcggactgatataatagagttttggaaaactataagaaatgctttgttaatgtgtgtattcctatgtaaaacacatggcttttcctgtgtatatttttaaaaattaaagaaatgcacatttaaaaagtg

SEQ ID NO: 442529 - DNA, 1839 bp, Homo sapiens
  misc_feature (1827)..(1827): n is a, c, g, or t
catccccctccccccagtcggcggcgcttggtgccgcccgggagaaccaggtcatcggtcggttcccgtgaaaacaaaaacaatcggccgcgccgtcgcaggcacccgaacgtcgcgagcggggcctggggacgcggggccgagtgcagcgagcgaacgggagcagcggcgactcgccggggggctagggcgccatggggcaggcgggctccggctgcgcggggctcccccggcgccgcggctagtgcgcccgccgcctcggccgcctcagcctcccgcgccgcccgcttggggaacgaggagcaggacgcggcctcggcggggcccgggccgaacggctgcggacacctgggcgccgaggagccgagcgccgccgcctccggcatggatcagtgcgtgacggtggagcgcgagctggagaaggtgctgcacaagttctcgggctacgggcagctgtgcgagcgcggcctggaggagctcatcgactacaccggcggtctcaagcacgagatcctgcagagccacggccaagatgctgaattatcagggacactttcacttgttttgacacagtgctgtaaaagaataaaggatactgttcaaaaattggcctccgaccacaaagacatccacagcagtgtttctcgggttggaaaagccattgataaggattcactttaagagatttggaaactcttccctttggaattgctcttcccatcagagatgcaatttatcactgtcgtgaacagcctgcctcagactggccagaagctgtctgtctcttgattggacgtcaggatctttccaagcaggcctgcgaaggaaacttacccaaagggaagtctgtgctctcatcagatgttccttcaggaacagaaactgaggaggaagatgacggcatgaatgacatgaatcacgaggtcatgtcattaatatggagtgaagatttaagggtgcaggatgtgcgaaggcttcttcagagtgcgcatcctgtccgtgtcaatgtagtgcagtacccagagctcagtgaccacgagttcatcgaggaaaaggaaaacagattgctccaattgtgtcagcgaactatggctcttcctgtaggacgaggaatgtttaccttgttttcgtaccatcctgttccaacagagccattgcctattcctaaattgaatctgactgggcgtgcccctcctcggaacacaacagtagaccttaatagtggaaacatcgatgtgcctcccaacatgacaagctgggccagctttcataatggtgtggctgctggcctgaagatagctcctgcctcccagatcgactcagcttggattgtttacaataagcccaagcatgctgagttggccaatgagtatgctggctttctcatggctctgggtttgaatgggcaccttaccaagctggcgactctcaatatccatgactacttgaccaagggccatgaaatgacaagcattggactgctacttggtgtttctgctgcaaaactaggcaccatggatatgtctattactcggcttcttagcattcgcattcctgctctcttacccccaacgtccacagagctggatgttcctcacaatgtccaagtggctgcagtggttggcattggccttgtatatcaagggacagctcacagacatactgcagaagtcctgttgggctgagataggacggcctcctggtcctgaaatggaatactgcactgacagagagtcatactccttagctgctggcttggccctgggcatggtctgcttgggggcatggcaagcaaatttggatagggtatggctggatcttcaatgngccctgaacaag

SEQ ID NO: 442530 - DNA, 1851 bp, Homo sapiens
catccccctccccccagtcggcggcgcttggtgccgcccgggagaaccaggtcatcggtcggttcccgtgaaaacaaaaacaatcggccgcgccgtcgcaggcacccgaacgtcgcgagcggggcctggggacgcggggccgagtgcagcgagcgaacgggagcagcggcgactcgccggggggctagggcgccatggggcaggcgggctccggctgcgcggggctcccccggcgccgcggctagtgcgcccgccgcctcggccgcctcagcctcccgcgccgcccgcttggggaacgaggagcaggacgcggcctcggcggggcccgggccgaacggctgcggacacctgggcgccgaggagccgagcgccgccgcctccggcatggatcagtgcgtgacggtggagcgcgagctggagaaggtgctgcacaagttctcgggctacgggcagctgtgcgagcgcggcctggaggagctcatcgactacaccggcggtctcaagcacgagatcctgcagagccacggccaagatgctgaattatcagggacactttcacttgttttgacacagtgctgtaaaagaataaaggatactgttcaaaaattggcctccgaccacaaagacatccacagcagtgtttctcgggttggaaaagccattgataaggattcactttaagagatttggaaactcttccctttggaattgctcttcccatcagagatgcaatttatcactgtcgtgaacagcctgcctcagactggccagaagctgtctgtctcttgattggacgtcaggatctttccaagcaggcctgcgaaggaaacttacccaaagggaagtctgtgctctcatcagatgttccttcaggaacagaaactgaggaggaagatgacggcatgaatgacatgaatcacgaggtcatgtcattaatatggagtgaagatttaagggtgcaggatgtgcgaaggcttcttcagagtgcgcatcctgtccgtgtcaatgtagtgcagtacccagagctcagtgaccacgagttcatcgaggaaaaggaaaacagattgctccaattgtgtcagcgaactatggctcttcctgtaggacgaggaatgtttaccttgttttcgtaccatcctgttccaacagagccattgcctattcctaaattgaatctgactgggcgtgcccctcctcggaacacaacagtagaccttaatagtggaaacatcgatgtgcctcccaacatgacaagctgggccagctttcataatggtgtggctgctggcctgaagatagctcctgcctcccagatcgactcagcttggattgtttacaataagcccaagcatgctgagttggccaatgagtatgctggctttctcatggctctgggtttgaatgggcaccttaccaagctggcgactctcaatatccatgactacttgaccaagggccatgaaatgacaagcattggactgctacttggtgtttctgctgctgctctcttacccccaacgtccacagagctggatgttcctcacaatgtccaagtggctgcagtggttggcattggccttgtatatcaagggacagctcacagacatactgcagaagtcctgttgggctgagataggacggcctcctggtcctgaaatggaatactgcactgacagagagtcatactccttagctgctggcttggccctgggcatggtctgcttggggcatggcagcaatttgataggtatgtctgatctcaatgtgcctgagcagctctatcagtacatggttggaggacgtaggcgctttcaaacaggaatgcatagggagaaacataaatcaccaagt

SEQ ID NO: 442531 - DNA, 1653 bp, Homo sapiens
catccccctccccccagtcggcggcgcttggtgccgcccgggagaaccaggtcatcggtcggttcccgtgaaaacaaaaacaatcggccgcgccgtcgcaggcacccgaacgtcgcgagcggggcctggggacgcggggccgagtgcagcgagcgaacgggagcagcggcgactcgccggggggctagggcgccatggggcaggcgggctccggctgcgcggggctcccccggcgccgcggctagtgcgcccgccgcctcggccgcctcagcctcccgcgccgcccgcttggggaacgaggagcaggacgcggcctcggcggggcccgggccgaacggctgcggacacctgggcgccgaggagccgagcgccgccgcctccggcatggatcagtgcgtgacggtggagcgcgagctggagaaggtgctgcacaagttctcgggctacgggcagctgtgcgagcgcggcctggaggagctcatcgactacaccggcggtctcaagcacgagatcctgcagagccacggccaagatgctgaattatcagggacactttcacttgttttgacacagtgctgtaaaagaataaaggatactgttcaaaaattggcctccgaccacaaagacatccacagcagtgtttctcgggttggaaaagccattgataaggattcactttaagagatttggaaactcttccctttggaattgctcttcccatcagagatgcaatttatcactgtcgtgaacagcctgcctcagactggccagaagctgtctgtctcttgattggacgtcaggatctttccaagcaggcctgcgaaggaaacttacccaaagggaagtctgtgctctcatcagatgttccttcaggaacagaaactgaggaggaagatgacggcatgaatgacatgaatcacgaggtcatgtcattaatatggagtgaagatttaagggtgcaggatgtgcgaaggcttcttcagagtgcgcatcctgtccgtgtcaatgtagtgcagtacccagagctcagtgaccacgagttcatcgaggaaaaggaaaacaggtgaaagaaaacacgtgcactatctcttgtcatgtttcattgttacatttgtgtcttgtgtatatttgtttttccttcaagtttttagcatttaaaaccctaaagagatttaaaagatactttcaagtgaaaatatgccctgtgttttaagttttcatccaacttcaacaaacacgtgtgttagcaaaatgtctttggcttttgaggacgtaattgttgtatttcatatcgtcctcctcttgaaatacatataacactttactctttagaaaaggtgaatgtaaaactattttgcctgatagttaccttaagaatttacaaacaaagaaaacactggacttgtttttctgtgtcttgatcaggaatagattttgaggttagtggggtttttagtgtagtttaaacttgtatgagtattttttttttttggatatgatagatgatactccaaataaaaatagataagcctttcttctgccactcccctgcacaggatacatcccttgatacattataagactcacatgcctatgacattccagagctattctcttgggacacttctgttttaaaattctctcctgttcttt

SEQ ID NO: 442532 - DNA, 363 bp, Homo sapiens
gggaggcaaagagtctgtcctggagccataatggagccataaggatggtggttcccatgtgagctaaaatatccctacctcagaggagtcgggctttcagggccatgaaatgacaagcattggactgctacttggtgtttctgctgcaaaactaggcaccatggatatgtctattactcggcttcttagcattcgcattcctgctctcttacccccaacgtccacagagctggatgttcctcacaatgtccaagtggctgcagtggttggcattggccttgtatatcaagggacagctcacagacatactgcagaagtcctgttgggctgagataggtatgggattaatagtgctgaatcttc

SEQ ID NO: 442533 - DNA, 667 bp, Homo sapiens
caactaattttcaggtatcaggattacttaaaatctaatacatcttgtattttcagtgcgggtaaaaaggactattttagcctgaaggaaattattgtaccattgactcttgaacaacatgagtttgagttgtgtgggtccacttacaatgaaattcttttcagccaaatgcagatagaaaatgcagtattctctgatgtgaaacccatatgcaggttctgcagggccagttgtccaggaccttgagcatgcacggaatttgggtaccgccatggggtgtccctaaccaatcccctgaggtattctgagggccttgactgtacctttcagcctgccacagtattgccttatctaattttttttagatgttgtttgctaaatgattcttaatttcaaatgttttctacatgttacatgttttctttaccaggatgactatcaaaattgtttcattttgttgccttttagccccccagaagttgcaagtagaacaagaggaaaacaggtgacttttatttagactgtgcttttatgtcaaacacttaaaacaatattatttactgttctgcttaataactttatgttttattctcttataggtttagtttcaggcattctacatctgtttctagtctagctgaaagattggttgtctggatgactaatg

SEQ ID NO: 442534 - DNA, 354 bp, Homo sapiens
gagtaagaacctgcagttataacaaaaggagtttgacagtgtattgcatttcctcaacctctatatattttataatcttagctttaatttttaatgcatgtgaccagaaaataagctatggaagtttacttatctacctcagtagtttatactggaaaatcagaatggtagaagggagctcagaagtgtccagaaaacaatcgaatgcattgcttattcatgcttcttttccaagagcagcaaataagttacgagcttgaatgtagttagattttgagtgtaagggtgtttgacttttcttacctatgtagtagtgaccatagtaagccttaagaaaatagagatacacatagg

SEQ ID NO: 442535 - DNA, 2482 bp, Homo sapiens
catccccctccccccagtcggcggcgcttggtgccgcccgggagaaccaggtcatcggtcggttcccgtgaaaacaaaaacaatcggccgcgccgtcgcaggcacccgaacgtcgcgagcggggcctggggacgcggggccgagtgcagcgagcgaacgggagcagcggcgactcgccggggggctagggcgccatggggcaggcgggctccggctgcgcggggctcccccggcgccgcggctagtgcgcccgccgcctcggccgcctcagcctcccgcgccgcccgcttggggaacgaggagcaggacgcggcctcggcggggcccgggccgaacggctgcggacacctgggcgccgaggagccgagcgccgccgcctccggcatggatcagtgcgtgacggtggagcgcgagctggagaaggtgctgcacaagttctcgggctacgggcagctgtgcgagcgcggcctggaggagctcatcgactacaccggcggtctcaagcacgagatcctgcagagccacggccaagatgctgaattatcagggacactttcacttgttttgacacagtgctgtaaaagaataaaggatactgttcaaaaattggcctccgaccacaaagacatccacagcagtgtttctcgggttggaaaagccattgataagaattttgattctgacattagcagtgtgggaatagatggctgctggcaggcagacagccaaaggcttctcaatgaagtgatggtggagcacttctttcgacaaggaatgctggatgtggctgaggagctctgtcaggaatctggtctttctgtagacccaagtcagaaggaaccatttgtggagttaaatagaatattagaggcattaaaggtcagagttctgagacctgctctggagtgggcagtgtcaaaccgggaaatgcttatagctcaaaacagctccttggaatttaagctacacagactgtattttattagcttgttaatgggtggaaccacaaatcagcgagaggcattacaatatgctaaaaattttcagccatttgccctaaatcatcaaaaagacattcaggttttgatgggaagccttgtgtacctgagacaagggattgagaactcaccatatgttcacctacttgatgcaaaccagtgggctgatatctgtgacatctttacacgggatgcttgtgccctcctggggctctccgtggagtcccctctcagtgtcagtttctcagcaggttgtgtggcgctgccagctttaattaacatcaaagccgtgattgaacagaggcagtgtactggagtttggaaccagaaagatgaattacctattgaagtggaccttggtaaaaagtgctggtatcactctatatttgcctgccccattcttcgtcagcaaacaacagataacaatccacccatgaaattggtctgtggtcatattatatcaagagatgccctgaataaaatgtttaatggtagcaaattaaaatgtccctactgtccaatggaacaaagtccaggagatgccaaacagatatttttctgaagagataactttagtttgcaatttgtaagtgaaactgaatcgtgggtgcatttcagaagagaacgttccatataatgcagctaaccaaggactcctgtgtttctataagctaatgctccagaaactttgccaacctgttagtgtacacacactgaggggagtgctcccggtgaatattatcatagggctttattatattcttggtcttcatttctgatcaagtaaatacaccagcagttgtcattcaatgcaggtttttgtacttaattatatggtgatttttttactttttaagagcagaaacggaaattgacctccccgccatgtgtttaatattcctcctgcttttacttttgtcattttcttgataatcgtaagccttgagagtgtttgtgaaaaagttttatttcctgttatgtatacataattaaatgaaaattcttcagaaaaagtttgataaattgaattgtggttatgaaactaatttgcatttttatttgcttaagaaagaaagctgtgatagattccagatatgctttttgatgttttcctctgctccagctccaagaagtcagcacacctgcattttagctctgcatgcagccccagcaggctgcgtgtttaagaatttcattgtttaactggctggtgtgagaagtcttccgttagcatagagtggaaggagtactattgtttggttgggtttttgtttgtttgttttttgtttttgctttcaaaaacaaaaacctgtaagctcccttccctctctctttcttgtcatttggtctctgcacatgccagctccccttctccttctgccataaatggaattaacctaaagccctcaccagaagcagacgctggcactgtgcttcctgtgcagtctgcagaaccgtaaaccaaataaatctcctttcgttat

SEQ ID NO: 442536 - DNA, 5948 bp, Homo sapiens
catccccctccccccagtcggcggcgcttggtgccgcccgggagaaccaggtcatcggtcggttcccgtgaaaacaaaaacaatcggccgcgccgtcgcaggcacccgaacgtcgcgagcggggcctggggacgcggggccgagtgcagcgagcgaacgggagcagcggcgactcgccggggggctagggcgccatggggcaggcgggctccggctgcgcggggctcccccggcgccgcggctagtgcgcccgccgcctcggccgcctcagcctcccgcgccgcccgcttggggaacgaggagcaggacgcggcctcggcggggcccgggccgaacggctgcggacacctgggcgccgaggagccgagcgccgccgcctccggcatggatcagtgcgtgacggtggagcgcgagctggagaaggtgctgcacaagttctcgggctacgggcagctgtgcgagcgcggcctggaggagctcatcgactacaccggcggtctcaagcacgagatcctgcagagccacggccaagatgctgaattatcagggacactttcacttgttttgacacagtgctgtaaaagaataaaggatactgttcaaaaattggcctccgaccacaaagacatccacagcagtgtttctcgggttggaaaagccattgataagaattttgattctgacattagcagtgtgggaatagatggctgctggcaggcagacagccaaaggcttctcaatgaagtgatggtggagcacttctttcgacaaggaatgctggatgtggctgaggagctctgtcaggaatctggtctttctgtagacccaagtcagaaggaaccatttgtggagttaaatagaatattagaggcattaaaggtcagagttctgagacctgctctggagtgggcagtgtcaaaccgggaaatgcttatagctcaaaacagctccttggaatttaagctacacagactgtattttattagcttgttaatgggtggaaccacaaatcagcgagaggcattacaatatgctaaaaattttcagccatttgccctaaatcatcaaaaagacattcaggttttgatgggaagccttgtgtacctgagacaagggattgagaactcaccatatgttcacctacttgatgcaaaccagtgggctgatatctgtgacatctttacacgggatgcttgtgccctcctggggctctccgtggagtcccctctcagtgtcagtttctcagcaggttgtgtggcgctgccagctttaattaacatcaaagccgtgattgaacagaggcagtgtactggagtttggaaccagaaagatgaattacctattgaagtggaccttggtaaaaagtgctggtatcactctatatttgcctgccccattcttcgtcagcaaacaacagataacaatccacccatgaaattggtctgtggtcatattatatcaagagatgccctgaataaaatgtttaatggtagcaaattaaaatgtccctactgtccaatggaacaaagtccaggagatgccaaacagatatttttctgaagagataactttagtttgcaatttgtaagtgaaactgaatcgtgggtgcatttcagaagagaacgttccatataatgcagctaaccaaggactcctgtgtttctataagctaatgctccagaaactttgccaacctgttagtgtacacacactgaggggagtgctcccggtgaatattatcatagggctttattatattcttggtcttcatttctgatcaagtaaatacaccagcagttgtcattcaatgcaggtttttgtacttaattatatggtgatttttttactttttaagagcagaaacggaaattgacctccccgccatgtgtttaatattcctcctgcttttacttttgtcattttcttgataatcgtaagccttgagagtgtttgtgaaaaagttttatttcctgttatgtatacataattaaatgaaaattcttcagaaaaagtttgataaattgaattgtggttatgaaactaatttgcatttttatttgcttaagaaagaaagctgtgatagattccagatatgctttttgatgttttcctctgctccagctccaagaagtcagcacacctgcattttagctctgcatgcagccccagcaggctgcgtgtttaagaatttcattgtttaactggctggtgtgagaagtcttccgttagcatagagtggaaggagtactattgtttggttgggtttttgtttgtttgttttttgtttttgcttttattgccaagaggtgcttgttttaaaagtatgtttaataaaatgaaattctaaagttagaagtgttcttaagttgatatttactctcttggtcttggtagccctattatatcattgcagacacagtgttgtgcatgtgtgtattgtatatgtgcaccagcatcaaacattgtgtatctggaaggaaagcagcatgttccagttctaaaatgcagttaccagacccatcactttaaatccttaaagttagaagctagcaaattttctgtagtgcagaacgtttattgctgtttttgtgtttgaatagtataatgtttgatgcctctcttctgcaaagcgtatcatctcattgactgtgaatctgtatattattctgatggatacagataatgatcttttctcttgtgaggtatcttcatttatgcactgtccaaaaatagccatgtgtaagagtctttctgtatgacgaactacatggaaaagacttctgtggacataattctgaccgaaacccatgaagttacttcagtataagaagaacgttacacggaaatcaccaaatattttgcaactttatttcttctgacatggagtgaacatcaataggaatactttcaaagaaaatgaaaacacagaagcaaagagaaatgtggcacttcacattttaaactacagatggacttggtttgagggagggggaatcacagatttggtgctaagttaattagaaactggcagcgttttacagtagtacaccagcctggatgttttttctaaaatgtttacctgggagagctggggtttgtttgtgaggagaaagagtactgtggaaaacctctgcttgagtaccatgtggccaggcctatgtggatggctactccgtgctgtgcggcttcaccagcggttgggattggcccagcttggagtgcttgtgtggtccaacctcagtctggccccatagtgacttttgccccatgattctgcttcactgttggaatcctctttgaagttccccctctctttgctaaagcagtgaaggaagagaacagagacaaactctttggactgtgaaagagaaggtagagaattccaggcaacagtctgaccaagggtgtaaaccagtttattatatatatatttttcctttgaattaaaacctagagtgttgtatttttctttctttcttttttttttttttttttttaccctttttctccttaggccaagtttagcttattcttatctttccacccaaacacctacacaacgtttaggcttcctgtaaggtttgaatgagacagatgtactctgaaggctggtggtaaatgtgtttgatgaccagactcttcatacagtcggcttgggccactttaaaggacaaaagccagagctcagctttatccctctcccagtgctgggagccaaaaaactgttgacggttttttgtgcagctcaagaaaactttgaaaagaacatgctttaactgaagcattggactctgcagctttctgtgtaaggcccgtgtactcccactgggcagggtgaggaccaaaaatctgaaactcttatgaatctgacatattatatggaaattatatcttgtgaccgtcttcaagtgcatggacttaaaattcatgagagactaaatgtgagggagaggtggatttaaagaggccagaccttaaccaaagatgctgagatacagcattctgtcccccctgccctagaaactccataaatgctgtcacaaccctatcattgctgatgctttctgcatgtcagcagtccaggaggatgctttttgtctctctttgcctccactttacaaaagataatatgatagaggcaacgtttataacagtcacatttaattataatgtacatcaaaggcagaatttcagaatggtttcttaaatttccttgggaacggtttccacatatcagttatagacaaaggccatgggactatgctaaaccaataaaaccttattagcaaatctttagattctgacttagccagagcatctgagtgttcaagtacagttttacagtggctaaggttgtctcttgatcttttttctccgttgtgtgatcacagatgctatttctgttttattggtgattatacgagacttctaatacataaatgaacgggtattggtgcctctttattttaaaaaatttgaagaaaagagccacctcatattcatagggtgtgtattttttgagtgtgagcatttaattgaaaataagaaagctatgaagtaaatgttaacttctctgtagcagctaatgcatagagacactaaaacccacaccacattttgtgggaaatgaggatcctgatcctcttttgtcctctccaggtagtctcgcaggttatgcagcttaagttcagtcttctttatgctgcgattgatttccacctcagtggcttagcctttgggacagtggatactgcaacagccaagaactcttggttatccgcacaagctgctggtagactacattagccctctggttttccagctcaacctctgataaagtggactgagagccacgctgctcagtctgtttcgtcagccgactcaggttattttcagggaaggcatggaggcatagtttggttagtttcatcactaggatgtataaggtgacgacacaaaccaaatacctttctttcatcacttaactatacgtactttatctctggtaacactagaatgctgtggtcttgagggaatgttagcaaggaacacatagaagatttggtgtttcataagcctgtctaggtgtggcaggttttgtgtggtacactgatgtttaccataagcaggtacaagcttcatgaaccgttcttaatgaactataattgaatagataccaaaaatagaatgacaaatgtattttaatagcagatgaggcagttttaggatgaattttccactgttgattttacttcaagacatagcaagagaaacaaaattttgttttcaagacatttccactgcagtttcaagctgtagtgggcatatgcttcatttacttccaaagaggcaaaagcagctggaattggcttacagcacatgctttgtttcatgttatgggtgaggacctacatacactcttactttagcagtcacttaaccttctccagcaaggcagttgtggggttcactaggatttagtgcctgatcttttttttgggaaggggcgggaatgaatgtgttggggctgggagggaagcagaagaaaatgggagtgtgagtgagtgtgcatgtgtctgaagttcaccattgcccccacctgcacctagcaaggaacaggtgtttgatgtattttgctcatgactgcagtatgcatgtatttttttccttctctgtgttttctaaacttacactaaaggattcatcaaatcatcttgttcagatggctcaggattgtatttattttgcttaccccgtgctcttgggttctatagtatttctataattatgtaacgagaatagtgttgcactgtaatctatcatatagagctatatgtatggaaaattttgatcaattttttaagaaatgtatcctgtttgcaaaggcacagtaaagttgcatcttatagactataggcaataaagctaacaataaaccttatttaaca

SEQ ID NO: 442537 - DNA, 6189 bp, Homo sapiens
catccccctccccccagtcggcggcgcttggtgccgcccgggagaaccaggtcatcggtcggttcccgtgaaaacaaaaacaatcggccgcgccgtcgcaggcacccgaacgtcgcgagcggggcctggggacgcggggccgagtgcagcgagcgaacgggagcagcggcgactcgccggggggctagggcgccatggggcaggcgggctccggctgcgcggggctcccccggcgccgcggctagtgcgcccgccgcctcggccgcctcagcctcccgcgccgcccgcttggggaacgaggagcaggacgcggcctcggcggggcccgggccgaacggctgcggacacctgggcgccgaggagccgagcgccgccgcctccggcatggatcagtgcgtgacggtggagcgcgagctggagaaggtgctgcacaagttctcgggctacgggcagctgtgcgagcgcggcctggaggagctcatcgactacaccggcggtctcaagcacgagatcctgcagagccacggccaagatgctgaattatcagggacactttcacttgttttgacacagtgctgtaaaagaataaaggatactgttcaaaaattggcctccgaccacaaagacatccacagcagtgtttctcgggttggaaaagccattgataagaattttgattctgacattagcagtgtgggaatagatggctgctggcaggcagacagccaaaggcttctcaatgaagtgatggtggagcacttctttcgacaaggaatgctggatgtggctgaggagctctgtcaggaatctggtctttctgtagacccaagtcagaaggaaccatttgtggagttaaatagaatattagaggcattaaaggtcagagttctgagacctgctctggagtgggcagtgtcaaaccgggaaatgcttatagctcaaaacagctccttggaatttaagctacacagactgtattttattagcttgttaatgggtggaaccacaaatcagcgagaggcattacaatatgctaaaaattttcagccatttgccctaaatcatcaaaaagacattcaggttttgatgggaagccttgtgtacctgagacaagggattgagaactcaccatatgttcacctacttgatgcaaaccagtgggctgatatctgtgacatctttacacgggatgcttgtgccctcctggggctctccgtggagtcccctctcagtgtcagtttctcagcaggttgtgtggcgctgccagctttaattaacatcaaagccgtgattgaacagaggcagtgtactggagtttggaaccagaaagatgaattacctattgaagtggaccttggtaaaaagtgctggtatcactctatatttgcctgccccattcttcgtcagcaaacaacagataacaatccacccatgaaattggtctgtggtcatattatatcaagagatgccctgaataaaatgtttaatggtagcaaattaaaatgtccctactgtccaatggaacaaagtccaggagatgccaaacagatatttttctgaagagataactttagtttgcaatttgtaagtgaaactgaatcgtgggtgcatttcagaagagaacgttccatataatgcagctaaccaaggactcctgtgtttctataagctaatgctccagaaactttgccaacctgttagtgtacacacactgaggggagtgctcccggtgaatattatcatagggctttattatattcttggtcttcatttctgatcaagtaaatacaccagcagttgtcattcaatgcaggtttttgtacttaattatatggtgatttttttactttttaagagcagaaacggaaattgacctccccgccatgtgtttaatattcctcctgcttttacttttgtcattttcttgataatcgtaagccttgagagtgtttgtgaaaaagttttatttcctgttatgtatacataattaaatgaaaattcttcagaaaaagtttgataaattgaattgtggttatgaaactaatttgcatttttatttgcttaagaaagaaagctgtgatagattccagatatgctttttgatgttttcctctgctccagctccaagaagtcagcacacctgcattttagctctgcatgcagccccagcaggctgcgtgtttaagaatttcattgtttaactggctggtgtgagaagtcttccgttagcatagagtggaaggagtactattgtttggttgggtttttgtttgtttgttttttgtttttgcttttattgccaagaggtgcttgttttaaaagtatgtttaataaaatgaaattctaaagttagaagtgttcttaagttgatatttactctcttggtcttggtagccctattatatcattgcagacacagtgttgtgcatgtgtgtattgtatatgtgcaccagcatcaaacattgtgtatctggaaggaaagcagcatgttccagttctaaaatgcagttaccagacccatcactttaaatccttaaagttagaagctagcaaattttctgtagtgcagaacgtttattgctgtttttgtgtttgaatagtataatgtttgatgcctctcttctgcaaagcgtatcatctcattgactgtgaatctgtatattattctgatggatacagataatgatcttttctcttgtgaggtatcttcatttatgcactgtccaaaaatagccatgtgtaagagtctttctgtatgacgaactacatggaaaagacttctgtggacataattctgaccgaaacccatgaagttacttcagtataagaagaacgttacacggaaatcaccaaatattttgcaactttatttcttctgacatggagtgaacatcaataggaatactttcaaagaaaatgaaaacacagaagcaaagagaaatgtggcacttcacattttaaactacagatggacttggtttgagggagggggaatcacagatttggtgctaagttaattagaaactggcagcgttttacagtagtacaccagcctggatgttttttctaaaatgtttacctgggagagctggggtttgtttgtgaggagaaagagtactgtggaaaacctctgcttgagtaccatgtggccaggcctatgtggatggctactccgtgctgtgcggcttcaccagcggttgggattggcccagcttggagtgcttgtgtggtccaacctcagtctggccccatagtgacttttgccccatgattctgcttcactgttggaatcctctttgaagttccccctctctttgctaaagcagtgaaggaagagaacagagacaaactctttggactgtgaaagagaaggtagagaattccaggcaacagtctgaccaagggtgtaaaccagtttattatatatatatttttcctttgaattaaaacctagagtgttgtatttttctttctttcttttttttttttttttttttaccctttttctccttaggccaagtttagcttattcttatctttccacccaaacacctacacaacgtttaggcttcctgtaaggtttgaatgagacagatgtactctgaaggctggtggtaaatgtgtttgatgaccagactcttcatacagtcggcttgggccactttaaaggacaaaagccagagctcagctttatccctctcccagtgctgggagccaaaaaactgttgacggttttttgtgcagctcaagaaaactttgaaaagaacatgctttaactgaagcattggactctgcagctttctgtgtaaggcccgtgtactcccactgggcagggtgaggaccaaaaatctgaaactcttatgaatctgacatattatatggaaattatatcttgtgaccgtcttcaagtgcatggacttaaaattcatgagagactaaatgtgagggagaggtggatttaaagaggccagaccttaaccaaagatgctgagatacagcattctgtcccccctgccctagaaactccataaatgctgtcacaaccctatcattgctgatgctttctgcatgtcagcagtccaggaggatgctttttgtctctctttgcctccactttacaaaagataatatgatagaggcaacgtttataacagtcacatttaattataatgtacatcaaaggcagaatttcagaatggtttcttaaatttccttgggaacggtttccacatatcagttatagacaaaggccatgggactatgctaaaccaataaaaccttattagcaaatctttagattctgacttagccagagcatctgagtgttcaagtacagttttacagtggctaaggttgtctcttgatcttttttctccgttgtgtgatcacagatgctatttctgttttattggtgattatacgagacttctaatacataaatgaacgggtattggtgcctctttattttaaaaaatttgaagaaaagagccacctcatattcatagggtgtgtattttttgagtgtgagcatttaattgaaaataagaaagctatgaagtaaatgttaacttctctgtagcagctaatgcatagagacactaaaacccacaccacattttgtgggaaatgaggatcctgatcctcttttgtcctctccaggtagtctcgcaggttatgcagcttaagttcagtcttctttatgctgcgattgatttccacctcagtggcttagcctttgggacagtggatactgcaacagccaagaactcttggttatccgcacaagctgctggtagactacattagccctctggttttccagctcaacctctgataaagtggactgagagccacgctgctcagtctgtttcgtcagccgactcaggttattttcagggaaggcatggaggcatagtttggttagtttcatcactaggatgtataaggtgacgacacaaaccaaatacctttctttcatcacttaactatacgtactttatctctggtaacactagaatgctgtggtcttgagggaatgttagcaaggaacacatagaagatttggtgtttcataagcctgtctaggtgtggcaggttttgtgtggtacactgatgtttaccataagcaggtacaagcttcatgaaccgttcttaatgaactataattgaatagataccaaaaatagaatgacaaatgtattttaatagcagatgaggcagttttaggatgaattttccactgttgattttacttcaagacatagcaagagaaacaaaattttgttttcaagacatttccactgcagtttcaagctgtagtgggcatatgcttcatttacttccaaagaggcaaaagcagctggaattggcttacagcacatgctttgtttcatgttatgggtgaggacctacatacactcttactttagcagtcacttaaccttctccagcaaggcagttgtggggttcactaggatttagtgcctgatcttttttttgggaaggggcgggaatgaatgtgttggggctgggagggaagcagaagaaaatgggagtgtgagtgagtgtgcatgtgtctgaagttcaccattgcccccacctgcacctagcaaggaacaggtgtttgatgtattttgctcatgactgcagtatgcatgtatttttttccttctctgtgttttctaaacttacactaaaggattcatcaaatcatcttgttcagatggctcaggattgtatttattttgcttaccccgtgctcttgggttctatagtatttctataattatgtaacgagaatagtgttgcactgtaatctatcatatagagctatatgtatggaaaattttgatcaattttttaagaaatgtatcctgtttgcaaaggcacagtaaagttgcatcttatagactataggcaataaagctaacaataaaccttatttaacacaaaccacatccatatcctctgttcatttgattttggaaaaagtagcatatccagtagtttcagggaattcattttaactttaagaattctgatatatttaatttataaatttcggactgatataatagagttttggaaaactataagaaatgctttgttaatgtgtgtattcctatgtaaaacacatggcttttcctgtgtatatttttaaaaattaaagaaatgcacatttaaaaagtg

SEQ ID NO: 442538 - DNA, 1717 bp, Homo sapiens
catccccctccccccagtcggcggcgcttggtgccgcccgggagaaccaggtcatcggtcggttcccgtgaaaacaaaaacaatcggccgcgccgtcgcaggcacccgaacgtcgcgagcggggcctggggacgcggggccgagtgcagcgagcgaacgggagcagcggcgactcgccggggggctagggcgccatggggcaggcgggctccggctgcgcggggctcccccggcgccgcggctagtgcgcccgccgcctcggccgcctcagcctcccgcgccgcccgcttggggaacgaggagcaggacgcggcctcggcggggcccgggccgaacggctgcggacacctgggcgccgaggagccgagcgccgccgcctccggcatggatcagtgcgtgacggtggagcgcgagctggagaaggtgctgcacaagttctcgggctacgggcagctgtgcgagcgcggcctggaggagctcatcgactacaccggcggtctcaagcacgagatcctgcagagccacggccaagatgctgaattatcagggacactttcacttgttttgacacagtgctgtaaaagaataaaggatactgttcaaaaattggcctccgaccacaaagacatccacagcagtgtttctcgggttggaaaagccattgataaggattcactttaagagatttggaaactcttccctttggaattgctcttcccatcagagatgcaatttatcactgtcgtgaacagcctgcctcagactggccagaagctgtctgtctcttgattggacgtcaggatctttccaagcaggcctgcgaaggaaacttacccaaagggaagtctgtgctctcatcagatgttccttcaggaacagaaactgaggaggaagatgacggcatgaatgacatgaatcacgaggtcatgtcattaatatggagtgaagatttaagggtgcaggatgtgcgaaggcttcttcagagtgcgcatcctgtccgtgtcaatgtagtgcagtacccagagctcagtgaccacgagttcatcgaggaaaaggaaaacagattgctccaattgtgtcagcgaactatggctcttcctgtaggacgaggaatgtttaccttgttttcgtaccatcctgttccaacagagccattgcctattcctaaattgaatctgactgggcgtgcccctcctcggaacacaacagtagaccttaatagtggaaacatcgatgtgcctcccaacatgacaagctgggccagctttcataatggtgtggctgctggcctgaagatagctcctgcctcccagatcgactcagcttggattgtttacaataagcccaagcatgctgagttggccaatgagtatgctggctttctcatggctctgggtttgaatgggcaccttaccaagctggcgactctcaatatccatgactacttgaccaagggccatgaaatgacaagcattggactgctacttggtgtttctgctgcaaaactaggcaccatggatatgtctattactcggcttcttagcattcgcattcctgctctcttacccccaacgtccacagagctggatgttcctcacaatgtccaagtggctgcagtggttggcattggccttgtatatcaagggacagctcacagacatactgcagaagtcctgttgggctgagataggtatgggattaatagtgctgaatcttc

SEQ ID NO: 442539 - DNA, 1392 bp, Homo sapiens
  misc_feature (1380)..(1380): n is a, c, g, or t
cgggaatctgtgaaagaagcagacttgtagtcttgagtattgcactgtacatacttggtgatgagagcttggtttctgatgaatcctcacagtatttaaccagaataactatagccccccagaagttgcaagtagaacaagaggaaaacaggtttagtttcaggcattctacatctgtttctagtctagctgaaagattggttgtctggatgactaatgtaggattcactttaagagatttggaaactcttccctttggaattgctcttcccatcagagatgcaatttatcactgtcgtgaacagcctgcctcagactggccagaagctgtctgtctcttgattggacgtcaggatctttccaagcaggcctgcgaaggaaacttacccaaagggaagtctgtgctctcatcagatgttccttcaggaacagaaactgaggaggaagatgacggcatgaatgacatgaatcacgaggtcatgtcattaatatggagtgaagatttaagggtgcaggatgtgcgaaggcttcttcagagtgcgcatcctgtccgtgtcaatgtagtgcagtacccagagctcagtgaccacgagttcatcgaggaaaaggaaaacagattgctccaattgtgtcagcgaactatggctcttcctgtaggacgaggaatgtttaccttgttttcgtaccatcctgttccaacagagccattgcctattcctaaattgaatctgactgggcgtgcccctcctcggaacacaacagtagaccttaatagtggaaacatcgatgtgcctcccaacatgacaagctgggccagctttcataatggtgtggctgctggcctgaagatagctcctgcctcccagatcgactcagcttggattgtttacaataagcccaagcatgctgagttggccaatgagtatgctggctttctcatggctctgggtttgaatgggcaccttaccaagctggcgactctcaatatccatgactacttgaccaagggccatgaaatgacaagcattggactgctacttggtgtttctgctgcaaaactaggcaccatggatatgtctattactcggcttcttagcattcgcattcctgctctcttacccccaacgtccacagagctggatgttcctcacaatgtccaagtggctgcagtggttggcattggccttgtatatcaagggacagctcacagacatactgcagaagtcctgttgggctgagataggacggcctcctggtcctgaaatggaatactgcactgacagagagtcatactccttagctgctggcttggccctgggcatggtctgcttgggggcatggcaagcaaatttggatagggtatggctggatcttcaatgngccctgaacaag

SEQ ID NO: 442540 - DNA, 588 bp, Homo sapiens
tgagccggtccgtcatttaggtccatagcttattcctaaatagaatctgactgggcgtgcccctcctcggaacacaacagtagaccttaatagtggaaacatcgatgtgcctcccaacatgacaagctgggccagctttcataatggtgtggctgctggcctgaagatagctcctgcctcccagatcgactcagcttggattgtttacaataagcccaagcatgctgagttggccaatgagtatgctggctttctcatggctctgggtttgaatgggcaccttaccaagctggcgactctcaatatccatgactacttgaccaagggccatgaaatgacaagcattggactgctacttggtgtttctgctgcaaaactaggcaccatggatatgtctattactcggcttcttagcattcgcattcctgctctcttacccccaacgtccacagagctggatgttcctcacaatgtccaagtggctgcagtggttggcattggccttgtatatcaagggacagctcacagacatactgcagaagtcctgttgggctgagataggtatgggattaatagtgctgaatcttc

SEQ ID NO: 442541 - DNA, 3653 bp, Homo sapiens
aaatcccccaagttctcatgatccttgcttccctttccagtcacccttggtgccctgtacttcactgtggtcctgaactgaagagctgtgtttttcaggaagacttggccaggccgtgttccgtgtctctggattcaagtcccaggagtcctgaccagagagcaggcatcagtgtttttctgaccgaagttctcatttcctgacaatggaaatggaacaagaaaaaatgaccatgaataaggaattgagtccagacgcggctgcttactgctgctcggcctgccacggcgatgagacctggagttacaaccaccccatccggggccgggccaagtctcgcagcctgtctgcctcgcccgccctggggagcaccaaggagttcaggaggacacgctctcttcatgggccatgcccggtgaccacttttggaccaaaggcctgtgtgctgcagaacccccagaccatcatagccactcctttgtcactcgcatctcagctgctgccttcaccagccgtcagtcactcgggccagggcggggtcaccggacaggtgcatgttctgcctcagccctcagaccagggcgtactcagtggtccccgagctgcccgaggccagacagccccgcaggaggaagcggtgacccaggaagaggtcgaggcgctggtttgtggtcacacacagcggtgggtgcctgggccggtgtacgacgccgctgctggtggctctggctgggctcagctgagcctcagggctggaatgggtgtaggccaggccactgggcacattcaggaccccgcgagccagcggctgacgtggaacaagtccccaaagagcgtccttgtcatcaagaagatgagagatgccagcctactgcagccgttcaaggagctctgcacgcacctcatggaggcacgcggggcaggggggaagggggcctggggtgcacatggagttgggggggcctccatccacatcaccgccccgagggtggggtctgcaggtggaatgagcaggttggcactttgcttccaggagaacatgatcgtgtatgtggaaaagaaagtgctagaagaccctgccatcgccagcgatgaaagctttggggcagtgaagaagaaattctgtacctttcgagaagattatgatgacatttccaatcagatagacttcatcatctgcctggggggagacgggacgctgctgtacgcttcctcgcttttccagggcagcgtccctccggtcatggccttccacctgggctccctgggcttcctgaccccattcagctttgagaactttcagtcccaagttactcaggtgatagaggggaacgcagctgttgttctccggagtcggctgaaggtcagggtggtgaaggagctccgggggaagaagacggccgtgcacaatgggctgggtgagaacggctcgcaggctgcaggcctggacatggatgtcgggaagcaggccatgcagtaccaggtcctgaatgaggtggtgattgacagaggcccctcctcctacctgtccaatgtggatgtctacctggacggacacctcatcaccacggtgcagggcgacggagtgatcgtgtccaccccgacgggcagcacggcgtatgcggccgcggccggggcctccatgatccaccccaacgtgccggccatcatgatcacgcccatctgcccccactcgctgtccttccggcccatcgtggtccccgcaggggtcgagctgaagatcatgctgtcacctgaagcaaggaacacagcatgggtgtcctttgatggacggaagagacaagagatccgccatggagacagcatcagcatcactacctcatgctacccgctcccctccatctgtgtgcgggaccccgtgagcgactggtttgagagcctcgcccagtgcctgcattggaacgtccggaagaagcaagcccacttcgaggaggaggaggaggaggaggaggagggctaggtcaagcccctatccaggcccgaatccttccgctgccctccaagcgccctctggggacagaccaatctgcgtgtgtctgtgaccgcctgtctcagtggcacggccacttcctttctgtagctgggttagagcctgggtctgccttttgtccagatcagctgtttttttaaaatgtctgactttttttgcatttctaaagaagcgtgagaaatgggctgggagtgcttctgtcctgctgacaccccgcggtgggtccctggagcgcggcctccagctgccgcaatttccatgccaggatatttttccgcaaatcagtcggttgaaattcagaggagtcagaatgactcgacctgtccttcaatgttgataataaatgtctcagccaaaaaccttccttgagctgccatgcttttccccttgacctgcacctcttcccctaaaacttctgcagggaagcccctggcggaggcgccattgaaagcatggtcttgccagtggctggcaaggcggttttgttctgctcagtttctggagagggttggatgcgtcccctgccatccagccctccccgcttgaggccagcactgagtctgggacactcagcgggaagggggctggcatcgccagcgacccacacattcctcacgtagcttctgctcccaggaaggtagtttaaatcctgtatatactttttagagactcttttaaactttctgaagtgctgatgtacatactttctcgtacacacttttgtgaagatttcaaggggaagggagtcgtctgccattcaatgtttacatttatgttctgcaagacgctgtcctcagggaccattaggggaccattctgttcagtgcgatcctgatggtccgggagatgagggtttccggggctagtgatcgtgatcccttttatttgcaactgtaatgagaatttttcacactaacacagcgagggactcaacacgctgattctcctcctgcctctcccgtgagtctccagcctgcccagcaccagcagctgtggagcacgtggatgctgcctaccccggcgcccgcgtcttccacgggcacaggtgtgtggaggccgtggtcggaccctggtgtcctggttactgctgcccgggtgtcttttttttgagtaactgctctctgagttttgcacacgaagttgccctcatctgctggagatcgataaggaaggcacaagacgttctcctctgcccgtgaggagcttcccgcagccgcctggcccagcctgggcacgttctccgaggcatgtgtctccctgctcaccctcgtctgggcacctcagcatctgtggacttgagcgtccaaaaaccctgagtgtgattctgggcagccggcctggcttgaagtccgccatgaccctgggcacaggggaagcccagccgtgggcttaggagagagggaccagcgcccagcgttagggctggaagacggcagtgttcagaattccagccgctcatctgaacacagaaggtgtgaactgacctctaaagcagcgtgagatgggaatgatctagaaaactttggatttttgaagtaaattttaatgtttcatattaatttcttgaaaatgtattaaatgtcattgaaagccttattacgcttttcagatcctttcaataaacaagacttgtagaaaataa

SEQ ID NO: 442542 - DNA, 207 bp, Homo sapiens
cgcgttgaatggcccggaggcgttgaatggcccggaggcgttgaatggcccgagaagattatgatgacatttccaatcagatagacttcatcatctgcctggggggagacgggacgctgctgtacgcttcctcgcttttccaggtgaagcgctgacatttccagacccacaccaggttctagtctaggtgctgcgtaacgaggggct

SEQ ID NO: 442543 - DNA, 766 bp, Homo sapiens
  misc_feature (726)..(726): n is a, c, g, or t
  misc_feature (747)..(747): n is a, c, g, or t
  misc_feature (752)..(752): n is a, c, g, or t
agtgggcgggcgcggcgcattgctgctcggcggcgccggcgccggggtccgggcggccatggggcaacaggcggccagggcgccaagggccaggtagcgacggctggcggcggcgcggcggcggggcctgcgggctcggtccggcatgtagacgcccccgcaggcgcccgcggcagcgaacggcatcagtgtttttctgaccgaagttctcatttcctgacaatggaaatggaacaagaaaaaatgaccatgaataaggaattgagtccagacgcggctgcttactgctgctcggcctgccacggcgatgagacctggagttacaaccaccccatccggggccgggccaagtctcgcagcctgtctgcctcgcccgccctggggagcaccaaggagttcaggaggacacgctctcttcatgggccatgcccggtgaccacttttggaccaaaggcctgtgtgctgcagaacccccagaccatcatgcacattcaggaccccgcgagccagcggctgacgtggaacaagtccccaaagagcgtccttgtcatcaagaagatgagagatgccagcctactgcagccgttcaaggagctctgcacgcacctcatggaggagaacatgatcgtgtatgtggaaaagaaagtgctagaagaccctgccatcgccagcgatgaaagctttggggcagtgaagaagaaagaaaaatttcttgtacccttttcnaaggaaagaattattgaatgnaccanttttccccaattca

SEQ ID NO: 442544 - DNA, 3125 bp, Homo sapiens
ggatcacaatgtcgggggcgcctaggcgtagacgtggcgggcggacccgggggcgccctccggacgcggcaggcatcagtgtttttctgaccgaagttctcatttcctgacaatggaaatggaacaagaaaaaatgaccatgaataaggaattgagtccagacgcggctgcttactgctgctcggcctgccacggcgatgagacctggagttacaaccaccccatccggggccgggccaagtctcgcagcctgtctgcctcgcccgccctggggagcaccaaggagttcaggaggacacgctctcttcatgggccatgcccggtgaccacttttggaccaaaggcctgtgtgctgcagaacccccagaccatcatgcacattcaggaccccgcgagccagcggctgacgtggaacaagtccccaaagagcgtccttgtcatcaagaagatgagagatgccagcctactgcagccgttcaaggagctctgcacgcacctcatggaggagaacatgatcgtgtatgtggaaaagaaagtgctagaagaccctgccatcgccagcgatgaaagctttggggcagtgaagaagaaattctgtacctttcgagaagattatgatgacatttccaatcagatagacttcatcatctgcctggggggagacgggacgctgctgtacgcttcctcgcttttccagggcagcgtccctccggtcatggccttccacctgggctccctgggcttcctgaccccattcagctttgagaactttcagtcccaagttactcaggtgatagaggggaacgcagctgttgttctccggagtcggctgaaggtcagggtggtgaaggagctccgggggaagaagacggccgtgcacaatgggctgggtgagaacggctcgcaggctgcaggcctggacatggatgtcgggaagcaggccatgcagtaccaggtcctgaatgaggtggtgattgacagaggcccctcctcctacctgtccaatgtggatgtctacctggacggacacctcatcaccacggtgcagggcgacggagtgatcgtgtccaccccgacgggcagcacggcgtatgcggccgcggccggggcctccatgatccaccccaacgtgccggccatcatgatcacgcccatctgcccccactcgctgtccttccggcccatcgtggtccccgcaggggtcgagctgaagatcatgctgtcacctgaagcaaggaacacagcatgggtgtcctttgatggacggaagagacaagagatccgccatggagacagcatcagcatcactacctcatgctacccgctcccctccatctgtgtgcgggaccccgtgagcgactggtttgagagcctcgcccagtgcctgcattggaacgtccggaagaagcaagcccacttcgaggaggaggaggaggaggaggaggagggctaggtcaagcccctatccaggcccgaatccttccgctgccctccaagcgccctctggggacagaccaatctgcgtgtgtctgtgaccgcctgtctcagtggcacggccacttcctttctgtagctgggttagagcctgggtctgccttttgtccagatcagctgtttttttaaaatgtctgactttttttgcatttctaaagaagcgtgagaaatgggctgggagtgcttctgtcctgctgacaccccgcggtgggtccctggagcgcggcctccagctgccgcaatttccatgccaggatatttttccgcaaatcagtcggttgaaattcagaggagtcagaatgactcgacctgtccttcaatgttgataataaatgtctcagccaaaaaccttccttgagctgccatgcttttccccttgacctgcacctcttcccctaaaacttctgcagggaagcccctggcggaggcgccattgaaagcatggtcttgccagtggctggcaaggcggttttgttctgctcagtttctggagagggttggatgcgtcccctgccatccagccctccccgcttgaggccagcactgagtctgggacactcagcgggaagggggctggcatcgccagcgacccacacattcctcacgtagcttctgctcccaggaaggtagtttaaatcctgtatatactttttagagactcttttaaactttctgaagtgctgatgtacatactttctcgtacacacttttgtgaagatttcaaggggaagggagtcgtctgccattcaatgtttacatttatgttctgcaagacgctgtcctcagggaccattaggggaccattctgttcagtgcgatcctgatggtccgggagatgagggtttccggggctagtgatcgtgatcccttttatttgcaactgtaatgagaatttttcacactaacacagcgagggactcaacacgctgattctcctcctgcctctcccgtgagtctccagcctgcccagcaccagcagctgtggagcacgtggatgctgcctaccccggcgcccgcgtcttccacgggcacaggtgtgtggaggccgtggtcggaccctggtgtcctggttactgctgcccgggtgtcttttttttgagtaactgctctctgagttttgcacacgaagttgccctcatctgctggagatcgataaggaaggcacaagacgttctcctctgcccgtgaggagcttcccgcagccgcctggcccagcctgggcacgttctccgaggcatgtgtctccctgctcaccctcgtctgggcacctcagcatctgtggacttgagcgtccaaaaaccctgagtgtgattctgggcagccggcctggcttgaagtccgccatgaccctgggcacaggggaagcccagccgtgggcttaggagagagggaccagcgcccagcgttagggctggaagacggcagtgttcagaattccagccgctcatctgaacacagaaggtgtgaactgacctctaaagcagcgtgagatgggaatgatctagaaaactttggatttttgaagtaaattttaatgtttcatattaatttcttgaaaatgtattaaatgtcattgaaagccttattacgcttttcagatcctttcaataaacaagacttgtagaaaataa

SEQ ID NO: 442545 - DNA, 3789 bp, Homo sapiens
aaatcccccaagttctcatgatccttgcttccctttccagtcacccttggtgccctgtacttcactgtggtcctgaactgaagagctgtgtttttcaggaagacttggccaggccgtgttccgtgtctctggattcaagtcccaggagtcctgaccagagagcaggcatcagtgtttttctgaccgaagttctcatttcctgacaatggaaatggaacaagaaaaaatgaccatgaataaggaattgagtccagacgcggctgcttactgctgctcggcctgccacggcgatgagacctggagttacaaccaccccatccggggccgggccaagtctcgcagcctgtctgcctcgcccgccctggggagcaccaaggagttcaggaggacacgctctcttcatgggccatgcccggtgaccacttttggaccaaaggcctgtgtgctgcagaacccccagaccatcatgcacattcaggaccccgcgagccagcggctgacgtggaacaagtccccaaagagcgtccttgtcatcaagaagatgagagatgccagcctactgcagccgttcaaggagctctgcacgcacctcatggaggcacgcggggcaggggggaagggggcctggggtgcacatggagttgggggggcctccatccacatcaccgccccgtgagaccatgggaaccacctcaagtgctgggcaacggctgcttgtctggaactggggactgagtggggatctgccgggtgtctgggtttgtgtgtgccgccatggcaagcaccagactgggtgaccaacaatgagctggtgggctcgtggcctggaggccgggaagtccgagatcaaggggccacatctgacgtgggccttcctgctgtgtcttctcttcagaagagcaggcgtgggggttgcggcgcccaggaaagccactcctgaaataacagccttagtcaattcctgagagggagccccctccgcccagtcatctcttaaaggtcctgcttcctcctggcgcgttggtgatgaagtttcagcgtgagcgtgggggggcgggcatgcaggccacgatgccaggtctctgaccacagcgcccgtgagtcgggaacctccctgcaggagggtggggtctgcaggtggaatgagcaggttggcactttgcttccaggagaacatgatcgtgtatgtggaaaagaaagtgctagaagaccctgccatcgccagcgatgaaagctttggggcagtgaagaagaaattctgtacctttcgagaagattatgatgacatttccaatcagatagacttcatcatctgcctggggggagacgggacgctgctgtacgcttcctcgcttttccagggcagcgtccctccggtcatggccttccacctgggctccctgggcttcctgaccccattcagctttgagaactttcagtcccaagttactcaggtgatagaggggaacgcagctgttgttctccggagtcggctgaaggtcagggtggtgaaggagctccgggggaagaagacggccgtgcacaatgggctgggtgagaacggctcgcaggctgcaggcctggacatggatgtcgggaagcaggccatgcagtaccaggtcctgaatgaggtggtgattgacagaggcccctcctcctacctgtccaatgtggatgtctacctggacggacacctcatcaccacggtgcagggcgacggagtgatcgtgtccaccccgacgggcagcacggcgtatgcggccgcggccggggcctccatgatccaccccaacgtgccggccatcatgatcacgcccatctgcccccactcgctgtccttccggcccatcgtggtccccgcaggggtcgagctgaagatcatgctgtcacctgaagcaaggaacacagcatgggtgtcctttgatggacggaagagacaagagatccgccatggagacagcatcagcatcactacctcatgctacccgctcccctccatctgtgtgcgggaccccgtgagcgactggtttgagagcctcgcccagtgcctgcattggaacgtccggaagaagcaagcccacttcgaggaggaggaggaggaggaggaggagggctaggtcaagcccctatccaggcccgaatccttccgctgccctccaagcgccctctggggacagaccaatctgcgtgtgtctgtgaccgcctgtctcagtggcacggccacttcctttctgtagctgggttagagcctgggtctgccttttgtccagatcagctgtttttttaaaatgtctgactttttttgcatttctaaagaagcgtgagaaatgggctgggagtgcttctgtcctgctgacaccccgcggtgggtccctggagcgcggcctccagctgccgcaatttccatgccaggatatttttccgcaaatcagtcggttgaaattcagaggagtcagaatgactcgacctgtccttcaatgttgataataaatgtctcagccaaaaaccttccttgagctgccatgcttttccccttgacctgcacctcttcccctaaaacttctgcagggaagcccctggcggaggcgccattgaaagcatggtcttgccagtggctggcaaggcggttttgttctgctcagtttctggagagggttggatgcgtcccctgccatccagccctccccgcttgaggccagcactgagtctgggacactcagcgggaagggggctggcatcgccagcgacccacacattcctcacgtagcttctgctcccaggaaggtagtttaaatcctgtatatactttttagagactcttttaaactttctgaagtgctgatgtacatactttctcgtacacacttttgtgaagatttcaaggggaagggagtcgtctgccattcaatgtttacatttatgttctgcaagacgctgtcctcagggaccattaggggaccattctgttcagtgcgatcctgatggtccgggagatgagggtttccggggctagtgatcgtgatcccttttatttgcaactgtaatgagaatttttcacactaacacagcgagggactcaacacgctgattctcctcctgcctctcccgtgagtctccagcctgcccagcaccagcagctgtggagcacgtggatgctgcctaccccggcgcccgcgtcttccacgggcacaggtgtgtggaggccgtggtcggaccctggtgtcctggttactgctgcccgggtgtcttttttttgagtaactgctctctgagttttgcacacgaagttgccctcatctgctggagatcgataaggaaggcacaagacgttctcctctgcccgtgaggagcttcccgcagccgcctggcccagcctgggcacgttctccgaggcatgtgtctccctgctcaccctcgtctgggcacctcagcatctgtggacttgagcgtccaaaaaccctgagtgtgattctgggcagccggcctggcttgaagtccgccatgaccctgggcacaggggaagcccagccgtgggcttaggagagagggaccagcgcccagcgttagggctggaagacggcagtgttcagaattccagccgctcatctgaacacagaaggtgtgaactgacctctaaagcagcgtgagatgggaatgatctagaaaactttggatttttgaagtaaattttaatgtttcatattaatttcttgaaaatgtattaaatgtcattgaaagccttattacgcttttcagatcctttcaataaacaagacttgtagaaaataa

SEQ ID NO: 442546 - DNA, 4008 bp, Homo sapiens
ggatcacaatgtcgggggcgcctaggcgtagacgtggcgggcggacccgggggcgccctccggacgcggcaggcatcagtgtttttctgaccgaagttctcatttcctgacaatggaaatggaacaagaaaaaatgaccatgaataaggaattgagtccagacgcggctgcttactgctgctcggcctgccacggcgatgagacctggagttacaaccaccccatccggggccgggccaagtctcgcagcctgtctgcctcgcccgccctggggagcaccaaggagttcaggaggacacgctctcttcatgggccatgcccggtgaccacttttggaccaaaggcctgtgtgctgcagaacccccagaccatcatagccactcctttgtcactcgcatctcagctgctgccttcaccagccgtcagtcactcgggccagggcggggtcaccggacaggtgcatgttctgcctcagccctcagaccagggcgtactcagtggtccccgagctgcccgaggccagacagccccgcaggaggaagcggtgacccaggaagaggtcgaggcgctggtttgtggtcacacacagcggtgggtgcctgggccggtgtacgacgccgctgctggtggctctggctgggctcagctgagcctcagggctggaatgggtgtaggccaggccactgggcacattcaggaccccgcgagccagcggctgacgtggaacaagtccccaaagagcgtccttgtcatcaagaagatgagagatgccagcctactgcagccgttcaaggagctctgcacgcacctcatggaggcacgcggggcaggggggaagggggcctggggtgcacatggagttgggggggcctccatccacatcaccgccccgtgagaccatgggaaccacctcaagtgctgggcaacggctgcttgtctggaactggggactgagtggggatctgccgggtgtctgggtttgtgtgtgccgccatggcaagcaccagactgggtgaccaacaatgagctggtgggctcgtggcctggaggccgggaagtccgagatcaaggggccacatctgacgtgggccttcctgctgtgtcttctcttcagaagagcaggcgtgggggttgcggcgcccaggaaagccactcctgaaataacagccttagtcaattcctgagagggagccccctccgcccagtcatctcttaaaggtcctgcttcctcctggcgcgttggtgatgaagtttcagcgtgagcgtgggggggcgggcatgcaggccacgatgccaggtctctgaccacagcgcccgtgagtcgggaacctccctgcaggagggtggggtctgcaggtggaatgagcaggttggcactttgcttccaggagaacatgatcgtgtatgtggaaaagaaagtgctagaagaccctgccatcgccagcgatgaaagctttggggcagtgaagaagaaattctgtacctttcgagaagattatgatgacatttccaatcagatagacttcatcatctgcctggggggagacgggacgctgctgtacgcttcctcgcttttccagggcagcgtccctccggtcatggccttccacctgggctccctgggcttcctgaccccattcagctttgagaactttcagtcccaagttactcaggtgatagaggggaacgcagctgttgttctccggagtcggctgaaggtcagggtggtgaaggagctccgggggaagaagacggccgtgcacaatgggctgggtgagaacggctcgcaggctgcaggcctggacatggatgtcgggaagcaggccatgcagtaccaggtcctgaatgaggtggtgattgacagaggcccctcctcctacctgtccaatgtggatgtctacctggacggacacctcatcaccacggtgcagggcgacggagtgatcgtgtccaccccgacgggcagcacggcgtatgcggccgcggccggggcctccatgatccaccccaacgtgccggccatcatgatcacgcccatctgcccccactcgctgtccttccggcccatcgtggtccccgcaggggtcgagctgaagatcatgctgtcacctgaagcaaggaacacagcatgggtgtcctttgatggacggaagagacaagagatccgccatggagacagcatcagcatcactacctcatgctacccgctcccctccatctgtgtgcgggaccccgtgagcgactggtttgagagcctcgcccagtgcctgcattggaacgtccggaagaagcaagcccacttcgaggaggaggaggaggaggaggaggagggctaggtcaagcccctatccaggcccgaatccttccgctgccctccaagcgccctctggggacagaccaatctgcgtgtgtctgtgaccgcctgtctcagtggcacggccacttcctttctgtagctgggttagagcctgggtctgccttttgtccagatcagctgtttttttaaaatgtctgactttttttgcatttctaaagaagcgtgagaaatgggctgggagtgcttctgtcctgctgacaccccgcggtgggtccctggagcgcggcctccagctgccgcaatttccatgccaggatatttttccgcaaatcagtcggttgaaattcagaggagtcagaatgactcgacctgtccttcaatgttgataataaatgtctcagccaaaaaccttccttgagctgccatgcttttccccttgacctgcacctcttcccctaaaacttctgcagggaagcccctggcggaggcgccattgaaagcatggtcttgccagtggctggcaaggcggttttgttctgctcagtttctggagagggttggatgcgtcccctgccatccagccctccccgcttgaggccagcactgagtctgggacactcagcgggaagggggctggcatcgccagcgacccacacattcctcacgtagcttctgctcccaggaaggtagtttaaatcctgtatatactttttagagactcttttaaactttctgaagtgctgatgtacatactttctcgtacacacttttgtgaagatttcaaggggaagggagtcgtctgccattcaatgtttacatttatgttctgcaagacgctgtcctcagggaccattaggggaccattctgttcagtgcgatcctgatggtccgggagatgagggtttccggggctagtgatcgtgatcccttttatttgcaactgtaatgagaatttttcacactaacacagcgagggactcaacacgctgattctcctcctgcctctcccgtgagtctccagcctgcccagcaccagcagctgtggagcacgtggatgctgcctaccccggcgcccgcgtcttccacgggcacaggtgtgtggaggccgtggtcggaccctggtgtcctggttactgctgcccgggtgtcttttttttgagtaactgctctctgagttttgcacacgaagttgccctcatctgctggagatcgataaggaaggcacaagacgttctcctctgcccgtgaggagcttcccgcagccgcctggcccagcctgggcacgttctccgaggcatgtgtctccctgctcaccctcgtctgggcacctcagcatctgtggacttgagcgtccaaaaaccctgagtgtgattctgggcagccggcctggcttgaagtccgccatgaccctgggcacaggggaagcccagccgtgggcttaggagagagggaccagcgcccagcgttagggctggaagacggcagtgttcagaattccagccgctcatctgaacacagaaggtgtgaactgacctctaaagcagcgtgagatgggaatgatctagaaaactttggatttttgaagtaaattttaatgtttcatattaatttcttgaaaatgtattaaatgtcattgaaagccttattacgcttttcagatcctttcaataaacaagacttgtagaaaataa

SEQ ID NO: 442547 - DNA, 3164 bp, Homo sapiens
aaatcccccaagttctcatgatccttgcttccctttccagtcacccttggtgccctgtacttcactgtggtcctgaactgaagagctgtgtttttcaggaagacttggccaggccgtgttccgtgtctctggattcaagtcccaggagtcctgaccagagagcaggcatcagtgtttttctgaccgaagttctcatttcctgacaatggaaatggaacaagaaaaaatgaccatgaataaggaattgagtccagacgcggctgcttactgctgctcggcctgccacggcgatgagacctggagttacaaccaccccatccggggccgggccaagtctcgcagcctgtctgcctcgcccgccctggggagcaccaaggagttcaggaggacacgctctcttcatgggccatgcccggtgaccacttttggaccaaaggcctgtgtgctgcagaacccccagaccatcatgcacattcaggaccccgcgagccagcggctgacgtggaacaagtccccaaagagcgtccttgtcatcaagaagatgagagatgccagcctactgcagccgttcaaggagctctgcacgcacctcatggaggagaacatgatcgtgtatgtggaaaagaaagtgctagaagaccctgccatcgccagcgatgaaagctttggggcagtgaagaagaaattctgtacctttcgagaagattatgatgacatttccaatcagatagacttcatcatctgcctggggggagacgggacgctgctgtacgcttcctcgcttttccagggcagcgtccctccggtcatggccttccacctgggctccctgggcttcctgaccccattcagctttgagaactttcagtcccaagttactcaggtgatagaggggaacgcagctgttgttctccggagtcggctgaaggtcagggtggtgaaggagctccgggggaagaagacggccgtgcacaatgggctgggtgagaacggctcgcaggctgcaggcctggacatggatgtcgggaagcaggccatgcagtaccaggtcctgaatgaggtggtgattgacagaggcccctcctcctacctgtccaatgtggatgtctacctggacggacacctcatcaccacggtgcagggcgacggagtgatcgtgtccaccccgacgggcagcacggcgtatgcggccgcggccggggcctccatgatccaccccaacgtgccggccatcatgatcacgcccatctgcccccactcgctgtccttccggcccatcgtggtccccgcaggggtcgagctgaagatcatgctgtcacctgaagcaaggaacacagcatgggtgtcctttgatggacggaagagacaagagatccgccatggagacagcatcagcatcactacctcatgctacccgctcccctccatctgtgtgcgggaccccgtgagcgactggtttgagagcctcgcccagtgcctgcattggaacgtccggaagaagcaagcccacttcgaggaggaggaggaggaggaggaggagggctaggtcaagcccctatccaggcccgaatccttccgctgccctccaagcgccctctggggacagaccaatctgcgtgtgtctgtgaccgcctgtctcagtggcacggccacttcctttctgtagctgggttagagcctgggtctgccttttgtccagatcagctgtttttttaaaatgtctgactttttttgcatttctaaagaagcgtgagaaatgggctgggagtgcttctgtcctgctgacaccccgcggtgggtccctggagcgcggcctccagctgccgcaatttccatgccaggatatttttccgcaaatcagtcggttgaaattcagaggagtcagaatgactcgacctgtccttcaatgttgataataaatgtctcagccaaaaaccttccttgagctgccatgcttttccccttgacctgcacctcttcccctcagtggctggcaaggcggttttgttctgctcagtttctggagagggttggatgcgtcccctgccatccagccctccccgcttgaggccagcactgagtctgggacactcagcgggaagggggctggcatcgccagcgacccacacattcctcacgtagcttctgctcccaggaaggtagtttaaatcctgtatatactttttagagactcttttaaactttctgaagtgctgatgtacatactttctcgtacacacttttgtgaagatttcaaggggaagggagtcgtctgccattcaatgtttacatttatgttctgcaagacgctgtcctcagggaccattaggggaccattctgttcagtgcgatcctgatggtccgggagatgagggtttccggggctagtgatcgtgatcccttttatttgcaactgtaatgagaatttttcacactaacacagcgagggactcaacacgctgattctcctcctgcctctcccgtgagtctccagcctgcccagcaccagcagctgtggagcacgtggatgctgcctaccccggcgcccgcgtcttccacgggcacaggtgtgtggaggccgtggtcggaccctggtgtcctggttactgctgcccgggtgtcttttttttgagtaactgctctctgagttttgcacacgaagttgccctcatctgctggagatcgataaggaaggcacaagacgttctcctctgcccgtgaggagcttcccgcagccgcctggcccagcctgggcacgttctccgaggcatgtgtctccctgctcaccctcgtctgggcacctcagcatctgtggacttgagcgtccaaaaaccctgagtgtgattctgggcagccggcctggcttgaagtccgccatgaccctgggcacaggggaagcccagccgtgggcttaggagagagggaccagcgcccagcgttagggctggaagacggcagtgttcagaattccagccgctcatctgaacacagaaggtgtgaactgacctctaaagcagcgtgagatgggaatgatctagaaaactttggatttttgaagtaaattttaatgtttcatattaatttcttgaaaatgtattaaatgtcattgaaagccttattacgcttttcagatcctttcaataaacaagacttgtagaaaataa

SEQ ID NO: 442548 - DNA, 3115 bp, Homo sapiens
aaatcccccaagttctcatgatccttgcttccctttccagtcacccttggtgccctgtacttcactgtggtcctgaactgaagagctgtgtttttcaggaagacttggccaggccgtgttccgtgtctctggattcaagtcccaggagtcctgaccagagagcaggcatcagtgtttttctgaccgaagttctcatttcctgacaatggaaatggaacaagaaaaaatgaccatgaataaggaattgagtccagacgcggctgcttactgctgctcggcctgccacggcgatgagacctggagttacaaccaccccatccggggccgggccaagtctcgcagcctgtctgcctcgcccgccctggggagcaccaaggagttcaggaggacacgctctcttcatgggccatgcccggtgaccacttttggaccaaaggcctgtgtgctgcagaacccccagaccatcatgcacattcaggaccccgcgagccagcggctgacgtggaacaagtccccaaagagcgtccttgtcatcaagaagatgagagatgccagcctactgcagccgttcaaggagctctgcacgcacctcatggaggagaacatgatcgtgtatgtggaaaagaaagtgctagaagaccctgccatcgccagcgatgaaagctttggggcagtgaagaagaaattctgtacctttcgagaagattatgatgacatttccaatcagatagacttcatcatctgcctggggggagacgggacgctgctgtacgcttcctcgcttttccagggaacgcagctgttgttctccggagtcggctgaaggtcagggtggtgaaggagctccgggggaagaagacggccgtgcacaatgggctgggtgagaacggctcgcaggctgcaggcctggacatggatgtcgggaagcaggccatgcagtaccaggtcctgaatgaggtggtgattgacagaggcccctcctcctacctgtccaatgtggatgtctacctggacggacacctcatcaccacggtgcagggcgacggagtgatcgtgtccaccccgacgggcagcacggcgtatgcggccgcggccggggcctccatgatccaccccaacgtgccggccatcatgatcacgcccatctgcccccactcgctgtccttccggcccatcgtggtccccgcaggggtcgagctgaagatcatgctgtcacctgaagcaaggaacacagcatgggtgtcctttgatggacggaagagacaagagatccgccatggagacagcatcagcatcactacctcatgctacccgctcccctccatctgtgtgcgggaccccgtgagcgactggtttgagagcctcgcccagtgcctgcattggaacgtccggaagaagcaagcccacttcgaggaggaggaggaggaggaggaggagggctaggtcaagcccctatccaggcccgaatccttccgctgccctccaagcgccctctggggacagaccaatctgcgtgtgtctgtgaccgcctgtctcagtggcacggccacttcctttctgtagctgggttagagcctgggtctgccttttgtccagatcagctgtttttttaaaatgtctgactttttttgcatttctaaagaagcgtgagaaatgggctgggagtgcttctgtcctgctgacaccccgcggtgggtccctggagcgcggcctccagctgccgcaatttccatgccaggatatttttccgcaaatcagtcggttgaaattcagaggagtcagaatgactcgacctgtccttcaatgttgataataaatgtctcagccaaaaaccttccttgagctgccatgcttttccccttgacctgcacctcttcccctaaaacttctgcagggaagcccctggcggaggcgccattgaaagcatggtcttgccagtggctggcaaggcggttttgttctgctcagtttctggagagggttggatgcgtcccctgccatccagccctccccgcttgaggccagcactgagtctgggacactcagcgggaagggggctggcatcgccagcgacccacacattcctcacgtagcttctgctcccaggaaggtagtttaaatcctgtatatactttttagagactcttttaaactttctgaagtgctgatgtacatactttctcgtacacacttttgtgaagatttcaaggggaagggagtcgtctgccattcaatgtttacatttatgttctgcaagacgctgtcctcagggaccattaggggaccattctgttcagtgcgatcctgatggtccgggagatgagggtttccggggctagtgatcgtgatcccttttatttgcaactgtaatgagaatttttcacactaacacagcgagggactcaacacgctgattctcctcctgcctctcccgtgagtctccagcctgcccagcaccagcagctgtggagcacgtggatgctgcctaccccggcgcccgcgtcttccacgggcacaggtgtgtggaggccgtggtcggaccctggtgtcctggttactgctgcccgggtgtcttttttttgagtaactgctctctgagttttgcacacgaagttgccctcatctgctggagatcgataaggaaggcacaagacgttctcctctgcccgtgaggagcttcccgcagccgcctggcccagcctgggcacgttctccgaggcatgtgtctccctgctcaccctcgtctgggcacctcagcatctgtggacttgagcgtccaaaaaccctgagtgtgattctgggcagccggcctggcttgaagtccgccatgaccctgggcacaggggaagcccagccgtgggcttaggagagagggaccagcgcccagcgttagggctggaagacggcagtgttcagaattccagccgctcatctgaacacagaaggtgtgaactgacctctaaagcagcgtgagatgggaatgatctagaaaactttggatttttgaagtaaattttaatgtttcatattaatttcttgaaaatgtattaaatgtcattgaaagccttattacgcttttcagatcctttcaataaacaagacttgtagaaaataa

SEQ ID NO: 442549 - DNA, 3245 bp, Homo sapiens
aaatcccccaagttctcatgatccttgcttccctttccagtcacccttggtgccctgtacttcactgtggtcctgaactgaagagctgtgtttttcaggaagacttggccaggccgtgttccgtgtctctggattcaagtcccaggagtcctgaccagagagcaggcatcagtgtttttctgaccgaagttctcatttcctgacaatggaaatggaacaagaaaaaatgaccatgaataaggaattgagtccagacgcggctgcttactgctgctcggcctgccacggcgatgagacctggagttacaaccaccccatccggggccgggccaagtctcgcagcctgtctgcctcgcccgccctggggagcaccaaggagttcaggaggacacgctctcttcatgggccatgcccggtgaccacttttggaccaaaggcctgtgtgctgcagaacccccagaccatcatgcacattcaggaccccgcgagccagcggctgacgtggaacaagtccccaaagagcgtccttgtcatcaagaagatgagagatgccagcctactgcagccgttcaaggagctctgcacgcacctcatggaggagaacatgatcgtgtatgtggaaaagaaagtgctagaagaccctgccatcgccagcgatgaaagctttggggcagtgaagaagaaattctgtacctttcgagaagattatgatgacatttccaatcagatagacttcatcatctgcctggggggagacgggacgctgctgtacgcttcctcgcttttccagggcagcgtccctccggtcatggccttccacctgggctccctgggcttcctgaccccattcagctttgagaactttcagtcccaagttactcaggtgatagaggggaacgcagctgttgttctccggagtcggctgaaggtcagggtggtgaaggagctccgggggaagaagacggccgtgcacaatgggctgggtgagaacggctcgcaggctgcaggcctggacatggatgtcgggaagcaggccatgcagtaccaggtcctgaatgaggtggtgattgacagaggcccctcctcctacctgtccaatgtggatgtctacctggacggacacctcatcaccacggtgcagggcgacggagtgatcgtgtccaccccgacgggcagcacggcgtatgcggccgcggccggggcctccatgatccaccccaacgtgccggccatcatgatcacgcccatctgcccccactcgctgtccttccggcccatcgtggtccccgcaggggtcgagctgaaggtcagagccaacgacactccttttccgatcatgctgtcacctgaagcaaggaacacagcatgggtgtcctttgatggacggaagagacaagagatccgccatggagacagcatcagcatcactacctcatgctacccgctcccctccatctgtgtgcgggaccccgtgagcgactggtttgagagcctcgcccagtgcctgcattggaacgtccggaagaagcaagcccacttcgaggaggaggaggaggaggaggaggagggctaggtcaagcccctatccaggcccgaatccttccgctgccctccaagcgccctctggggacagaccaatctgcgtgtgtctgtgaccgcctgtctcagtggcacggccacttcctttctgtagctgggttagagcctgggtctgccttttgtccagatcagctgtttttttaaaatgtctgactttttttgcatttctaaagaagcgtgagaaatgggctgggagtgcttctgtcctgctgacaccccgcggtgggtccctggagcgcggcctccagctgccgcaatttccatgccaggatatttttccgcaaatcagtcggttgaaattcagaggagtcagaatgactcgacctgtccttcaatgttgataataaatgtctcagccaaaaaccttccttgagctgccatgcttttccccttgacctgcacctcttcccctaaaacttctgcagggaagcccctggcggaggcgccattgaaagcatggtcttgccagtggctggcaaggcggttttgttctgctcagtttctggagagggttggatgcgtcccctgccatccagccctccccgcttgaggccagcactgagtctgggacactcagcgggaagggggctggcatcgccagcgacccacacattcctcacgtagcttctgctcccaggaaggtagtttaaatcctgtatatactttttagagactcttttaaactttctgaagtgctgatgtacatactttctcgtacacacttttgtgaagatttcaaggggaagggagtcgtctgccattcaatgtttacatttatgttctgcaagacgctgtcctcagggaccattaggggaccattctgttcagtgcgatcctgatggtccgggagatgagggtttccggggctagtgatcgtgatcccttttatttgcaactgtaatgagaatttttcacactaacacagcgagggactcaacacgctgattctcctcctgcctctcccgtgagtctccagcctgcccagcaccagcagctgtggagcacgtggatgctgcctaccccggcgcccgcgtcttccacgggcacaggtgtgtggaggccgtggtcggaccctggtgtcctggttactgctgcccgggtgtcttttttttgagtaactgctctctgagttttgcacacgaagttgccctcatctgctggagatcgataaggaaggcacaagacgttctcctctgcccgtgaggagcttcccgcagccgcctggcccagcctgggcacgttctccgaggcatgtgtctccctgctcaccctcgtctgggcacctcagcatctgtggacttgagcgtccaaaaaccctgagtgtgattctgggcagccggcctggcttgaagtccgccatgaccctgggcacaggggaagcccagccgtgggcttaggagagagggaccagcgcccagcgttagggctggaagacggcagtgttcagaattccagccgctcatctgaacacagaaggtgtgaactgacctctaaagcagcgtgagatgggaatgatctagaaaactttggatttttgaagtaaattttaatgtttcatattaatttcttgaaaatgtattaaatgtcattgaaagccttattacgcttttcagatcctttcaataaacaagacttgtagaaaataa

SEQ ID NO: 442550 - DNA, 3060 bp, Homo sapiens
aaatcccccaagttctcatgatccttgcttccctttccagtcacccttggtgccctgtacttcactgtggtcctgaactgaagagctgtgtttttcaggaagacttggccaggccgtgttccgtgtctctggattcaagtcccaggagtcctgaccagagagcaggcatcagtgtttttctgaccgaagttctcatttcctgacaatggaaatggaacaagaaaaaatgaccatgaataaggaattgagtccagacgcggctgcttactgctgctcggcctgccacggcgatgagacctggagttacaaccaccccatccggggccgggccaagtctcgcagcctgtctgcctcgcccgccctggggagcaccaaggagttcaggaggacacgctctcttcatgggccatgcccggtgaccacttttggaccaaaggcctgtgtgctgcagaacccccagaccatcatgcacattcaggaccccgcgagccagcggctgacgtggaacaagtccccaaagagcgtccttgtcatcaagaagatgagagatgccagcctactgcagccgttcaaggagctctgcacgcacctcatggaggagaacatgatcgtgtatgtggaaaagaaagtgctagaagaccctgccatcgccagcgatgaaagctttggggcagtgaagaagaaattctgtacctttcgagaagattatgatgacatttccaatcagatagacttcatcatctgcctggggggagacgggacgctgctgtacgcttcctcgcttttccagggcagcgtccctccggtcatggccttccacctgggctccctgggcttcctgaccccattcagctttgagaactttcagtcccaagttactcaggtgatagaggggaacgcagctgttgttctccggagtcggctgaaggtcagggtggtgaaggagctccgggggaagaagacggccgtgcacaatgggctgggtgagaacggctcgcaggctgcaggcctggacatggatgtcgggaagcaggccatgcagtaccaggtcctgaatgaggtggtgattgacagaggcccctcctcctacctgtccaatgtggatgtctacctggacggacacctcatcaccacggtgcagggcgacgatcatgctgtcacctgaagcaaggaacacagcatgggtgtcctttgatggacggaagagacaagagatccgccatggagacagcatcagcatcactacctcatgctacccgctcccctccatctgtgtgcgggaccccgtgagcgactggtttgagagcctcgcccagtgcctgcattggaacgtccggaagaagcaagcccacttcgaggaggaggaggaggaggaggaggagggctaggtcaagcccctatccaggcccgaatccttccgctgccctccaagcgccctctggggacagaccaatctgcgtgtgtctgtgaccgcctgtctcagtggcacggccacttcctttctgtagctgggttagagcctgggtctgccttttgtccagatcagctgtttttttaaaatgtctgactttttttgcatttctaaagaagcgtgagaaatgggctgggagtgcttctgtcctgctgacaccccgcggtgggtccctggagcgcggcctccagctgccgcaatttccatgccaggatatttttccgcaaatcagtcggttgaaattcagaggagtcagaatgactcgacctgtccttcaatgttgataataaatgtctcagccaaaaaccttccttgagctgccatgcttttccccttgacctgcacctcttcccctaaaacttctgcagggaagcccctggcggaggcgccattgaaagcatggtcttgccagtggctggcaaggcggttttgttctgctcagtttctggagagggttggatgcgtcccctgccatccagccctccccgcttgaggccagcactgagtctgggacactcagcgggaagggggctggcatcgccagcgacccacacattcctcacgtagcttctgctcccaggaaggtagtttaaatcctgtatatactttttagagactcttttaaactttctgaagtgctgatgtacatactttctcgtacacacttttgtgaagatttcaaggggaagggagtcgtctgccattcaatgtttacatttatgttctgcaagacgctgtcctcagggaccattaggggaccattctgttcagtgcgatcctgatggtccgggagatgagggtttccggggctagtgatcgtgatcccttttatttgcaactgtaatgagaatttttcacactaacacagcgagggactcaacacgctgattctcctcctgcctctcccgtgagtctccagcctgcccagcaccagcagctgtggagcacgtggatgctgcctaccccggcgcccgcgtcttccacgggcacaggtgtgtggaggccgtggtcggaccctggtgtcctggttactgctgcccgggtgtcttttttttgagtaactgctctctgagttttgcacacgaagttgccctcatctgctggagatcgataaggaaggcacaagacgttctcctctgcccgtgaggagcttcccgcagccgcctggcccagcctgggcacgttctccgaggcatgtgtctccctgctcaccctcgtctgggcacctcagcatctgtggacttgagcgtccaaaaaccctgagtgtgattctgggcagccggcctggcttgaagtccgccatgaccctgggcacaggggaagcccagccgtgggcttaggagagagggaccagcgcccagcgttagggctggaagacggcagtgttcagaattccagccgctcatctgaacacagaaggtgtgaactgacctctaaagcagcgtgagatgggaatgatctagaaaactttggatttttgaagtaaattttaatgtttcatattaatttcttgaaaatgtattaaatgtcattgaaagccttattacgcttttcagatcctttcaataaacaagacttgtagaaaataa

SEQ ID NO: 442551 - DNA, 3103 bp, Homo sapiens
aaatcccccaagttctcatgatccttgcttccctttccagtcacccttggtgccctgtacttcactgtggtcctgaactgaagagctgtgtttttcaggaagacttggccaggccgtgttccgtgtctctggattcaagtcccaggagtcctgaccagagagcaggcatcagtgtttttctgaccgaagttctcatttcctgacaatggaaatggaacaagaaaaaatgaccatgaataaggaattgagtccagacgcggctgcttactgctgctcggcctgccacggcgatgagacctggagttacaaccaccccatccggggccgggccaagtctcgcagcctgtctgcctcgcccgccctggggagcaccaaggagttcaggaggacacgctctcttcatgggccatgcccggtgaccacttttggaccaaaggcctgtgtgctgcagaacccccagaccatcatgcacattcaggaccccgcgagccagcggctgacgtggaacaagtccccaaagagcgtccttgtcatcaagaagatgagagatgccagcctactgcagccgttcaaggagctctgcacgcacctcatggaggagaacatgatcgtgtatgtggaaaagaaagtgctagaagaccctgccatcgccagcgatgaaagctttggggcagtgaagaagaaattctgtacctttcgagaagattatgatgacatttccaatcagatagacttcatcatctgcctggggggagacgggacgctgctgtacgcttcctcgcttttccagggcagcgtccctccggtcatggccttccacctgggctccctgggcttcctgaccccattcagctttgagaactttcagtcccaagttactcaggtgatagaggggaacgcagctgttgttctccggagtcggctgaaggtcagggtggtgaaggagctccgggggaagaagacggccgtgcacaatgggctgggtgagaacggctcgcaggctgcaggcctggacatggatgtcgggaagcaggccatgcagtaccaggtcctgaatgaggtggtgattgacagaggcccctcctcctacctgtccaatgtggatgtctacctggacggacacctcatcaccacggtgcagggcgacggagtgatcgtgtccaccccgacgggcagcacggcgtatgcggccgcggccggggcctccatgatccaccccaacgtgccggccatcatgatcacgcccatctgcccccactcgctgtccttccggcccatcgtggtccccgcaggggtcgagctgaagatcatgctgtcacctgaagcaaggaacacagcatgggtgtcctttgatggacggaagagacaagagatccgccatggagacagcatcagcatcactacctcatgctacccgctcccctccatctgtgtgcgggaccccgtgagcgactggtttgagagcctcgcccagtgcctgcattggaacgtccggaagaagcaagcccacttcgaggaggaggaggaggaggaggaggaggacagaccaatctgcgtgtgtctgtgaccgcctgtctcagtggcacggccacttcctttctgtagctgggttagagcctgggtctgccttttgtccagatcagctgtttttttaaaatgtctgactttttttgcatttctaaagaagcgtgagaaatgggctgggagtgcttctgtcctgctgacaccccgcggtgggtccctggagcgcggcctccagctgccgcaatttccatgccaggatatttttccgcaaatcagtcggttgaaattcagaggagtcagaatgactcgacctgtccttcaatgttgataataaatgtctcagccaaaaaccttccttgagctgccatgcttttccccttgacctgcacctcttcccctcagtggctggcaaggcggttttgttctgctcagtttctggagagggttggatgcgtcccctgccatccagccctccccgcttgaggccagcactgagtctgggacactcagcgggaagggggctggcatcgccagcgacccacacattcctcacgtagcttctgctcccaggaaggtagtttaaatcctgtatatactttttagagactcttttaaactttctgaagtgctgatgtacatactttctcgtacacacttttgtgaagatttcaaggggaagggagtcgtctgccattcaatgtttacatttatgttctgcaagacgctgtcctcagggaccattaggggaccattctgttcagtgcgatcctgatggtccgggagatgagggtttccggggctagtgatcgtgatcccttttatttgcaactgtaatgagaatttttcacactaacacagcgagggactcaacacgctgattctcctcctgcctctcccgtgagtctccagcctgcccagcaccagcagctgtggagcacgtggatgctgcctaccccggcgcccgcgtcttccacgggcacaggtgtgtggaggccgtggtcggaccctggtgtcctggttactgctgcccgggtgtcttttttttgagtaactgctctctgagttttgcacacgaagttgccctcatctgctggagatcgataaggaaggcacaagacgttctcctctgcccgtgaggagcttcccgcagccgcctggcccagcctgggcacgttctccgaggcatgtgtctccctgctcaccctcgtctgggcacctcagcatctgtggacttgagcgtccaaaaaccctgagtgtgattctgggcagccggcctggcttgaagtccgccatgaccctgggcacaggggaagcccagccgtgggcttaggagagagggaccagcgcccagcgttagggctggaagacggcagtgttcagaattccagccgctcatctgaacacagaaggtgtgaactgacctctaaagcagcgtgagatgggaatgatctagaaaactttggatttttgaagtaaattttaatgtttcatattaatttcttgaaaatgtattaaatgtcattgaaagccttattacgcttttcagatcctttcaataaacaagacttgtagaaaataa

SEQ ID NO: 442552 - DNA, 3800 bp, Homo sapiens
  misc_feature (3252)..(3252): n is a, c, g, or t
  misc_feature (3255)..(3255): n is a, c, g, or t
  misc_feature (3257)..(3257): n is a, c, g, or t
  misc_feature (3259)..(3259): n is a, c, g, or t
aaatcccccaagttctcatgatccttgcttccctttccagtcacccttggtgccctgtacttcactgtggtcctgaactgaagagctgtgtttttcaggaagacttggccaggccgtgttccgtgtctctggattcaagtcccaggagtcctgaccagagagcaggcatcagtgtttttctgaccgaagttctcatttcctgacaatggaaatggaacaagaaaaaatgaccatgaataaggaattgagtccagacgcggctgcttactgctgctcggcctgccacggcgatgagacctggagttacaaccaccccatccggggccgggccaagtctcgcagcctgtctgcctcgcccgccctggggagcaccaaggagttcaggaggacacgctctcttcatgggccatgcccggtgaccacttttggaccaaaggcctgtgtgctgcagaacccccagaccatcatgcacattcaggaccccgcgagccagcggctgacgtggaacaagtccccaaagagcgtccttgtcatcaagaagatgagagatgccagcctactgcagccgttcaaggagctctgcacgcacctcatggaggagaacatgatcgtgtatgtggaaaagaaagtgctagaagaccctgccatcgccagcgatgaaagctttggggcagtgaagaagaaattctgtacctttcgagaagattatgatgacatttccaatcagatagacttcatcatctgcctggggggagacgggacgctgctgtacgcttcctcgcttttccagggcagcgtccctccggtcatggccttccacctgggctccctgggcttcctgaccccattcagctttgagaactttcagtcccaagttactcaggtgatagaggggaacgcagctgttgttctccggagtcggctgaaggtcagggtggtgaaggagctccgggggaagaagacggccgtgcacaatgggctgggtgagaacggctcgcaggctgcaggcctggacatggatgtcgggaagcaggccatgcagtaccaggtcctgaatgaggtggtgattgacagaggcccctcctcctacctgtccaatgtggatgtctacctggacggacacctcatcaccacggtgcagggcgacggagtgatcgtgtccaccccgacgggcagcacggcgtatgcggccgcggccggggcctccatgatccaccccaacgtgccggccatcatgatcacgcccatctgcccccactcgctgtccttccggcccatcgtggtccccgcaggggtcgagctgaagatcatgctgtcacctgaagcaaggaacacagcatgggtgtcctttgatggacggaagagacaagagatccgccatggagacagcatcagcatcactacctcatgctacccgctcccctccatctgtgtgcgggaccccgtgagcgactggtttgagagcctcgcccagtgcctgcattggaacgtccggaagaagcaagcccacttcgaggaggaggaggaggaggaggaggagggctaggtcaagcccctatccaggcccgaatccttccgctgccctccaagcgccctctggggacagaccaatctgcgtgtgtctgtgaccgcctgtctcagtggcacggccacttcctttctgtagctgggttagagcctgggtctgccttttgtccagatcagctgtttttttaaaatgtctgactttttttgcatttctaaagaagcgtgagaaatgggctgggagtgcttctgtcctgctgacaccccgcggtgggtccctggagcgcggcctccagctgccgcaatttccatgccaggatatttttccgcaaatcagtcggttgaaattcagaggagtcagaatgactcgacctgtccttcaatgttgataataaatgtctcagccaaaaaccttccttgagctgccatgcttttccccttgacctgcacctcttcccctaaaacttctgcagggaagcccctggcggaggcgccattgaaagcatggtcttgccagtggctggcaaggcggttttgttctgctcagtttctggagagggttggatgcgtcccctgccatccagccctccccgcttgaggccagcactgagtctgggacactcagcgggaagggggctggcatcgccagcgacccacacattcctcacgtagcttctgctcccaggaaggtagtttaaatcctgtatatactttttagagactcttttaaactttctgaagtgctgatgtacatactttctcgtacacacttttgtgaagatttcaaggggaagggagtcgtctgccattcaatgtttacatttatgttctgcaagacgctgtcctcagggaccattaggggaccattctgttcagtgcgatcctgatggtccgggagatgagggtttccggggctagtgatcgtgatcccttttatttgcaactgtaatgagaatttttcacactaacacagcgagggactcaacacgctgattctcctcctgcctctcccgtgagtctccagcctgcccagcaccagcagctgtggagcacgtggatgctgcctaccccggcgcccgcgtcttccacgggcacaggtgtgtggaggccgtggtcggaccctggtgtcctggttactgctgcccgggtgtcttttttttgagtaactgctctctgagttttgcacacgaagttgccctcatctgctggagatcgataaggaaggcacaagacgttctcctctgcccgtgaggagcttcccgcagccgcctggcccagcctgggcacgttctccgaggcatgtgtctccctgctcaccctcgtctgggcacctcagcatctgtggacttgagcgtccaaaaaccctgagtgtgattctgggcagccggcctggcttgaagtccgccatgaccctgggcacaggggaagcccagccgtgggcttaggagagagggaccagcgcccagcgttagggctggaagacggcagtgttcagaattccagccgctcatctgaacacagaaggtgtgaactgacctctaaagcagcgtgagatgggaatgatctagaaaactttggatttttgaagtaaattttaatgtttcatattaatttcttgaaaatgtattaaatgtcattgaaagccttattacgcttttcagatcctttcaataaacaagacttgtagaaaataaaaaaaaaaaaacaaaaaaaaaaaaaaaaaaaaanaanananaaaaaaaaaaaaaaaaaaaaaaagaggggggggagcccgacagaaagaaactcccccggagggggcgcccgaacagcacgcgcgcgcacccgcgtttgatacaaaaaaggggccccaccaaaggaggaggcgcactatcaaaaaagaagcgaggcgcgcgccgcgggatacacacgaccgtgtgtctgtggtggggcggaaaacacaggcgcccacagacgaggagacctattttgtgggaggaggaggcgcaccccacatatgacgcgggggggggggagagccccaatatgttgtggcgacacaaccaattcactccagaacggagaaaaatataattatgaaagcaccctccagaaggggggaacatattaatataacgactacgtgtcagagagggggtggtacataggtgggggggatcaacacaacaacgtggagtataatctatctggggagcggggaacaacagaaaaacgtgtgtgtcggcacacacgggagttagttagacaataatgacaaaaacatatttttttacccc

SEQ ID NO: 442553 - DNA, 2045 bp, Homo sapiens
aaatcccccaagttctcatgatccttgcttccctttccagtcacccttggtgccctgtacttcactgtggtcctgaactgaagagctgtgtttttcaggaagacttggccaggccgtgttccgtgtctctggattcaagtcccaggagtcctgaccagagagcaggcatcagtgtttttctgaccgaagttctcatttcctgacaatggaaatggaacaagaaaaaatgaccatgaataaggaattgagtccagacgcggctgcttactgctgctcggcctgccacggcgatgagacctggagttacaaccaccccatccggggccgggccaagtctcgcagcctgtctgcctcgcccgccctggggagcaccaaggagttcaggaggacacgctctcttcatgggccatgcccggtgaccacttttggacagaccaatctgcgtgtgtctgtgaccgcctgtctcagtggcacggccacttcctttctgtagctgggttagagcctgggtctgccttttgtccagatcagctgtttttttaaaatgtctgactttttttgcatttctaaagaagcgtgagaaatgggctgggagtgcttctgtcctgctgacaccccgcggtgggtccctggagcgcggcctccagctgccgcaatttccatgccaggatatttttccgcaaatcagtcggttgaaattcagaggagtcagaatgactcgacctgtccttcaatgttgataataaatgtctcagccaaaaaccttccttgagctgccatgcttttccccttgacctgcacctcttcccctaaaacttctgcagggaagcccctggcggaggcgccattgaaagcatggtcttgccagtggctggcaaggcggttttgttctgctcagtttctggagagggttggatgcgtcccctgccatccagccctccccgcttgaggccagcactgagtctgggacactcagcgggaagggggctggcatcgccagcgacccacacattcctcacgtagcttctgctcccaggaaggtagtttaaatcctgtatatactttttagagactcttttaaactttctgaagtgctgatgtacatactttctcgtacacacttttgtgaagatttcaaggggaagggagtcgtctgccattcaatgtttacatttatgttctgcaagacgctgtcctcagggaccattaggggaccattctgttcagtgcgatcctgatggtccgggagatgagggtttccggggctagtgatcgtgatcccttttatttgcaactgtaatgagaatttttcacactaacacagcgagggactcaacacgctgattctcctcctgcctctcccgtgagtctccagcctgcccagcaccagcagctgtggagcacgtggatgctgcctaccccggcgcccgcgtcttccacgggcacaggtgtgtggaggccgtggtcggaccctggtgtcctggttactgctgcccgggtgtcttttttttgagtaactgctctctgagttttgcacacgaagttgccctcatctgctggagatcgataaggaaggcacaagacgttctcctctgcccgtgaggagcttcccgcagccgcctggcccagcctgggcacgttctccgaggcatgtgtctccctgctcaccctcgtctgggcacctcagcatctgtggacttgagcgtccaaaaaccctgagtgtgattctgggcagccggcctggcttgaagtccgccatgaccctgggcacaggggaagcccagccgtgggcttaggagagagggaccagcgcccagcgttagggctggaagacggcagtgttcagaattccagccgctcatctgaacacagaaggtgtgaactgacctctaaagcagcgtgagatgggaatgatctagaaaactttggatttttgaagtaaattttaatgtttcatattaatttcttgaaaatgtattaaatgtcattgaaagccttattacgcttttcagatcctttcaataaacaagacttgtagaaaataa

SEQ ID NO: 442554 - DNA, 3315 bp, Homo sapiens
aaatcccccaagttctcatgatccttgcttccctttccagtcacccttggtgccctgtacttcactgtggtcctgaactgaagagctgtgtttttcaggaagacttggccaggccgtgttccgtgtctctggattcaagtcccaggagtcctgaccagagagcaggcatcagtgtttttctgaccgaagttctcatttcctgacaatggaaatggaacaagaaaaaatgaccatgaataaggaattgagtccagacgcggctgcttactgctgctcggcctgccacggcgatgagacctggagttacaaccaccccatccggggccgggccaagtctcgcagcctgtctgcctcgcccgccctggggagcaccaaggagttcaggaggacacgctctcttcatgggccatgcccggtgaccacttttggaccaaaggcctgtgtgctgcagaacccccagaccatcatgcacattcaggaccccgcgagccagcggctgacgtggaacaagtccccaaagagcgtccttgtcatcaagaagatgagagatgccagcctactgcagccgttcaaggagctctgcacgcacctcatggaggagaacatgatcgtgtatgtggaaaagaaagtgctagaagaccctgccatcgccagcgatgaaagctttggggcagtgaagaagaaattctgtacctttcgagaagattatgatgacatttccaatcagatagacttcatcatctgcctggggggagacgggacgctgctgtacgcttcctcgcttttccagggcagcgtccctccggtcatggccttccacctgggctccctgggcttcctgaccccattcagctttgagaactttcagtcccaagttactcaggtgatagaggggaacgcagctgttgttctccggagtcggctgaaggtcagggtggtgaaggagctccgggggaagaagacggccgtgcacaatgggctgggtgagaacggctcgcaggctgcaggcctggacatggatgtcgggaagcaggccatgcagtaccaggtcctgaatgaggtggtgattgacagaggcccctcctcctacctgtccaatgtggatgtctacctggacggacacctcatcaccacggtgcagggcgacggagtgatcgtgtccaccccgacgggcagcacggcgtatgcggccgcggccggggcctccatgatccaccccaacgtgccggccatcatgatcacgcccatctgcccccactcgctgtccttccggcccatcgtggtccccgcaggggtcgagctgaagatcatgctgtcacctgaagcaaggaacacagcatgggtgtcctttgatggacggaagagacaagagatccgccatggagacagcatcagcatcactacctcatgctacccgctcccctccatctgtgtgcgggaccccgtgagcgactggtttgagagcctcgcccagtgcctgcattggaacgtccggaagaagcaagcccacttcgaggaggaggaggaggaggaggaggagggctaggtcaagcccctatccaggcccgaatccttccgctgccctccaagcgccctctggggacagaccaatctgcgtgtgtctgtgaccgcctgtctcagtggcacggccacttcctttctgtagctgggttagagcctgggtctgccttttgtccagatcagctgtttttttaaaatgtctgactttttttgcatttctaaagaagcgtgagaaatgggctgggagtgcttctgtcctgctgacaccccgcggtgggtccctggagcgcggcctccagctgccgcaatttccatgccaggatatttttccgcaaatcagtcggttgaaattcagaggagtcagaatgactcgacctgtccttcaatgttgataataaatgtctcagccaaaaaccttccttgagctgccatgcttttccccttgacctgcacctcttcccctaaaacttctgcagggaagcccctggcggaggcgccattgaaagcatggtcttgccagtggctggcaaggcggttttgttctgctcagtttctggagagggttggatgcgtcccctgccatccagccctccccgcttgaggccagcactgagtctgggacactcagcgggaagggggctggcatcgccagcgacccacacattcctcacgtagcttctgctcccaggaaggtagtttaaatcctgtatatactttttagagactcttttaaactttctgaagtgctgatgtacatactttctcgtacacacttttgtgaagatttcaaggggaagggagtcgtctgccattcaatgtttacatttatgttctgcaagacgctgtcctcagggaccattaggggaccattctgttcagtgcgatcctgatggtccgggagatgagggtttccggggctagtgatcgtgatcccttttatttgcaactgtaatgagaatttttcacactaacacagcgagggactcaacacgctgattctcctcctgcctctcccgtgagtctccagcctgcccagcaccagcagctgtggagcacgtggatgctgcctaccccggcgcccgcgtcttccacgggcacaggtgtgtggaggccgtggtcggaccctggtgtcctggttactgctgcccgggtgtcttttttttgagtaactgctctctgagttttgcacacgaagttgccctcatctgctggagatcgataaggaaggcacaagacgttctcctctgcccgtgaggagcttcccgcagccgcctggcccagcctgggcacgttctccgaggcatgtgtctccctgctcaccctcgtctgggcacctcagcatctgtggacttgagcgtccaaaaaccctgagtgtgattctgggcagccggcctggcttgaagtccgccatgaccctgggcacaggggaagcccagccgtgggcttaggagagagggaccagcgcccagcgttagggctggaagacggcagtgttcagaattccagccatgaccctgggcacaggggaagcccagccgtgggcttaggagagagggaccagcgcccagcgttagggctggaagacggcagtgttcagaattccagccgctcatctgaacacagaaggtgtgaactgacctctaaagcagcgtgagatgggaatgatctagaaaactttggatttttgaagtaaattttaatgtttcatattaatttcttgaaaatgtattaaatgtcattgaaagccttattacgcttttcagatcctttcaataaacaagacttgtagaaaat

SEQ ID NO: 442555 - DNA, 1853 bp, Homo sapiens
aaatcccccaagttctcatgatccttgcttccctttccagtcacccttggtgccctgtacttcactgtggtcctgaactgaagagctgtgtttttcaggaagacttggccaggccgtgttccgtgtctctggattcaagtcccaggagtcctgaccagagagcaggcatcagtgtttttctgaccgaagttctcatttcctgacaatggaaatggaacaagaaaaaatgaccatgaataaggaattgagtccagacgcggctgcttactgctgctcggcctgccacggcgatgagacctggagttacaaccaccccatccggggccgggccaagtctcgcagcctgtctgcctcgcccgccctggggagcaccaaggagttcaggaggacacgctctcttcatgggccatgcccggtgaccacttttggaccaaaggcctgtgtgctgcagaacccccagaccatcatgcacattcaggaccccgcgagccagcggctgacgtggaacaagtccccaaagagcgtccttgtcatcaagaagatgagagatgccagcctactgcagccgttcaaggagctctgcacgcacctcatggaggagaacatgatcgtgtatgtggaaaagaaagtgctagaagaccctgccatcgccagcgatgaaagctttggggcagtgaagaagaaattctgtacctttcgagaagattatgatgacatttccaatcagatagacttcatcatctgcctggggggagacgggacgctgctgtacgcttcctcgcttttccagggcagcgtccctccggtcatggccttccacctgggctccctgggcttcctgaccccattcagctttgagaactttcagtcccaagttactcaggtgatagaggggaacgcagctgttgttctccggagtcggctgaaggtcagggtggtgaaggagctccgggggaagaagacggccgtgcacaatgggctgggtgagaacggctcgcaggctgcaggcctggacatggatgtcgggaagcaggccatgcagtaccaggtcctgaatgaggtggtgattgacagaggcccctcctcctacctgtccaatgtggatgtctacctggacggacacctcatcaccacggtgcagggcgacggagtgatcgtgtccaccccgacgggcagcacggcgtatgcggccgcggccggggcctccatgatccaccccaacgtgccggccatcatgatcacgcccatctgcccccactcgctgtccttccggcccatcgtggtccccgcaggggtcgagctgaagatcatgctgtcacctgaagcaaggaacacagcatgggtgtcctttgatggacggaagagacaagagatccgccatggagacagcatcagcatcactacctcatgctacccgctcccctccatctgtgtgcgggaccccgtgagcgactggtttgagagcctcgcccagtgcctgcattggaacgtccggaagaagcaagcccacttcgaggaggaggaggaggaggaggaggagggctaggtcaagcccctatccaggcccgaatccttccgctgccctccaagcgccctctggggacagaccaatctgcgtgtgtctgtgaccgcctgtctcagtggcacggccacttcctttctgtagctgggttagagcctgggtctgccttttgtccagatcagctaaatgttgatttttgcttctaagacgtgaaagggggaggttggcgggacccgggggccgagggcccagcgatcagcggattcgaaggtaatagggaggcgtggtaatccaaaaaaaaaggtggggaagagggtcctagggccggaaa

SEQ ID NO: 442556 - DNA, 563 bp, Homo sapiens
gtgggggggcgggcatgcaggccacgatgccaggtctctgaccacagcgcccgtgagtcgggaacctccctgcaggagggtggggtctgcaggtggaatgagcaggttggcactttgcttccaggagaacatgatcgtgtatgtggaaaagaaagtgctagaagaccctgccatcgccagcgatgaaagctttggggcagtgaagaagaaattctgtacctttcgagaaggtgggctgtcagcagctctgtccttggtttctccagcacagttccccgccccattggaagcttctggcactgttgcccttgtcattggtgtctgcgcactgcgccacagaggggccactgtgtgacagcctcttcttggttttgctttgtgtttcctagattatgatgacatttccaatcagatagacttcatcatctgcctggggggagacgggacgctgctgtacgcttcctcgcttttccaggtgaagcgctgacatttccagacccacaccaggttctagtctaggtgctgcgtaacgaggggctcacaagcatggcttccattgcttt

SEQ ID NO: 442557 - DNA, 3235 bp, Homo sapiens
agtgggcgggcgcggcgcattgctgctcggcggcgccggcgccggggtccgggcggccatggggcaacaggcggccagggcgccaagggccaggtagcgacggctggcggcggcgcggcggcggggcctgcgggctcggtccggcatgtagacgcccccgcaggcgcccgcggcagcgaacggcatcagtgtttttctgaccgaagttctcatttcctgacaatggaaatggaacaagaaaaaatgaccatgaataaggaattgagtccagacgcggctgcttactgctgctcggcctgccacggcgatgagacctggagttacaaccaccccatccggggccgggccaagtctcgcagcctgtctgcctcgcccgccctggggagcaccaaggagttcaggaggacacgctctcttcatgggccatgcccggtgaccacttttggaccaaaggcctgtgtgctgcagaacccccagaccatcatgcacattcaggaccccgcgagccagcggctgacgtggaacaagtccccaaagagcgtccttgtcatcaagaagatgagagatgccagcctactgcagccgttcaaggagctctgcacgcacctcatggaggagaacatgatcgtgtatgtggaaaagaaagtgctagaagaccctgccatcgccagcgatgaaagctttggggcagtgaagaagaaattctgtacctttcgagaagattatgatgacatttccaatcagatagacttcatcatctgcctggggggagacgggacgctgctgtacgcttcctcgcttttccagggcagcgtccctccggtcatggccttccacctgggctccctgggcttcctgaccccattcagctttgagaactttcagtcccaagttactcaggtgatagaggggaacgcagctgttgttctccggagtcggctgaaggtcagggtggtgaaggagctccgggggaagaagacggccgtgcacaatgggctgggtgagaacggctcgcaggctgcaggcctggacatggatgtcgggaagcaggccatgcagtaccaggtcctgaatgaggtggtgattgacagaggcccctcctcctacctgtccaatgtggatgtctacctggacggacacctcatcaccacggtgcagggcgacggagtgatcgtgtccaccccgacgggcagcacggcgtatgcggccgcggccggggcctccatgatccaccccaacgtgccggccatcatgatcacgcccatctgcccccactcgctgtccttccggcccatcgtggtccccgcaggggtcgagctgaagatcatgctgtcacctgaagcaaggaacacagcatgggtgtcctttgatggacggaagagacaagagatccgccatggagacagcatcagcatcactacctcatgctacccgctcccctccatctgtgtgcgggaccccgtgagcgactggtttgagagcctcgcccagtgcctgcattggaacgtccggaagaagcaagcccacttcgaggaggaggaggaggaggaggaggagggctaggtcaagcccctatccaggcccgaatccttccgctgccctccaagcgccctctggggacagaccaatctgcgtgtgtctgtgaccgcctgtctcagtggcacggccacttcctttctgtagctgggttagagcctgggtctgccttttgtccagatcagctgtttttttaaaatgtctgactttttttgcatttctaaagaagcgtgagaaatgggctgggagtgcttctgtcctgctgacaccccgcggtgggtccctggagcgcggcctccagctgccgcaatttccatgccaggatatttttccgcaaatcagtcggttgaaattcagaggagtcagaatgactcgacctgtccttcaatgttgataataaatgtctcagccaaaaaccttccttgagctgccatgcttttccccttgacctgcacctcttcccctaaaacttctgcagggaagcccctggcggaggcgccattgaaagcatggtcttgccagtggctggcaaggcggttttgttctgctcagtttctggagagggttggatgcgtcccctgccatccagccctccccgcttgaggccagcactgagtctgggacactcagcgggaagggggctggcatcgccagcgacccacacattcctcacgtagcttctgctcccaggaaggtagtttaaatcctgtatatactttttagagactcttttaaactttctgaagtgctgatgtacatactttctcgtacacacttttgtgaagatttcaaggggaagggagtcgtctgccattcaatgtttacatttatgttctgcaagacgctgtcctcagggaccattaggggaccattctgttcagtgcgatcctgatggtccgggagatgagggtttccggggctagtgatcgtgatcccttttatttgcaactgtaatgagaatttttcacactaacacagcgagggactcaacacgctgattctcctcctgcctctcccgtgagtctccagcctgcccagcaccagcagctgtggagcacgtggatgctgcctaccccggcgcccgcgtcttccacgggcacaggtgtgtggaggccgtggtcggaccctggtgtcctggttactgctgcccgggtgtcttttttttgagtaactgctctctgagttttgcacacgaagttgccctcatctgctggagatcgataaggaaggcacaagacgttctcctctgcccgtgaggagcttcccgcagccgcctggcccagcctgggcacgttctccgaggcatgtgtctccctgctcaccctcgtctgggcacctcagcatctgtggacttgagcgtccaaaaaccctgagtgtgattctgggcagccggcctggcttgaagtccgccatgaccctgggcacaggggaagcccagccgtgggcttaggagagagggaccagcgcccagcgttagggctggaagacggcagtgttcagaattccagccgctcatctgaacacagaaggtgtgaactgacctctaaagcagcgtgagatgggaatgatctagaaaactttggatttttgaagtaaattttaatgtttcatattaatttcttgaaaatgtattaaatgtcattgaaagccttattacgcttttcagatcctttcaataaacaagacttgtagaaaataa

SEQ ID NO: 442558 - DNA, 3218 bp, Homo sapiens
aaatcccccaagttctcatgatccttgcttccctttccagtcacccttggtgccctgtacttcactgtggtcctgaactgaagagctgtgtttttcaggaagacttggccaggccgtgttccgtgtctctggattcaagtcccaggagtcctgaccagagagcaggcatcagtgtttttctgaccgaagttctcatttcctgacaatggaaatggaacaagaaaaaatgaccatgaataaggaattgagtccagacgcggctgcttactgctgctcggcctgccacggcgatgagacctggagttacaaccaccccatccggggccgggccaagtctcgcagcctgtctgcctcgcccgccctggggagcaccaaggagttcaggaggacacgctctcttcatgggccatgcccggtgaccacttttggaccaaaggcctgtgtgctgcagaacccccagaccatcatgcacattcaggaccccgcgagccagcggctgacgtggaacaagtccccaaagagcgtccttgtcatcaagaagatgagagatgccagcctactgcagccgttcaaggagctctgcacgcacctcatggaggagaacatgatcgtgtatgtggaaaagaaagtgctagaagaccctgccatcgccagcgatgaaagctttggggcagtgaagaagaaattctgtacctttcgagaagattatgatgacatttccaatcagatagacttcatcatctgcctggggggagacgggacgctgctgtacgcttcctcgcttttccagggcagcgtccctccggtcatggccttccacctgggctccctgggcttcctgaccccattcagctttgagaactttcagtcccaagttactcaggtgatagaggggaacgcagctgttgttctccggagtcggctgaaggtcagggtggtgaaggagctccgggggaagaagacggccgtgcacaatgggctgggtgagaacggctcgcaggctgcaggcctggacatggatgtcgggaagcaggccatgcagtaccaggtcctgaatgaggtggtgattgacagaggcccctcctcctacctgtccaatgtggatgtctacctggacggacacctcatcaccacggtgcagggcgacggagtgatcgtgtccaccccgacgggcagcacggcgtatgcggccgcggccggggcctccatgatccaccccaacgtgccggccatcatgatcacgcccatctgcccccactcgctgtccttccggcccatcgtggtccccgcaggggtcgagctgaagatcatgctgtcacctgaagcaaggaacacagcatgggtgtcctttgatggacggaagagacaagagatccgccatggagacagcatcagcatcactacctcatgctacccgctcccctccatctgtgtgcgggaccccgtgagcgactggtttgagagcctcgcccagtgcctgcattggaacgtccggaagaagcaagcccacttcgaggaggaggaggaggaggaggaggagggctaggtcaagcccctatccaggcccgaatccttccgctgccctccaagcgccctctggggacagaccaatctgcgtgtgtctgtgaccgcctgtctcagtggcacggccacttcctttctgtagctgggttagagcctgggtctgccttttgtccagatcagctgtttttttaaaatgtctgactttttttgcatttctaaagaagcgtgagaaatgggctgggagtgcttctgtcctgctgacaccccgcggtgggtccctggagcgcggcctccagctgccgcaatttccatgccaggatatttttccgcaaatcagtcggttgaaattcagaggagtcagaatgactcgacctgtccttcaatgttgataataaatgtctcagccaaaaaccttccttgagctgccatgcttttccccttgacctgcacctcttcccctaaaacttctgcagggaagcccctggcggaggcgccattgaaagcatggtcttgccagtggctggcaaggcggttttgttctgctcagtttctggagagggttggatgcgtcccctgccatccagccctccccgcttgaggccagcactgagtctgggacactcagcgggaagggggctggcatcgccagcgacccacacattcctcacgtagcttctgctcccaggaaggtagtttaaatcctgtatatactttttagagactcttttaaactttctgaagtgctgatgtacatactttctcgtacacacttttgtgaagatttcaaggggaagggagtcgtctgccattcaatgtttacatttatgttctgcaagacgctgtcctcagggaccattaggggaccattctgttcagtgcgatcctgatggtccgggagatgagggtttccggggctagtgatcgtgatcccttttatttgcaactgtaatgagaatttttcacactaacacagcgagggactcaacacgctgattctcctcctgcctctcccgtgagtctccagcctgcccagcaccagcagctgtggagcacgtggatgctgcctaccccggcgcccgcgtcttccacgggcacaggtgtgtggaggccgtggtcggaccctggtgtcctggttactgctgcccgggtgtcttttttttgagtaactgctctctgagttttgcacacgaagttgccctcatctgctggagatcgataaggaaggcacaagacgttctcctctgcccgtgaggagcttcccgcagccgcctggcccagcctgggcacgttctccgaggcatgtgtctccctgctcaccctcgtctgggcacctcagcatctgtggacttgagcgtccaaaaaccctgagtgtgattctgggcagccggcctggcttgaagtccgccatgaccctgggcacaggggaagcccagccgtgggcttaggagagagggaccagcgcccagcgttagggctggaagacggcagtgttcagaattccagccgctcatctgaacacagaaggtgtgaactgacctctaaagcagcgtgagatgggaatgatctagaaaactttggatttttgaagtaaattttaatgtttcatattaatttcttgaaaatgtattaaatgtcattgaaagccttattacgcttttcagatcctttcaataaacaagacttgtagaaaataa

SEQ ID NO: 442559 - DNA, 3674 bp, Homo sapiens
aaatcccccaagttctcatgatccttgcttccctttccagtcacccttggtgccctgtacttcactgtggtcctgaactgaagagctgtgtttttcaggaagacttggccaggccgtgttccgtgtctctggattcaagtcccaggagtcctgaccagagagcaggcatcagtgtttttctgaccgaagttctcatttcctgacaatggaaatggaacaagaaaaaatgaccatgaataaggaattgagtccagacgcggctgcttactgctgctcggcctgccacggcgatgagacctggagttacaaccaccccatccggggccgggccaagtctcgcagcctgtctgcctcgcccgccctggggagcaccaaggagttcaggaggacacgctctcttcatgggccatgcccggtgaccacttttggaccaaaggcctgtgtgctgcagaacccccagaccatcatagccactcctttgtcactcgcatctcagctgctgccttcaccagccgtcagtcactcgggccagggcggggtcaccggacaggtgcatgttctgcctcagccctcagaccagggcgtactcagtggtccccgagctgcccgaggccagacagccccgcaggaggaagcggtgacccaggaagaggtcgaggcgctggtttgtggtcacacacagcggtgggtgcctgggccggtgtacgacgccgctgctggtggctctggctgggctcagctgagcctcagggctggaatgggtgtaggccaggccactgggcacattcaggaccccgcgagccagcggctgacgtggaacaagtccccaaagagcgtccttgtcatcaagaagatgagagatgccagcctactgcagccgttcaaggagctctgcacgcacctcatggagaagagcaggcgtgggggttgcggcgcccaggaaagccactcctgaaataacagccttagtcaattcctgagagggagccccctccgcccagtcatctcttaaaggtcctgcttcctcctggcgcgttggtgatgaagtttcagcgagaacatgatcgtgtatgtggaaaagaaagtgctagaagaccctgccatcgccagcgatgaaagctttggggcagtgaagaagaaattctgtacctttcgagaagattatgatgacatttccaatcagatagacttcatcatctgcctggggggagacgggacgctgctgtacgcttcctcgcttttccagggcagcgtccctccggtcatggccttccacctgggctccctgggcttcctgaccccattcagctttgagaactttcagtcccaagttactcaggtgatagaggggaacgcagctgttgttctccggagtcggctgaaggtcagggtggtgaaggagctccgggggaagaagacggccgtgcacaatgggctgggtgagaacggctcgcaggctgcaggcctggacatggatgtcgggaagcaggccatgcagtaccaggtcctgaatgaggtggtgattgacagaggcccctcctcctacctgtccaatgtggatgtctacctggacggacacctcatcaccacggtgcagggcgacggagtgatcgtgtccaccccgacgggcagcacggcgtatgcggccgcggccggggcctccatgatccaccccaacgtgccggccatcatgatcacgcccatctgcccccactcgctgtccttccggcccatcgtggtccccgcaggggtcgagctgaagatcatgctgtcacctgaagcaaggaacacagcatgggtgtcctttgatggacggaagagacaagagatccgccatggagacagcatcagcatcactacctcatgctacccgctcccctccatctgtgtgcgggaccccgtgagcgactggtttgagagcctcgcccagtgcctgcattggaacgtccggaagaagcaagcccacttcgaggaggaggaggaggaggaggaggagggctaggtcaagcccctatccaggcccgaatccttccgctgccctccaagcgccctctggggacagaccaatctgcgtgtgtctgtgaccgcctgtctcagtggcacggccacttcctttctgtagctgggttagagcctgggtctgccttttgtccagatcagctgtttttttaaaatgtctgactttttttgcatttctaaagaagcgtgagaaatgggctgggagtgcttctgtcctgctgacaccccgcggtgggtccctggagcgcggcctccagctgccgcaatttccatgccaggatatttttccgcaaatcagtcggttgaaattcagaggagtcagaatgactcgacctgtccttcaatgttgataataaatgtctcagccaaaaaccttccttgagctgccatgcttttccccttgacctgcacctcttcccctaaaacttctgcagggaagcccctggcggaggcgccattgaaagcatggtcttgccagtggctggcaaggcggttttgttctgctcagtttctggagagggttggatgcgtcccctgccatccagccctccccgcttgaggccagcactgagtctgggacactcagcgggaagggggctggcatcgccagcgacccacacattcctcacgtagcttctgctcccaggaaggtagtttaaatcctgtatatactttttagagactcttttaaactttctgaagtgctgatgtacatactttctcgtacacacttttgtgaagatttcaaggggaagggagtcgtctgccattcaatgtttacatttatgttctgcaagacgctgtcctcagggaccattaggggaccattctgttcagtgcgatcctgatggtccgggagatgagggtttccggggctagtgatcgtgatcccttttatttgcaactgtaatgagaatttttcacactaacacagcgagggactcaacacgctgattctcctcctgcctctcccgtgagtctccagcctgcccagcaccagcagctgtggagcacgtggatgctgcctaccccggcgcccgcgtcttccacgggcacaggtgtgtggaggccgtggtcggaccctggtgtcctggttactgctgcccgggtgtcttttttttgagtaactgctctctgagttttgcacacgaagttgccctcatctgctggagatcgataaggaaggcacaagacgttctcctctgcccgtgaggagcttcccgcagccgcctggcccagcctgggcacgttctccgaggcatgtgtctccctgctcaccctcgtctgggcacctcagcatctgtggacttgagcgtccaaaaaccctgagtgtgattctgggcagccggcctggcttgaagtccgccatgaccctgggcacaggggaagcccagccgtgggcttaggagagagggaccagcgcccagcgttagggctggaagacggcagtgttcagaattccagccgctcatctgaacacagaaggtgtgaactgacctctaaagcagcgtgagatgggaatgatctagaaaactttggatttttgaagtaaattttaatgtttcatattaatttcttgaaaatgtattaaatgtcattgaaagccttattacgcttttcagatcctttcaataaacaagacttgtagaaaataa

SEQ ID NO: 442560 - DNA, 3293 bp, Homo sapiens
aaatcccccaagttctcatgatccttgcttccctttccagtcacccttggtgccctgtacttcactgtggtcctgaactgaagagctgtgtttttcaggaagacttggccaggccgtgttccgtgtctctggattcaagtcccaggagtcctgaccagagagcaggcatcagtgtttttctgaccgaagttctcatttcctgacaatggaaatggaacaagaaaaaatgaccatgaataaggaattgagtccagacgcggctgcttactgctgctcggcctgccacggcgatgagacctggagttacaaccaccccatccggggccgggccaagtctcgcagcctgtctgcctcgcccgccctggggagcaccaaggagttcaggaggacacgctctcttcatgggccatgcccggtgaccacttttggaccaaaggcctgtgtgctgcagaacccccagaccatcatgcacattcaggaccccgcgagccagcggctgacgtggaacaagtccccaaagagcgtccttgtcatcaagaagatgagagatgccagcctactgcagccgttcaaggagctctgcacgcacctcatggaggagaacatgatcgtgtatgtggaaaagaaagtgctagaagaccctgccatcgccagcgatgaaagctttggggcagtgaagaagaaattctgtacctttcgagaagattatgatgacatttccaatcagatagacttcatcatctgcctggggggagacgggacgctgctgtacgcttcctcgcttttccagggcagcgtccctccggtcatggccttccacctgggctccctgggcttcctgaccccattcagctttgagaactttcagtcccaagttactcaggtgatagaggggaacgcagctgttgttctccggagtcggctgaaggtcagggtggtgaaggagctccgggggaagaagacggccgtgcacaatgggctgggtgagaacggctcgcaggctgcaggcctggacatggatgtcgggaagcaggccatgcagtaccaggtcctgaatgaggtggtgattgacagaggcccctcctcctacctgtccaatgtggatgtctacctggacggacacctcatcaccacggtgcagggcgacggtaaggcccgcagcactgtcctggggccctgagcgtccctcgggcgggagtgacgcctgcgcctgtccctgtcaggagtgatcgtgtccaccccgacgggcagcacggcgtatgcggccgcggccggggcctccatgatccaccccaacgtgccggccatcatgatcacgcccatctgcccccactcgctgtccttccggcccatcgtggtccccgcaggggtcgagctgaagatcatgctgtcacctgaagcaaggaacacagcatgggtgtcctttgatggacggaagagacaagagatccgccatggagacagcatcagcatcactacctcatgctacccgctcccctccatctgtgtgcgggaccccgtgagcgactggtttgagagcctcgcccagtgcctgcattggaacgtccggaagaagcaagcccacttcgaggaggaggaggaggaggaggaggagggctaggtcaagcccctatccaggcccgaatccttccgctgccctccaagcgccctctggggacagaccaatctgcgtgtgtctgtgaccgcctgtctcagtggcacggccacttcctttctgtagctgggttagagcctgggtctgccttttgtccagatcagctgtttttttaaaatgtctgactttttttgcatttctaaagaagcgtgagaaatgggctgggagtgcttctgtcctgctgacaccccgcggtgggtccctggagcgcggcctccagctgccgcaatttccatgccaggatatttttccgcaaatcagtcggttgaaattcagaggagtcagaatgactcgacctgtccttcaatgttgataataaatgtctcagccaaaaaccttccttgagctgccatgcttttccccttgacctgcacctcttcccctaaaacttctgcagggaagcccctggcggaggcgccattgaaagcatggtcttgccagtggctggcaaggcggttttgttctgctcagtttctggagagggttggatgcgtcccctgccatccagccctccccgcttgaggccagcactgagtctgggacactcagcgggaagggggctggcatcgccagcgacccacacattcctcacgtagcttctgctcccaggaaggtagtttaaatcctgtatatactttttagagactcttttaaactttctgaagtgctgatgtacatactttctcgtacacacttttgtgaagatttcaaggggaagggagtcgtctgccattcaatgtttacatttatgttctgcaagacgctgtcctcagggaccattaggggaccattctgttcagtgcgatcctgatggtccgggagatgagggtttccggggctagtgatcgtgatcccttttatttgcaactgtaatgagaatttttcacactaacacagcgagggactcaacacgctgattctcctcctgcctctcccgtgagtctccagcctgcccagcaccagcagctgtggagcacgtggatgctgcctaccccggcgcccgcgtcttccacgggcacaggtgtgtggaggccgtggtcggaccctggtgtcctggttactgctgcccgggtgtcttttttttgagtaactgctctctgagttttgcacacgaagttgccctcatctgctggagatcgataaggaaggcacaagacgttctcctctgcccgtgaggagcttcccgcagccgcctggcccagcctgggcacgttctccgaggcatgtgtctccctgctcaccctcgtctgggcacctcagcatctgtggacttgagcgtccaaaaaccctgagtgtgattctgggcagccggcctggcttgaagtccgccatgaccctgggcacaggggaagcccagccgtgggcttaggagagagggaccagcgcccagcgttagggctggaagacggcagtgttcagaattccagccgctcatctgaacacagaaggtgtgaactgacctctaaagcagcgtgagatgggaatgatctagaaaactttggatttttgaagtaaattttaatgtttcatattaatttcttgaaaatgtattaaatgtcattgaaagccttattacgcttttcagatcctttcaataaacaagacttgtagaaaataa

SEQ ID NO: 442561 - DNA, 3619 bp, Homo sapiens
aaatcccccaagttctcatgatccttgcttccctttccagtcacccttggtgccctgtacttcactgtggtcctgaactgaagagctgtgtttttcaggaagacttggccaggccgtgttccgtgtctctggattcaagtcccaggagtcctgaccagagagcaggcatcagtgtttttctgaccgaagttctcatttcctgacaatggaaatggaacaagaaaaaatgaccatgaataaggaattgagtccagacgcggctgcttactgctgctcggcctgccacggcgatgagacctggagttacaaccaccccatccggggccgggccaagtctcgcagcctgtctgcctcgcccgccctggggagcaccaaggagttcaggaggacacgctctcttcatgggccatgcccggtgaccacttttggaccaaaggcctgtgtgctgcagaacccccagaccatcatgcacattcaggaccccgcgagccagcggctgacgtggaacaagtccccaaagagcgtccttgtcatcaagaagatgagagatgccagcctactgcagccgttcaaggagctctgcacgcacctcatggaggagaacatgatcgtgtatgtggaaaagaaagtgctagaagaccctgccatcgccagcgatgaaagctttggggcagtgaagaagaaattctgtacctttcgagaagattatgatgacatttccaatcagatagacttcatcatctgcctggggggagacgggacgctgctgtacgcttcctcgcttttccagggcagcgtccctccggtcatggccttccacctgggctccctgggcttcctgaccccattcagctttgagaactttcagtcccaagttactcaggtgatagaggggaacgcagctgttgttctccggagtcggctgaaggtcagggtggtgaaggagctccgggggaagaagacggccgtgcacaatgggctgggtgagaacggctcgcaggctgcaggcctggacatggatgtcgggaagcaggccatgcagtaccaggtcctgaatgaggtggtgattgacagaggcccctcctcctacctgtccaatgtggatgtctacctggacggacacctcatcaccacggtgcagggcgacggagtgatcgtgtccaccccgacgggcagcacggcgtatgcggccgcggccggggcctccatgatccaccccaacgtgccggccatcatgatcacgcccatctgcccccactcgctgtccttccggcccatcgtggtccccgcaggggtcgagctgaaggtcagagccaacgacactccttttccggtttgtgagtcatttgaccccgtgcaacacaaagccgggacctagcaccccgctctgccatgctggctccagcctcagacgcggcctcgtcatcctagggccatcctgtgccccctcagatgcaagccttcccttgctggtgcccgagttctgtccatcaaggtgcccagggcccgggtctgaggggctttctgccattgttggtctctggcggtgctgagctgggccggtgcctgtaggacgtgcactgcaccgtccgcaaggcagggtcagagctgcccaaccttcgacctctggcgagcactcaggggtgggtgcctagaagcgtcctccccacagctgggggcccacacctctccctgcttgaccctcagatcatgctgtcacctgaagcaaggaacacagcatgggtgtcctttgatggacggaagagacaagagatccgccatggagacagcatcagcatcactacctcatgctacccgctcccctccatctgtgtgcgggaccccgtgagcgactggtttgagagcctcgcccagtgcctgcattggaacgtccggaagaagcaagcccacttcgaggaggaggaggaggaggaggaggagggctaggtcaagcccctatccaggcccgaatccttccgctgccctccaagcgccctctggggacagaccaatctgcgtgtgtctgtgaccgcctgtctcagtggcacggccacttcctttctgtagctgggttagagcctgggtctgccttttgtccagatcagctgtttttttaaaatgtctgactttttttgcatttctaaagaagcgtgagaaatgggctgggagtgcttctgtcctgctgacaccccgcggtgggtccctggagcgcggcctccagctgccgcaatttccatgccaggatatttttccgcaaatcagtcggttgaaattcagaggagtcagaatgactcgacctgtccttcaatgttgataataaatgtctcagccaaaaaccttccttgagctgccatgcttttccccttgacctgcacctcttcccctaaaacttctgcagggaagcccctggcggaggcgccattgaaagcatggtcttgccagtggctggcaaggcggttttgttctgctcagtttctggagagggttggatgcgtcccctgccatccagccctccccgcttgaggccagcactgagtctgggacactcagcgggaagggggctggcatcgccagcgacccacacattcctcacgtagcttctgctcccaggaaggtagtttaaatcctgtatatactttttagagactcttttaaactttctgaagtgctgatgtacatactttctcgtacacacttttgtgaagatttcaaggggaagggagtcgtctgccattcaatgtttacatttatgttctgcaagacgctgtcctcagggaccattaggggaccattctgttcagtgcgatcctgatggtccgggagatgagggtttccggggctagtgatcgtgatcccttttatttgcaactgtaatgagaatttttcacactaacacagcgagggactcaacacgctgattctcctcctgcctctcccgtgagtctccagcctgcccagcaccagcagctgtggagcacgtggatgctgcctaccccggcgcccgcgtcttccacgggcacaggtgtgtggaggccgtggtcggaccctggtgtcctggttactgctgcccgggtgtcttttttttgagtaactgctctctgagttttgcacacgaagttgccctcatctgctggagatcgataaggaaggcacaagacgttctcctctgcccgtgaggagcttcccgcagccgcctggcccagcctgggcacgttctccgaggcatgtgtctccctgctcaccctcgtctgggcacctcagcatctgtggacttgagcgtccaaaaaccctgagtgtgattctgggcagccggcctggcttgaagtccgccatgaccctgggcacaggggaagcccagccgtgggcttaggagagagggaccagcgcccagcgttagggctggaagacggcagtgttcagaattccagccgctcatctgaacacagaaggtgtgaactgacctctaaagcagcgtgagatgggaatgatctagaaaactttggatttttgaagtaaattttaatgtttcatattaatttcttgaaaatgtattaaatgtcattgaaagccttattacgcttttcagatcctttcaataaacaagacttgtagaaaataa

SEQ ID NO: 442562 - DNA, 3135 bp, Homo sapiens
aaatcccccaagttctcatgatccttgcttccctttccagtcacccttggtgccctgtacttcactgtggtcctgaactgaagagctgtgtttttcaggaagacttggccaggccgtgttccgtgtctctggattcaagtcccaggagtcctgaccagagagcaggcatcagtgtttttctgaccgaagttctcatttcctgacaatggaaatggaacaagaaaaaatgaccatgaataaggaattgagtccagacgcggctgcttactgctgctcggcctgccacggcgatgagacctggagttacaaccaccccatccggggccgggccaagtctcgcagcctgtctgcctcgcccgccctggggagcaccaaggagttcaggaggacacgctctcttcatgggccatgcccggtgaccacttttggaccaaaggcctgtgtgctgcagaacccccagaccatcatgcacattcaggaccccgcgagccagcggctgacgtggaacaagtccccaaagagcgtccttgtcatcaagaagatgagagatgccagcctactgcagccgttcaaggagctctgcacgcacctcatggaggagaacatgatcgtgtatgtggaaaagaaagtgctagaagaccctgccatcgccagcgatgaaagctttggggcagtgaagaagaaattctgtacctttcgagaagattatgatgacatttccaatcagatagacttcatcatctgcctggggggagacgggacgctgctgtacgcttcctcgcttttccagggcagcgtccctccggtcatggccttccacctgggctccctgggcttcctgaccccattcagctttgagaactttcagtcccaagttactcaggtgatagaggggaacgcagctgttgttctccggagtcggctgaaggtcagggtggtgaaggagctccgggggaagaagacggccgtgcacaatgggctgggtgagaacggctcgcaggctgcaggcctggacatggatgtcgggaagcaggccatgcagtaccaggtcctgaatgaggtggtgattgacagaggcccctcctcctacctgtccaatgtggatgtctacctggacggacacctcatcaccacggtgcagggcgacggagtgatcgtgtccaccccgacgggcagcacggcgtatgcggccgcggccggggcctccatgatccaccccaacgtgccggccatcatgatcacgcccatctgcccccactcgctgtccttccggcccatcgtggtccccgcaggggtcgagctgaagcatcagcatcactacctcatgctacccgctcccctccatctgtgtgcgggaccccgtgagcgactggtttgagagcctcgcccagtgcctgcattggaacgtccggaagaagcaagcccacttcgaggaggaggaggaggaggaggaggagggctaggtcaagcccctatccaggcccgaatccttccgctgccctccaagcgccctctggggacagaccaatctgcgtgtgtctgtgaccgcctgtctcagtggcacggccacttcctttctgtagctgggttagagcctgggtctgccttttgtccagatcagctgtttttttaaaatgtctgactttttttgcatttctaaagaagcgtgagaaatgggctgggagtgcttctgtcctgctgacaccccgcggtgggtccctggagcgcggcctccagctgccgcaatttccatgccaggatatttttccgcaaatcagtcggttgaaattcagaggagtcagaatgactcgacctgtccttcaatgttgataataaatgtctcagccaaaaaccttccttgagctgccatgcttttccccttgacctgcacctcttcccctaaaacttctgcagggaagcccctggcggaggcgccattgaaagcatggtcttgccagtggctggcaaggcggttttgttctgctcagtttctggagagggttggatgcgtcccctgccatccagccctccccgcttgaggccagcactgagtctgggacactcagcgggaagggggctggcatcgccagcgacccacacattcctcacgtagcttctgctcccaggaaggtagtttaaatcctgtatatactttttagagactcttttaaactttctgaagtgctgatgtacatactttctcgtacacacttttgtgaagatttcaaggggaagggagtcgtctgccattcaatgtttacatttatgttctgcaagacgctgtcctcagggaccattaggggaccattctgttcagtgcgatcctgatggtccgggagatgagggtttccggggctagtgatcgtgatcccttttatttgcaactgtaatgagaatttttcacactaacacagcgagggactcaacacgctgattctcctcctgcctctcccgtgagtctccagcctgcccagcaccagcagctgtggagcacgtggatgctgcctaccccggcgcccgcgtcttccacgggcacaggtgtgtggaggccgtggtcggaccctggtgtcctggttactgctgcccgggtgtcttttttttgagtaactgctctctgagttttgcacacgaagttgccctcatctgctggagatcgataaggaaggcacaagacgttctcctctgcccgtgaggagcttcccgcagccgcctggcccagcctgggcacgttctccgaggcatgtgtctccctgctcaccctcgtctgggcacctcagcatctgtggacttgagcgtccaaaaaccctgagtgtgattctgggcagccggcctggcttgaagtccgccatgaccctgggcacaggggaagcccagccgtgggcttaggagagagggaccagcgcccagcgttagggctggaagacggcagtgttcagaattccagccgctcatctgaacacagaaggtgtgaactgacctctaaagcagcgtgagatgggaatgatctagaaaactttggatttttgaagtaaattttaatgtttcatattaatttcttgaaaatgtattaaatgtcattgaaagccttattacgcttttcagatcctttcaataaacaagacttgtagaaaataa

SEQ ID NO: 442563 - DNA, 3032 bp, Homo sapiens
aaatcccccaagttctcatgatccttgcttccctttccagtcacccttggtgccctgtacttcactgtggtcctgaactgaagagctgtgtttttcaggaagacttggccaggccgtgttccgtgtctctggattcaagtcccaggagtcctgaccagagagcaggcatcagtgtttttctgaccgaagttctcatttcctgacaatggaaatggaacaagaaaaaatgaccatgaataaggaattgagtccagacgcggctgcttactgctgctcggcctgccacggcgatgagacctggagttacaaccaccccatccggggccgggccaagtctcgcagcctgtctgcctcgcccgccctggggagcaccaaggagttcaggaggacacgctctcttcatgggccatgcccggtgaccacttttggaccaaaggcctgtgtgctgcagaacccccagaccatcatgcacattcaggaccccgcgagccagcggctgacgtggaacaagtccccaaagagcgtccttgtcatcaagaagatgagagatgccagcctactgcagccgttcaaggagctctgcacgcacctcatggaggagaacatgatcgtgtatgtggaaaagaaagtgctagaagaccctgccatcgccagcgatgaaagctttggggcagtgaagaagaaattctgtacctttcgagaagattatgatgacatttccaatcagatagacttcatcatctgcctggggggagacgggacgctgctgtacgcttcctcgcttttccagggaacgcagctgttgttctccggagtcggctgaaggtcagggtggtgaaggagctccgggggaagaagacggccgtgcacaatgggctgggtgagaacggctcgcaggctgcaggcctggacatggatgtcgggaagcaggccatgcagtaccaggtcctgaatgaggtggtgattgacagaggcccctcctcctacctgtccaatgtggatgtctacctggacggacacctcatcaccacggtgcagggcgacggagtgatcgtgtccaccccgacgggcagcacggcgtatgcggccgcggccggggcctccatgatccaccccaacgtgccggccatcatgatcacgcccatctgcccccactcgctgtccttccggcccatcgtggtccccgcaggggtcgagctgaagcatcagcatcactacctcatgctacccgctcccctccatctgtgtgcgggaccccgtgagcgactggtttgagagcctcgcccagtgcctgcattggaacgtccggaagaagcaagcccacttcgaggaggaggaggaggaggaggaggagggctaggtcaagcccctatccaggcccgaatccttccgctgccctccaagcgccctctggggacagaccaatctgcgtgtgtctgtgaccgcctgtctcagtggcacggccacttcctttctgtagctgggttagagcctgggtctgccttttgtccagatcagctgtttttttaaaatgtctgactttttttgcatttctaaagaagcgtgagaaatgggctgggagtgcttctgtcctgctgacaccccgcggtgggtccctggagcgcggcctccagctgccgcaatttccatgccaggatatttttccgcaaatcagtcggttgaaattcagaggagtcagaatgactcgacctgtccttcaatgttgataataaatgtctcagccaaaaaccttccttgagctgccatgcttttccccttgacctgcacctcttcccctaaaacttctgcagggaagcccctggcggaggcgccattgaaagcatggtcttgccagtggctggcaaggcggttttgttctgctcagtttctggagagggttggatgcgtcccctgccatccagccctccccgcttgaggccagcactgagtctgggacactcagcgggaagggggctggcatcgccagcgacccacacattcctcacgtagcttctgctcccaggaaggtagtttaaatcctgtatatactttttagagactcttttaaactttctgaagtgctgatgtacatactttctcgtacacacttttgtgaagatttcaaggggaagggagtcgtctgccattcaatgtttacatttatgttctgcaagacgctgtcctcagggaccattaggggaccattctgttcagtgcgatcctgatggtccgggagatgagggtttccggggctagtgatcgtgatcccttttatttgcaactgtaatgagaatttttcacactaacacagcgagggactcaacacgctgattctcctcctgcctctcccgtgagtctccagcctgcccagcaccagcagctgtggagcacgtggatgctgcctaccccggcgcccgcgtcttccacgggcacaggtgtgtggaggccgtggtcggaccctggtgtcctggttactgctgcccgggtgtcttttttttgagtaactgctctctgagttttgcacacgaagttgccctcatctgctggagatcgataaggaaggcacaagacgttctcctctgcccgtgaggagcttcccgcagccgcctggcccagcctgggcacgttctccgaggcatgtgtctccctgctcaccctcgtctgggcacctcagcatctgtggacttgagcgtccaaaaaccctgagtgtgattctgggcagccggcctggcttgaagtccgccatgaccctgggcacaggggaagcccagccgtgggcttaggagagagggaccagcgcccagcgttagggctggaagacggcagtgttcagaattccagccgctcatctgaacacagaaggtgtgaactgacctctaaagcagcgtgagatgggaatgatctagaaaactttggatttttgaagtaaattttaatgtttcatattaatttcttgaaaatgtattaaatgtcattgaaagccttattacgcttttcagatcctttcaataaacaagacttgtagaaaataa

SEQ ID NO: 442564 - DNA, 3677 bp, Homo sapiens
  misc_feature (3252)..(3252): n is a, c, g, or t
  misc_feature (3255)..(3255): n is a, c, g, or t
  misc_feature (3257)..(3257): n is a, c, g, or t
  misc_feature (3259)..(3259): n is a, c, g, or t
aaatcccccaagttctcatgatccttgcttccctttccagtcacccttggtgccctgtacttcactgtggtcctgaactgaagagctgtgtttttcaggaagacttggccaggccgtgttccgtgtctctggattcaagtcccaggagtcctgaccagagagcaggcatcagtgtttttctgaccgaagttctcatttcctgacaatggaaatggaacaagaaaaaatgaccatgaataaggaattgagtccagacgcggctgcttactgctgctcggcctgccacggcgatgagacctggagttacaaccaccccatccggggccgggccaagtctcgcagcctgtctgcctcgcccgccctggggagcaccaaggagttcaggaggacacgctctcttcatgggccatgcccggtgaccacttttggaccaaaggcctgtgtgctgcagaacccccagaccatcatgcacattcaggaccccgcgagccagcggctgacgtggaacaagtccccaaagagcgtccttgtcatcaagaagatgagagatgccagcctactgcagccgttcaaggagctctgcacgcacctcatggaggagaacatgatcgtgtatgtggaaaagaaagtgctagaagaccctgccatcgccagcgatgaaagctttggggcagtgaagaagaaattctgtacctttcgagaagattatgatgacatttccaatcagatagacttcatcatctgcctggggggagacgggacgctgctgtacgcttcctcgcttttccagggcagcgtccctccggtcatggccttccacctgggctccctgggcttcctgaccccattcagctttgagaactttcagtcccaagttactcaggtgatagaggggaacgcagctgttgttctccggagtcggctgaaggtcagggtggtgaaggagctccgggggaagaagacggccgtgcacaatgggctgggtgagaacggctcgcaggctgcaggcctggacatggatgtcgggaagcaggccatgcagtaccaggtcctgaatgaggtggtgattgacagaggcccctcctcctacctgtccaatgtggatgtctacctggacggacacctcatcaccacggtgcagggcgacggagtgatcgtgtccaccccgacgggcagcacggcgtatgcggccgcggccggggcctccatgatccaccccaacgtgccggccatcatgatcacgcccatctgcccccactcgctgtccttccggcccatcgtggtccccgcaggggtcgagctgaagatcatgctgtcacctgaagcaaggaacacagcatgggtgtcctttgatggacggaagagacaagagatccgccatggagacagcatcagcatcactacctcatgctacccgctcccctccatctgtgtgcgggaccccgtgagcgactggtttgagagcctcgcccagtgcctgcattggaacgtccggaagaagcaagcccacttcgaggaggaggaggaggaggaggaggagggctaggtcaagcccctatccaggcccgaatccttccgctgccctccaagcgccctctggggacagaccaatctgcgtgtgtctgtgaccgcctgtctcagtggcacggccacttcctttctgtagctgggttagagcctgggtctgccttttgtccagatcagctgtttttttaaaatgtctgactttttttgcatttctaaagaagcgtgagaaatgggctgggagtgcttctgtcctgctgacaccccgcggtgggtccctggagcgcggcctccagctgccgcaatttccatgccaggatatttttccgcaaatcagtcggttgaaattcagaggagtcagaatgactcgacctgtccttcaatgttgataataaatgtctcagccaaaaaccttccttgagctgccatgcttttccccttgacctgcacctcttcccctaaaacttctgcagggaagcccctggcggaggcgccattgaaagcatggtcttgccagtggctggcaaggcggttttgttctgctcagtttctggagagggttggatgcgtcccctgccatccagccctccccgcttgaggccagcactgagtctgggacactcagcgggaagggggctggcatcgccagcgacccacacattcctcacgtagcttctgctcccaggaaggtagtttaaatcctgtatatactttttagagactcttttaaactttctgaagtgctgatgtacatactttctcgtacacacttttgtgaagatttcaaggggaagggagtcgtctgccattcaatgtttacatttatgttctgcaagacgctgtcctcagggaccattaggggaccattctgttcagtgcgatcctgatggtccgggagatgagggtttccggggctagtgatcgtgatcccttttatttgcaactgtaatgagaatttttcacactaacacagcgagggactcaacacgctgattctcctcctgcctctcccgtgagtctccagcctgcccagcaccagcagctgtggagcacgtggatgctgcctaccccggcgcccgcgtcttccacgggcacaggtgtgtggaggccgtggtcggaccctggtgtcctggttactgctgcccgggtgtcttttttttgagtaactgctctctgagttttgcacacgaagttgccctcatctgctggagatcgataaggaaggcacaagacgttctcctctgcccgtgaggagcttcccgcagccgcctggcccagcctgggcacgttctccgaggcatgtgtctccctgctcaccctcgtctgggcacctcagcatctgtggacttgagcgtccaaaaaccctgagtgtgattctgggcagccggcctggcttgaagtccgccatgaccctgggcacaggggaagcccagccgtgggcttaggagagagggaccagcgcccagcgttagggctggaagacggcagtgttcagaattccagccgctcatctgaacacagaaggtgtgaactgacctctaaagcagcgtgagatgggaatgatctagaaaactttggatttttgaagtaaattttaatgtttcatattaatttcttgaaaatgtattaaatgtcattgaaagccttattacgcttttcagatcctttcaataaacaagacttgtagaaaataaaaaaaaaaaaacaaaaaaaaaaaaaaaaaaaaanaanananaaaaaaaaaagggggggcacacactagataggaatatactccacatgagggaggcaaccacaaagatataatacgagtcacataccaagagaaatgatgtccggtcaacacaagggcgtgtcccacacaaaataacagtggcgcgcgctcatatatagaacgttgcagcagcaaggtacgacacaaacaaatatactagaagcagtgaggataggagtagatgggcggacaaacagccctcgacgtgacatgatgagaggagcacaactctctcggggaagaaagggagacgcctgtgtatatactctcaggggaggggaggagtgaacaacacacattagtggtgcgagaaaaatacttgcactgacagcgaaggagatagtcaaacgggccctccagagggggggagaataagaag

SEQ ID NO: 442565 - DNA, 2961 bp, Homo sapiens
aaatcccccaagttctcatgatccttgcttccctttccagtcacccttggtgccctgtacttcactgtggtcctgaactgaagagctgtgtttttcaggaagacttggccaggccgtgttccgtgtctctggattcaagtcccaggagtcctgaccagagagcaggcatcagtgtttttctgaccgaagttctcatttcctgacaatggaaatggaacaagaaaaaatgaccatgaataaggaattgagtccagacgcggctgcttactgctgctcggcctgccacggcgatgagacctggagttacaaccaccccatccggggccgggccaagtctcgcagcctgtctgcctcgcccgccctggggagcaccaaggagttcaggaggacacgctctcttcatgggccatgcccggtgaccacttttggaccaaaggcctgtgtgctgcagaacccccagaccatcatgcacattcaggaccccgcgagccagcggctgacgtggaacaagtccccaaagagcgtccttgtcatcaagaagatgagagatgccagcctactgcagccgttcaaggagctctgcacgcacctcatggaggagaacatgatcgtgtatgtggaaaagaaagtgctagaagaccctgccatcgccagcgatgaaagctttggggcagtgaagaagaaattctgtacctttcgagaagattatgatgacatttccaatcagatagacttcatcatctgcctggggggagacgggacgctgctgtacgcttcctcgcttttccagggcagcgtccctccggtcatggccttccacctgggctccctgggcttcctgaccccattcagctttgagaactttcagtcccaagttactcaggtgatagaggggaacgcagctgttgttctccggagtcggctgaaggtcagggtggtgaaggagctccgggggaagaagacggccgtgcacaatgggctgggtgagaacggctcgcaggctgcaggcctggacatggatgtcgggaagcaggccatgcagtaccaggtcctgaatgaggtggtgattgacagaggcccctcctcctacctgtccaatgtggatgtctacctggacggacacctcatcaccacggtgcagggcgacggagtgatcgtgtccaccccgacgggcagcacggcgtatgcggccgcggccggggcctccatgatccaccccaacgtgccggccatcatgatcacgcccatctgcccccactcgctgtccttccggcccatcgtggtccccgcaggggtcgagctgaagatcatgctgtcacctgaagcaaggaacacagcatgggtgtcctttgatggacggaagagacaagagatccgccatggagacagcatcagcatcactacctcatgctacccgctcccctccatctgtgtgcgggaccccgtgagcgactggtttgagagcctcgcccagtgcctgcattggaacgtccggaagaagcaagcccacttcgaggaggaggaggaggaggaggaggagggctaggtcaagcccctatccaggcccgaatccttccgctgccctccaagcgccctctggggacagaccaatctgcgtgtgtctgtgaccgcctgtctcagtggcacggccacttcctttctgtagctgggttagagcctgggtctgccttttgtccagatcagctgtttttttaaaatgtctgactttttttgcatttctaaagaagcgtgagaaatgggctgggagtgcttctgtcctgctgacaccccgcggtgggtccctggagcgcggcctccagctgccgcaatttccatgccaggatatttttccgcaaatcagtcggttgaaattcagaggagtcagaatgactcgacctgtccttcaatgttgataataaatgtctcagccaaaaaccttccttgagctgccatgcttttccccttgacctgcacctcttcccctaaaacttctgcagggaagcccctggcggaggcgccattgaaagcatggtcttgccagtggctggcaaggcggttttgttctgctcagtttctggagagggttggatgcgtcccctgccatccagccctccccgcttgaggccagcactgagtctgggacactcagcgggaagggggctggcatcgccagcgacccacacattcctcacgtagcttctgctcccaggaaggtagtttaaatcctgtatatactttttagagactcttttaaactttctgaagtgctgatgtacatactttctcgtacacacttttgtgaagatttcaaggggaagggagtcgtctgccattcaatgtttacatttatgttctgcaagacgctgtcctcagggaccattaggggaccattctgttcagtgcgatcctgatggtccgggagatgagggtttccggggctagtgatcgtgatcccttttatttgcaactgtaatgagaatttttcacactaacacagcgagggactcaacacgctgattctcctcctgcctctcccgtgagtctccagcctgcccagcaccagcagctgtggagcacgtggatgctgcctaccccggcgcccgcgtcttccacgggcacaggtgtgtggaggccgtggtcggaccctggtgtcctggttactgctgcccgggtgtcttttttttgagtaactgctctctgagttttgcacacgaagttgccctcatctgctggagatcgataaggaagacggcagtgttcagaattccagccgctcatctgaacacagaaggtgtgaactgacctctaaagcagcgtgagatgggaatgatctagaaaactttggatttttgaagtaaattttaatgtttcatattaatttcttgaaaatgtattaaatgtcattgaaagccttattacgcttttcagatcctttcaataaacaagacttgtagaaaataa

SEQ ID NO: 442566 - DNA, 455 bp, Homo sapiens
gccctcccggccccgccgtggctctgtcccgccatcctgtgcttgctgtgtccctggcaccccaccgggcctctcccccgctgcctggtgccctccctgcacttcctggtcctggcagagccactcctttgtcactcgcatctcagctgctgccttcaccagccgtcagtcactcgggccagggcggggtcaccggacaggtgcatgttctgcctcagccctcagaccagggcgtactcagtggtccccgagctgcccgaggccagacagccccgcaggaggaagcggtgggtttgtggggcagccttgaggggcatgcagctttctcggcacccccatgggagcacgccccctctgggctctgtgtctctgggatcataacctcccgcttcccatccccgctgtggaggggcagggcttcccatgcatctgaacttccgtcttccctgatagtc

SEQ ID NO: 442567 - DNA, 644 bp, Homo sapiens
ctattagcagaaaaatactaacatgtacaagaaaggatttgtattagtttatttcaccacagtagtatttcattacacataatccctaaaactcagcagcttgcaataagtgtttatactcatgcttatgggtgtgtaggtcaactgtgtttcagtggatgtatttaagcactgacttaggcgcatgttaacctcaatctgctccaggtagatttgttctatggctgtagcagcagcagctacctgagtcatgcttttctagtggcttgtcactgaagatcataagccaggccaaagcacttagccaagtttaaggacactactcatgtcatatctgctaacacccgttgttcaaacaagtaacatggccaagcctaattatgaaggaacaggaagtatactggccctacagaaggagagggaatgaaatgaatatttgatgaacagtattatgctatcagcttcatattagatgtttatttctagtattttacaaactatccacttgtactcaaataaaatgagtcaagtatttttagattccccacatttatttagctgaaaaggacactcctctgttaatacaactatatgtgtacatagttttgtgaatttcagctacattcagtccccacctgccctcc

SEQ ID NO: 442568 - DNA, 4973 bp, Homo sapiens
  misc_feature (4973)..(4973): n is a, c, g, or t
agtgcggtagcaggagggggcggggaggtaagcggaggctccgagctctaggccggccggcggtggcggcggcgaggccgggactcgggcttagggcctgctgtggaggcagcggcggacgccgagctaagcagtttctctggaaacccccctggtaagtgtggaggaggcgggacactctgacccaagacgaaaggcctgtagctccagccaaagaaaataaaccttaggagggagaaggaaaaaaaaaatccatcagctgttcctgagaacagcctgcattggaatctacagagaggacaactaatgtgagtgaggaagtgactgtatgtggactgtggagaaagtaagtcacgtgggcccttgaggacctggactgggttaggaacagttgtactttcagaggtgaggtgtcgagaagggaaagtgaatgtggtctggagtgtgtccttggccttggctccacagggtgtgctttcctctggggccgtcagggagctcatcccttgtgttctgccagggtggggtacggggtttgacactgaggagggtaacctgctggctggagcggcagagcagtggccttgatttgtcttttggaagattttaaaaaccaaaaagcataaacattctggtccttcagcaatgctttctctgaagaaatacttaacggaaggacttctccagttcaccattctgctgagtttgattggggtacgggtggacgtggatacttacctgacctcacagcttcccccactccgggagatcatcctggggcccagttctgcctatactcagacccagttccacaacctgaggaataccttggatggctatggtatccaccccaagagcatagacctggacaattacttcactgcccggcggctcctcagtcaggtgagggccctggacaggttccaggtgccaaccactgaggtaaatgcctggctggttcaccgagacccagaggggtctgtctctggcagtcagcccaactcaggcctcgccctcgagagttccagtggcctccaagatgtgacaggcccagacaacggggtgcgagaaagcgaaacggagcagggattcggtgaagatttggaggatttgggggctgtagcccccccagtcagtggagacttaaccaaagaggacatagatctgattgacatcctttggcgacaggatattgatctgggggctgggcgtgaggtttttgactatagtcaccgccagaaggagcaggatgtggagaaggagctgcgagatggaggcgagcaggacacctgggcaggcgagggcgcggaagctctggcacggaacctgctagtggatggagagactggggagagcttccctgcacaggtgcctagtggggaggaccagacggccctgtccctggaagagtgccttaggctgctggaagccacctgcccctttggggagaatgctgagtttccagcagacatttccagcataacagaagcagtgcctagtgagagtgagccccctgctcttcaaaacaacctcttgtctcctcttctgaccgggacagagtcaccatttgatttggaacagcagtggcaagatctcatgtccatcatggaaatgcaggccatggaagtgaacacatcagcaagtgaaatcctgtacagtgcccctcctggagacccactgagcaccaactacagccttgcccccaacactcccatcaatcagaatgtcagcctgcatcaggcgtccctggggggctgcagccaggacttcttactcttcagccccgaggtggaaagcctgcctgtggccagtagctccacgctgctcccgttggcccccagcaattctaccagcctcaactccaccttcggctccaccaacctgacagggctcttctttccaccccagctcaatggcacagccaatgacacagcaggcccagagctgcctgaccctttggggggtctgttagatgaagctatgttggatgagatcagccttatggacctggccattgaagaaggctttaaccctgtgcaggcctcccagctggaggaggaatttgactctgactcaggcctttccttagactcgagccatagcccttcttccctaagcagctctgaaggcagttcttcctcttcttcctcctcctcttcctcttcttcctctgcttcttcctctgcctcttcctccttttctgaggaaggtgcggttggctacagctctgactctgagaccctggatctggaagaggccgagggtgctgtgggctaccagcctgagtattccaagttctgccgcatgagctaccaggatccagctcagctctcatgcctgccctacctggagcacgtgggccacaaccacacatacaacatggcacccagtgccctggactcagccgacctgccaccacccagtgccctcaagaaaggcagcaaggagaagcaggctgacttcctggacaagcagatgagccgggatgagcaccgagcccgagccatgaagatccctttcaccaatgacaaaatcatcaacctgcctgtggaggagttcaatgaactgctgtccaaataccagttgagtgaagcccagctgagcctcatccgagacatccggcgccggggcaagaacaagatggcggcgcagaactgccgcaagcgcaagctggacaccatcctgaatctggagcgtgatgtggaggacctgcagcgtgacaaagcccggctgctgcgggagaaagtggagttcctgcgctccctgcgacagatgaagcagaaggtccagagcctgtaccaggaggtgtttgggcggctgcgagatgagaacggacgaccctactcgcccagtcagtatgcgctccagtacgccggggacggcagtgtcctcctcatcccccgcacgatggccgaccagcaggcccggcggcaggagaggaagccaaaggaccggagaaagtgagcctggggaagaagggggtttgaagcccaccaagaccgaaactggagaagggctggacctggacctggacctggacctacagcggggacttaaatgccttcttatccaatatatcttctcagatgggatgactgcgggtcagtgtacaggaagaggcaggcactggctggctcagctccactcgggtggagtggaagtggccagaccatttagacggacagggtcctcaccctacccctttcctgtgaggcaggggtggtggtggagttgctggaggtagaggagctatgtggagcaaaggccgacagaggggaaggaatggacctgtgagaggaagggaaggtggcagaaagtctcatttcaggaaggagggatagaaggaaggaaggaaggaacccccccccccccccgaaaaaaaaatcaaagcgggaagaaaatcagagggaaggttaaggttggctctggccaggattccaggcagcaggttggagtgactggtgggcctagatcactggtgtgataaaccccatttcaccccggggggggtggggtacacagacacagggtgggggttggggaggggcggtgttaactctttctgctccttgcattttgacatccctgaaggggagctcttggatatcattggccatgtttcaatcgaatggagccactgggccccaacactggctttgagatttagagtcaaagggtagagtgaacaggaaagggtcacgtggtcccatgttgcaacagccccaacatcacgcatgtcattcactgccttgccactccatctccctccgtgctccagccacccctgagctgaggctcccattgtctccatcagagcctgcatgtgtatgccgtcctcccctggtccggtgtttgtgttccccacccctcacagactgcctgagctcttctgtaagctggggtagggtgatggcagtgctccgggaactgggcctgcagccttcctcttctgggactgctgtgaggcagaggaatgatggagaatctagtgtagcagcctccaggcaggattcagcacaacactggggagtcacccttccctcgggcctctgcctaccaacaactgggcttatcactgggaaaacacaaaaaattacacaacccagcaacaacaaaagaactagtcctcttagaatttcttgcgctttgatttttttagggcttgtgccctgtttcacttatagggtctagaatgcttgtgttgagtaaaaaggagatgcccaatattcaaagctgctaaatgttctctttgccataaagactccgtgtaactgtgtgaacacttgggatttttctcctctgtcccgaggtcgtcgtctgctttcttttttgggtttctttctagaagattgagaagtgcatatgacaggctgagagcacctccccaaacacacaagctctcagccacaggcagcttctccacagccccagcttcgcacaggctcctggagggctgcctgggggaggcagacatgggagtgccaaggtggccagatggttccaggactacaatgtctttatttttaactgtttgccactgctgccctcacccctgcccggctctggagtaccgtctgccccagacaagtgggagtgaaatgggggtggggggaagcactgattcccagttagggggtgcctaactgagcagtagggatagaaggtgtgaacctgggagtgcttttataaattattttccttgtagattttatttttaatttatctctgtgacctgccagggagaggggagagagagagagatgctgttgagcacatgacaaaataaaataaaatggatgattcattcttaaaaaaaaaaagggggggaaagataccaaggggcgagttgggacacattttgaaagggctaaaaggagtaaaaaggcggggggtaaagggggagacacttgtttagggaactgggggatgcaccacaccacggaaaagatagagacctgtctattgtgtgcaan

SEQ ID NO: 442569 - DNA, 315 bp, Homo sapiens
cgagctcggtaccctgcacacgccgaagccccatacgaaaggcctgtagctccagccaaagaaaataaaccttaggagggagaaggaaaaaaaaaatccatcagctgttcctgagaacagcctgcattggaatctacagagaggacaactaatgtgagtgaggaagtgactgtatgtggactgtggagaaagtaagtcacgtgggcccttgaggacctggactgggttaggaacagttgtactttcagaggtgaggtgtcgagaagggaaagtgaatgtggtctggtggctcggcgtgtgcagagaatactctac

SEQ ID NO: 442570 - DNA, 4524 bp, Homo sapiens
agtgcggtagcaggagggggcggggaggtaagcggaggctccgagctctaggccggccggcggtggcggcggcgaggccgggactcgggcttagggcctgctgtggaggcagcggcggacgccgagctaagcagtttctctggaaacccccctggtaagtgtggaggaggcgggacactctgacccaagacgaaaggcctgtagctccagccaaagaaaataaaccttaggagggagaaggaaaaaaaaaatccatcagctgttcctgagaacagcctgcattggaatctacagagaggacaactaatgtgagtgaggaagtgactgtatgtggactgtggagaaagtaagtcacgtgggcccttgaggacctggactgggttaggaacagttgtactttcagaggtgaggtgtcgagaagggaaagtgaatgtggtctggagtgtgtccttggccttggctccacagggtgtgctttcctctggggccgtcagggagctcatcccttgtgttctgccagggtggggtacggggtttgacactgaggagggtaacctgctggctggagcggcagagcagtggccttgatttgtcttttggaagattttaaaaaccaaaaagcataaacattctggtccttcagcaatgctttctctgaagaaatacttaacggaaggacttctccagttcaccattctgctgagtttgattggggtacgggtggacgtggatacttacctgacctcacagcttcccccactccgggagatcatcctggggcccagttctgcctatactcagacccagttccacaacctgaggaataccttggatggctatggtatccaccccaagagcatagacctggacaattacttcactgcccggcggctcctcagtcaggtgagggccctggacaggttccaggtgccaaccactgaggtaaatgcctggctggttcaccgagacccagaggggtctgtctctggcagtcagcccaactcaggcctcgccctcgagagttccagtggcctccaagatgtgacaggcccagacaacggggtgcgagaaagcgaaacggagcagggattcggtgaagatttggaggatttgggggctgtagcccccccagtcagtggagacttaaccaaagaggacatagatctgattgacatcctttggcgacaggatattgatctgggggctgggcgtgaggtttttgactatagtcaccgccagaaggagcaggatgtggagaaggagctgcgagatggaggcgagcaggacacctgggcaggcgagggcgcggaagctctggcacggaacctgctagtggatggagagactggggagagcttccctgcacagtttccagcagacatttccagcataacagaagcagtgcctagtgagagtgagccccctgctcttcaaaacaacctcttgtctcctcttctgaccgggacagagtcaccatttgatttggaacagcagtggcaagatctcatgtccatcatggaaatgcaggccatggaagtgaacacatcagcaagtgaaatcctgtacagtgcccctcctggagacccactgagcaccaactacagccttgcccccaacactcccatcaatcagaatgtcagcctgcatcaggcgtccctggggggctgcagccaggacttcttactcttcagccccgaggtggaaagcctgcctgtggccagtagctccacgctgctcccgttggcccccagcaattctaccagcctcaactccaccttcggctccaccaacctgacagggctcttctttccaccccagctcaatggcacagccaatgacacagcaggcccagagctgcctgaccctttggggggtctgttagatgaagctatgttggatgagatcagccttatggacctggccattgaagaaggctttaaccctgtgcaggcctcccagctggaggaggaatttgactctgactcaggcctttccttagactcgagccatagcccttcttccctaagcagctctgaaggcagttcttcctcttcttcctcctcctcttcctcttcttcctctgcttcttcctctgcctcttcctccttttctgaggaaggtgcggttggctacagctctgactctgagaccctggatctggaagaggccgagggtgctgtgggctaccagcctgagtattccaagttctgccgcatgagctaccaggatccagctcagctctcatgcctgccctacctggagcacgtgggccacaaccacacatacaacatggcacccagtgccctggactcagccgacctgccaccacccagtgccctcaagaaaggcagcaaggagaagcaggctgacttcctggacaagcagatgagccgggatgagcaccgagcccgagccatgaagatccctttcaccaatgacaaaatcatcaacctgcctgtggaggagttcaatgaactgctgtccaaataccagttgagtgaagcccagctgagcctcatccgagacatccggcgccggggcaagaacaagatggcggcgcagaactgccgcaagcgcaagctggacaccatcctgaatctggagcgtgatgtggaggacctgcagcgtgacaaagcccggctgctgcgggagaaagtggagttcctgcgctccctgcgacagatgaagcagaaggtccagagcctgtaccaggaggtgtttgggcggctgcgagatgagaacggacgaccctactcgcccagtcagtatgcgctccagtacgccggggacggcagtgtcctcctcatcccccgcacgatggccgaccagcaggcccggcggcaggagaggaagccaaaggaccggagaaagtgagcctggggaagaagggggtttgaagcccaccaagaccgaaactggagaagggctggacctggacctggacctggacctacagcggggacttaaatgccttcttatccaatatatcttctcagatgggatgactgcgggtcagtgtacaggaagaggcaggcactggctggctcagctccactcgggtggagtggaagtggccagaccatttagacggacagggtcctcaccctacccctttcctgtgaggcaggggtggtggtggagttgctggaggtagaggagctatgtggagcaaaggccgacagaggggaaggaatggacctgtgagaggaagggaaggtggcagaaagtctcatttcaggaaggagggggttggggaggggcggtgttaactctttctgctccttgcattttgacatccctgaaggggagctcttggatatcattggccatgtttcaatcgaatggagccactgggccccaacactggctttgagatttagagtcaaagggtagagtgaacaggaaagggtcacgtggtcccatgttgcaacagccccaacatcacgcatgtcattcactgccttgccactccatctccctccgtgctccagccacccctgagctgaggctcccattgtctccatcagagcctgcatgtgtatgccgtcctcccctggtccggtgtttgtgttccccacccctcacagactgcctgagctcttctgtaagctggggtagggtgatggcagtgctccgggaactgggcctgcagccttcctcttctgggactgctgtgaggcagaggaatgatggagaatctagtgtagcagcctccaggcaggattcagcacaacactggggagtcacccttccctcgggcctctgcctaccaacaactgggcttatcactgggaaaacacaaaaaattacacaacccagcaacaacaaaagaactagtcctcttagaatttcttgcgctttgatttttttagggcttgtgccctgtttcacttatagggtctagaatgcttgtgttgagtaaaaaggagatgcccaatattcaaagctgctaaatgttctctttgccataaagactccgtgtaactgtgtgaacacttgggatttttctcctctgtcccgaggtcgtcgtctgctttcttttttgggtttctttctagaagattgagaagtgcatatgacaggctgagagcacctccccaaacacacaagctctcagccacaggcagcttctccacagccccagcttcgcacaggctcctggagggctgcctgggggaggcagacatgggagtgccaaggtggccagatggttccaggactacaatgtctttatttttaactgtttgccactgctgccctcacccctgcccggctctggagtaccgtctgccccagacaagtgggagtgaaatgggggtggggggaagcactgattcccagttagggggtgcctaactgagcagtagggatagaaggtgtgaacctgggagtgcttttataaattattttccttgtagattttatttttaatttatctctgtgacctgccagggagaggggagagagagagagatgctgttgagcacatgacaaaataaaataaaatggatgattcattcttaa

SEQ ID NO: 442571 - DNA, 4792 bp, Homo sapiens
cctgttacgcccggaattactgggagtcgaggtccgagcttatgtgcctggtactggctagtgtgcttgtcgtgcgaggtcacgtgactcgggcttagtgtgcctgcatgtggagtgcaggcgtgtgtgacagcctagactaagcatgtttctctggaaacccccctggtaagtgtggaggaggcgggacactctgacccaagacgaaaggcctgtagctccagccaaagaaaataaaccttaggagggagaaggaaaaaaaaaatccatcagctgttcctgagaacagcctgcattggaatctacagagaggacaactaatgtgagtgaggaagtgactgtatgtggactgtggagaaagtaagtcacgtgggcccttgaggacctggactgggttaggaacagttgtactttcagaggtgaggtgtcgagaagggaaagtgaatgtggtctggagtgtgtccttggccttggctccacagggtgtgctttcctctggggccgtcagggagctcatcccttgtgttctgccagggtggggtacggggtttgacactgaggagggtaacctgctggctggagcggcagagcagtggccttgatttgtcttttggaagattttaaaaaccaaaaagcataaacattctggtccttcagcaatgctttctctgaagaaatacttaacggaaggacttctccagttcaccattctgctgagtttgattggggtacgggtggacgtggatacttacctgacctcacagcttcccccactccgggagatcatcctggggcccagttctgcctatactcagacccagttccacaacctgaggaataccttggatggctatggtatccaccccaagagcatagacctggacaattacttcactgcccggcggctcctcagtcaggtgagggccctggacaggttccaggtgccaaccactgaggtaaatgcctggctggttcaccgagacccagaggggtctgtctctggcagtcagcccaactcaggcctcgccctcgagagttccagtggcctccaagatgtgacaggcccagacaacggggtgcgagaaagcgaaacggagcagggattcggtgaagatttggaggatttgggggctgtagcccccccagtcagtggagacttaaccaaagaggatattgatctgggggctgggcgtgaggtttttgactatagtcaccgccagaaggagcaggatgtggagaaggagctgcgagatggaggcgagcaggacacctgggcaggcgagggcgcggaagctctggcacggaacctgctagtggatggagagactggggagagcttccctgcacaggtgcctagtggggaggaccagacggccctgtccctggaagagtgccttaggctgctggaagccacctgcccctttggggagaatgctgagtttccagcagacatttccagcataacagaagcagtgcctagtgagagtgagccccctgctcttcaaaacaacctcttgtctcctcttctgaccgggacagagtcaccatttgatttggaacagcagtggcaagatctcatgtccatcatggaaatgcaggccatggaagtgaacacatcagcaagtgaaatcctgtacagtgcccctcctggagacccactgagcaccaactacagccttgcccccaacactcccatcaatcagaatgtcagcctgcatcaggcgtccctggggggctgcagccaggacttcttactcttcagccccgaggtggaaagcctgcctgtggccagtagctccacgctgctcccgttggcccccagcaattctaccagcctcaactccaccttcggctccaccaacctgacagggctcttctttccaccccagctcaatggcacagccaatgacacagcaggcccagagctgcctgaccctttggggggtctgttagatgaagctatgttggatgagatcagccttatggacctggccattgaagaaggctttaaccctgtgcaggcctcccagctggaggaggaatttgactctgactcaggcctttccttagactcgagccatagcccttcttccctaagcagctctgaaggcagttcttcctcttcttcctcctcctcttcctcttcttcctctgcttcttcctctgcctcttcctccttttctgaggaaggtgcggttggctacagctctgactctgagaccctggatctggaagaggccgagggtgctgtgggctaccagcctgagtattccaagttctgccgcatgagctaccaggatccagctcagctctcatgcctgccctacctggagcacgtgggccacaaccacacatacaacatggcacccagtgccctggactcagccgacctgccaccacccagtgccctcaagaaaggcagcaaggagaagcaggctgacttcctggacaagcagatgagccgggatgagcaccgagcccgagccatgaagatccctttcaccaatgacaaaatcatcaacctgcctgtggaggagttcaatgaactgctgtccaaataccagttgagtgaagcccagctgagcctcatccgagacatccggcgccggggcaagaacaagatggcggcgcagaactgccgcaagcgcaagctggacaccatcctgaatctggagcgtgatgtggaggacctgcagcgtgacaaagcccggctgctgcgggagaaagtggagttcctgcgctccctgcgacagatgaagcagaaggtccagagcctgtaccaggaggtgtttgggcggctgcgagatgagaacggacgaccctactcgcccagtcagtatgcgctccagtacgccggggacggcagtgtcctcctcatcccccgcacgatggccgaccagcaggcccggcggcaggagaggaagccaaaggaccggagaaagtgagcctggggaagaagggggtttgaagcccaccaagaccgaaactggagaagggctggacctggacctggacctggacctacagcggggacttaaatgccttcttatccaatatatcttctcagatgggatgactgcgggtcagtgtacaggaagaggcaggcactggctggctcagctccactcgggtggagtggaagtggccagaccatttagacggacagggtcctcaccctacccctttcctgtgaggcaggggtggtggtggagttgctggaggtagaggagctatgtggagcaaaggccgacagaggggaaggaatggacctgtgagaggaagggaaggtggcagaaagtctcatttcaggaaggagggatagaaggaaggaaggaaggaacccccccccccccccgaaaaaaaaatcaaagcgggaagaaaatcagagggaaggttaaggttggctctggccaggattccaggcagcaggttggagtgactggtgggcctagatcactggtgtgataaaccccatttcaccccggggggggtggggtacacagacacagggtgggggttggggaggggcggtgttaactctttctgctccttgcattttgacatccctgaaggggagctcttggatatcattggccatgtttcaatcgaatggagccactgggccccaacactggctttgagatttagagtcaaagggtagagtgaacaggaaagggtcacgtggtcccatgttgcaacagccccaacatcacgcatgtcattcactgccttgccactccatctccctccgtgctccagccacccctgagctgaggctcccattgtctccatcagagcctgcatgtgtatgccgtcctcccctggtccggtgtttgtgttccccacccctcacagactgcctgagctcttctgtaagctggggtagggtgatggcagtgctccgggaactgggcctgcagccttcctcttctgggactgctgtgaggcagaggaatgatggagaatctagtgtagcagcctccaggcaggattcagcacaacactggggagtcacccttccctcgggcctctgcctaccaacaactgggcttatcactgggaaaacacaaaaaattacacaacccagcaacaacaaaagaactagtcctcttagaatttcttgcgctttgatttttttagggcttgtgccctgtttcacttatagggtctagaatgcttgtgttgagtaaaaaggagatgcccaatattcaaagctgctaaatgttctctttgccataaagactccgtgtaactgtgtgaacacttgggatttttctcctctgtcccgaggtcgtcgtctgctttcttttttgggtttctttctagaagattgagaagtgcatatgacaggctgagagcacctccccaaacacacaagctctcagccacaggcagcttctccacagccccagcttcgcacaggctcctggagggctgcctgggggaggcagacatgggagtgccaaggtggccagatggttccaggactacaatgtctttatttttaactgtttgccactgctgccctcacccctgcccggctctggagtaccgtctgccccagacaagtgggagtgaaatgggggtggggggaagcactgattcccagttagggggtgcctaactgagcagtagggatagaaggtgtgaacctgggagtgcttttataaattattttccttgtagattttatttttaatttatctctgtgacctgccagggagaggggagagagagagagatgctgttgagcacatgacaaaataaaataaaatggatgattcattcttaa

SEQ ID NO: 442572 - DNA, 4028 bp, Homo sapiens
agtgcggtagcaggagggggcggggaggtaagcggaggctccgagctctaggccggccggcggtggcggcggcgaggccgggactcgggcttagggcctgctgtggaggcagcggcggacgccgagctaagcagtttctctggaaacccccctggtaagtgtggaggaggcgggacactctgacccaagacgaaaggcctgtagctccagccaaagaaaataaaccttaggagggagaaggaaaaaaaaaatccatcagctgttcctgagaacagcctgcattggaatctacagagaggacaactaatgtgagtgaggaagtgactgtatgtggactgtggagaaagtaagtcacgtgggcccttgaggacctggactgggttaggaacagttgtactttcagaggtgaggtgtcgagaagggaaagtgaatgtggtctggagtgtgtccttggccttggctccacagggtgtgctttcctctggggccgtcagggagctcatcccttgtgttctgccagggtggggtacggggtttgacactgaggagggtaacctgctggctggagcggcagagcagtggccttgatttgtcttttggaagattttaaaaaccaaaaagcataaacattctggtccttcagcaatgctttctctgaagaaatacttaacggaaggacttctccagttcaccattctgctgagtttgattggggtacgggtggacgtggatacttacctgacctcacagcttcccccactccgggagatcatcctggggcccagttctgcctatactcagacccagttccacaacctgaggaataccttggatggctatggtatccaccccaagagcatagacctggacaattacttcactgcccggcggctcctcagtcaggtgagggccctggacaggttccaggtgccaaccactgaggtaaatgcctggctggttcaccgagacccagaggggtctgtctctggcagtcagcccaactcaggcctcgccctcgagagttccagtggcctccaagatgtgacaggcccagacaacggggtgcgagaaagcgaaacggagcagggattcggtgaagatttggaggatttgggggctgtagcccccccagtcagtggagacttaaccaaagaggacatagatctgattgacatcctttggcgacaggatattgatctgggggctgggcgtgaggtttttgactatagtcaccgccagaaggagcaggatgtggagaaggagctgcgagatggaggcgagcaggacacctgggcaggcgagggcgcggaagctctggcacggaacctgctagtggatggagagactggggagagcttccctgcacagtttccagcagacatttccagcataacagaagcagtgcctagtgagagtgagccccctgctcttcaaaacaacctcttgtctcctcttctgaccgggacagagtcaccatttgatttggaacagcagtggcaagatctcatgtccatcatggaaatgcaggccatggaagtgaacacatcagcaagtgaaatcctgtacagtgcccctcctggagacccactgagcaccaactacagccttgcccccaacactcccatcaatcagaatgtcagcctgcatcaggcgtccctggggggctgcagccaggacttcttactcttcagccccgaggtggaaagcctgcctgtggccagtagctccacgctgctcccgttggcccccagcaattctaccagcctcaactccaccttcggctccaccaacctgacagggctcttctttccaccccagctcaatggcacagccaatgacacagcaggcccagagctgcctgaccctttggggggtctgttagatgaagctatgttggatgagatcagccttatggacctggccattgaagaaggctttaaccctgtgcaggcctcccagctggaggaggaatttgactctgactcaggcctttccttagactcgagccatagcccttcttccctaagcagctctgaaggcagttcttcctcttcttcctcctcctcttcctcttcttcctctgcttcttcctctgcctcttcctccttttctgaggaaggtgcggttggctacagctctgactctgagaccctggatctggaagaggccgagggtgctgtgggctaccagcctgagtattccaagttctgccgcatgagctaccaggatccagctcagctctcatgcctgccctacctggagcacgtgggccacaaccacacatacaacatggcacccagtgccctggactcagccgacctgccaccacccagtgccctcaagaaaggcagcaaggagaagcaggctgacttcctggacaagcagatgagccgggatgagcaccgagcccgagccatgaagatccctttcaccaatgacaaaatcatcaacctgcctgtagaggagctatgtggagcaaaggccgacagaggggaaggaatggacctgtgagaggaagggaaggtggcagaaagtctcatttcaggaaggagggatagaaggaaggaaggaaggaacccccccccccccccgaaaaaaaaatcaaagcgggaagaaaatcagagggaaggttaaggttggctctggccaggattccaggcagcaggttggagtgactggtgggcctagatcactggtgtgataaaccccatttcaccccggggggggtggggtacacagacacagggtgggggttggggaggggcggtgttaactctttctgctccttgcattttgacatccctgaaggggagctcttggatatcattggccatgtttcaatcgaatggagccactgggccccaacactggctttgagatttagagtcaaagggtagagtgaacaggaaagggtcacgtggtcccatgttgcaacagccccaacatcacgcatgtcattcactgccttgccactccatctccctccgtgctccagccacccctgagctgaggctcccattgtctccatcagagcctgcatgtgtatgccgtcctcccctggtccggtgtttgtgttccccacccctcacagactgcctgagctcttctgtaagctggggtagggtgatggcagtgctccgggaactgggcctgcagccttcctcttctgggactgctgtgaggcagaggaatgatggagaatctagtgtagcagcctccaggcaggattcagcacaacactggggagtcacccttccctcgggcctctgcctaccaacaactgggcttatcactgggaaaacacaaaaaattacacaacccagcaacaacaaaagaactagtcctcttagaatttcttgcgctttgatttttttagggcttgtgccctgtttcacttatagggtctagaatgcttgtgttgagtaaaaaggagatgcccaatattcaaagctgctaaatgttctctttgccataaagactccgtgtaactgtgtgaacacttgggatttttctcctctgtcccgaggtcgtcgtctgctttcttttttgggtttctttctagaagattgagaagtgcatatgacaggctgagagcacctccccaaacacacaagctctcagccacaggcagcttctccacagccccagcttcgcacaggctcctggagggctgcctgggggaggcagacatgggagtgccaaggtggccagatggttccaggactacaatgtctttatttttaactgtttgccactgctgccctcacccctgcccggctctggagtaccgtctgccccagacaagtgggagtgaaatgggggtggggggaagcactgattcccagttagggggtgcctaactgagcagtagggatagaaggtgtgaacctgggagtgcttttataaattattttccttgtagattttatttttaatttatctctgtgacctgccagggagaggggagagagagagagatgctgttgagcacatgacaaaataaaataaaatggatgattcattcttaa

SEQ ID NO: 442573 - DNA, 2660 bp, Homo sapiens
gagcagctacgggtgaggtacagctacgggtgaggtacagctacgggtgaggtacagctacgggtgaggtacagctctgactctgagaccctggatctggaagaggccgagggtgctgtgggctaccagcctgagtattccaagttctgccgcatgagctaccaggatccagctcagctctcatgcctgccctacctggagcacgtgggccacaaccacacatacaacatggcacccagtgccctggactcagccgacctgccaccacccagtgccctcaagaaaggcagcaaggagaagcaggctgacttcctggacaagcagatgagccgggatgagcaccgagcccgagccatgaagatccctttcaccaatgacaaaatcatcaacctgcctgtggaggagttcaatgaactgctgtccaaataccagttgagtgaagcccagctgagcctcatccgagacatccggcgccggggcaagaacaagatggcggcgcagaactgccgcaagcgcaagctggacaccatcctgaatctggagcgtgatgtggaggacctgcagcgtgacaaagcccggctgctgcgggagaaagtggagttcctgcgctccctgcgacagatgaagcagaaggtccagagcctgtaccaggaggtgtttgggcggctgcgagatgagaacggacgaccctactcgcccagtcagtatgcgctccagtacgccggggacggcagtgtcctcctcatcccccgcacgatggccgaccagcaggcccggcggcaggagaggaagccaaaggaccggagaaagtgagcctggggaagaagggggtttgaagcccaccaagaccgaaactggagaagggctggacctggacctggacctggacctacagcggggacttaaatgccttcttatccaatatatcttctcagatgggatgactgcgggtcagtgtacaggaagaggcaggcactggctggctcagctccactcgggtggagtggaagtggccagaccatttagacggacagggtcctcaccctacccctttcctgtgaggcaggggtggtggtggagttgctggaggtagaggagctatgtggagcaaaggccgacagaggggaaggaatggacctgtgagaggaagggaaggtggcagaaagtctcatttcaggaaggagggatagaaggaaggaaggaaggaacccccccccccccccgaaaaaaaaatcaaagcgggaagaaaatcagagggaaggttaaggttggctctggccaggattccaggcagcaggttggagtgactggtgggcctagatcactggtgtgataaaccccatttcaccccggggggggtggggtacacagacacagggtgggggttggggaggggcggtgttaactctttctgctccttgcattttgacatccctgaaggggagctcttggatatcattggccatgtttcaatcgaatggagccactgggccccaacactggctttgagatttagagtcaaagggtagagtgaacaggaaagggtcacgtggtcccatgttgcaacagccccaacatcacgcatgtcattcactgccttgccactccatctccctccgtgctccagccacccctgagctgaggctcccattgtctccatcagagcctgcatgtgtatgccgtcctcccctggtccggtgtttgtgttccccacccctcacagactgcctgagctcttctgtaagctggggtagggtgatggcagtgctccgggaactgggcctgcagccttcctcttctgggactgctgtgaggcagaggaatgatggagaatctagtgtagcagcctccaggcaggattcagcacaacactggggagtcacccttccctcgggcctctgcctaccaacaactgggcttatcactgggaaaacacaaaaaattacacaacccagcaacaacaaaagaactagtcctcttagaatttcttgcgctttgatttttttagggcttgtgccctgtttcacttatagggtctagaatgcttgtgttgagtaaaaaggagatgcccaatattcaaagctgctaaatgttctctttgccataaagactccgtgtaactgtgtgaacacttgggatttttctcctctgtcccgaggtcgtcgtctgctttcttttttgggtttctttctagaagattgagaagtgcatatgacaggctgagagcacctccccaaacacacaagctctcagccacaggcagcttctccacagccccagcttcgcacaggctcctggagggctgcctgggggaggcagacatgggagtgccaaggtggccagatggttccaggactacaatgtctttatttttaactgtttgccactgctgccctcacccctgcccggctctggagtaccgtctgccccagacaagtgggagtgaaatgggggtggggggaagcactgattcccagttagggggtgcctaactgagcagtagggatagaaggtgtgaacctgggagtgcttttataaattattttccttgtagattttatttttaatttatctctgtgacctgccagggagaggggagagagagagagatgctgttgagcacatgacaaaataaaataaaatggatgattcattcttaa

SEQ ID NO: 442574 - DNA, 4792 bp, Homo sapiens
  misc_feature (4792)..(4792): n is a, c, g, or t
agtgcggtagcaggagggggcggggaggtaagcggaggctccgagctctaggccggccggcggtggcggcggcgaggccgggactcgggcttagggcctgctgtggaggcagcggcggacgccgagctaagcagtttctctggaaacccccctggtaagtgtggaggaggcgggacactctgacccaagacgaaaggcctgtagctccagccaaagaaaataaaccttaggagggagaaggaaaaaaaaaatccatcagctgttcctgagaacagcctgcattggaatctacagagaggacaactaatgtgagtgaggaagtgactgtatgtggactgtggagaaagtaagtcacgtgggcccttgaggacctggactgggttaggaacagttgtactttcagaggtgaggtgtcgagaagggaaagtgaatgtggtctggagtgtgtccttggccttggctccacagggtgtgctttcctctggggccgtcagggagctcatcccttgtgttctgccagggtggggtacggggtttgacactgaggagggtaacctgctggctggagcggcagagcagtggccttgatttgtcttttggaagattttaaaaaccaaaaagcataaacattctggtccttcagcaatgctttctctgaagaaatacttaacggaaggacttctccagttcaccattctgctgagtttgattggggtacgggtggacgtggatacttacctgacctcacagcttcccccactccgggagatcatcctggggcccagttctgcctatactcagacccagttccacaacctgaggaataccttggatggctatggtatccaccccaagagcatagacctggacaattacttcactgcccggcggctcctcagtcaggtgagggccctggacaggttccaggtgccaaccactgaggtaaatgcctggctggttcaccgagacccagaggggtctgtctctggcagtcagcccaactcaggcctcgccctcgagagttccagtggcctccaagatgtgacaggcccagacaacggggtgcgagaaagcgaaacggagcagggattcggtgaagatttggaggatttgggggctgtagcccccccagtcagtggagacttaaccaaagaggacatagatctgattgacatcctttggcgacaggatattgatctgggggctgggcgtgaggtttttgactatagtcaccgccagaaggagcaggatgtggagaaggagctgcgagatggaggcgagcaggacacctgggcaggcgagggcgcggaagctctggcacggaacctgctagtggatggagagactggggagagcttccctgcacagtttccagcagacatttccagcataacagaagcagtgcctagtgagagtgagccccctgctcttcaaaacaacctcttgtctcctcttctgaccgggacagagtcaccatttgatttggaacagcagtggcaagatctcatgtccatcatggaaatgcaggccatggaagtgaacacatcagcaagtgaaatcctgtacagtgcccctcctggagacccactgagcaccaactacagccttgcccccaacactcccatcaatcagaatgtcagcctgcatcaggcgtccctggggggctgcagccaggacttcttactcttcagccccgaggtggaaagcctgcctgtggccagtagctccacgctgctcccgttggcccccagcaattctaccagcctcaactccaccttcggctccaccaacctgacagggctcttctttccaccccagctcaatggcacagccaatgacacagcaggcccagagctgcctgaccctttggggggtctgttagatgaagctatgttggatgagatcagccttatggacctggccattgaagaaggctttaaccctgtgcaggcctcccagctggaggaggaatttgactctgactcaggcctttccttagactcgagccatagcccttcttccctaagcagctctgaaggcagttcttcctcttcttcctcctcctcttcctcttcttcctctgcttcttcctctgcctcttcctccttttctgaggaaggtgcggttggctacagctctgactctgagaccctggatctggaagaggccgagggtgctgtgggctaccagcctgagtattccaagttctgccgcatgagctaccaggatccagctcagctctcatgcctgccctacctggagcacgtgggccacaaccacacatacaacatggcacccagtgccctggactcagccgacctgccaccacccagtgccctcaagaaaggcagcaaggagaagcaggctgacttcctggacaagcagatgagccgggatgagcaccgagcccgagccatgaagatccctttcaccaatgacaaaatcatcaacctgcctgtggaggagttcaatgaactgctgtccaaataccagttgagtgaagcccagctgagcctcatccgagacatccggcgccggggcaagaacaagatggcggcgcagaactgccgcaagcgcaagctggacaccatcctgaatctggagcgtgatgtggaggacctgcagcgtgacaaagcccggctgctgcgggagaaagtggagttcctgcgctccctgcgacagatgaagcagaaggtccagagcctgtaccaggaggtgtttgggcggctgcgagatgagaacggacgaccctactcgcccagtcagtatgcgctccagtacgccggggacggcagtgtcctcctcatcccccgcacgatggccgaccagcaggcccggcggcaggagaggaagccaaaggaccggagaaagtgagcctggggaagaagggggtttgaagcccaccaagaccgaaactggagaagggctggacctggacctggacctggacctacagcggggacttaaatgccttcttatccaatatatcttctcagatgggatgactgcgggtcagtgtacaggaagaggcaggcactggctggctcagctccactcgggtggagtggaagtggccagaccatttagacggacagggtcctcaccctacccctttcctgtgaggcaggggtggtggtggagttgctggaggtagaggagctatgtggagcaaaggccgacagaggggaaggaatggacctgtgagaggaagggaaggtggcagaaagtctcatttcaggaaggagggggttggggaggggcggtgttaactctttctgctccttgcattttgacatccctgaaggggagctcttggatatcattggccatgtttcaatcgaatggagccactgggccccaacactggctttgagatttagagtcaaagggtagagtgaacaggaaagggtcacgtggtcccatgttgcaacagccccaacatcacgcatgtcattcactgccttgccactccatctccctccgtgctccagccacccctgagctgaggctcccattgtctccatcagagcctgcatgtgtatgccgtcctcccctggtccggtgtttgtgttccccacccctcacagactgcctgagctcttctgtaagctggggtagggtgatggcagtgctccgggaactgggcctgcagccttcctcttctgggactgctgtgaggcagaggaatgatggagaatctagtgtagcagcctccaggcaggattcagcacaacactggggagtcacccttccctcgggcctctgcctaccaacaactgggcttatcactgggaaaacacaaaaaattacacaacccagcaacaacaaaagaactagtcctcttagaatttcttgcgctttgatttttttagggcttgtgccctgtttcacttatagggtctagaatgcttgtgttgagtaaaaaggagatgcccaatattcaaagctgctaaatgttctctttgccataaagactccgtgtaactgtgtgaacacttgggatttttctcctctgtcccgaggtcgtcgtctgctttcttttttgggtttctttctagaagattgagaagtgcatatgacaggctgagagcacctccccaaacacacaagctctcagccacaggcagcttctccacagccccagcttcgcacaggctcctggagggctgcctgggggaggcagacatgggagtgccaaggtggccagatggttccaggactacaatgtctttatttttaactgtttgccactgctgccctcacccctgcccggctctggagtaccgtctgccccagacaagtgggagtgaaatgggggtggggggaagcactgattcccagttagggggtgcctaactgagcagtagggatagaaggtgtgaacctgggagtgcttttataaattattttccttgtagattttatttttaatttatctctgtgacctgccagggagaggggagagagagagagatgctgttgagcacatgacaaaataaaataaaatggatgattcattcttaaaaaacacacaaaaaaaaactcggatattccgctatggcccatttaatcggaggttcctaagctacggaggaaatgtgtattaaactaagcacggccagttgtggccctagggttataacctgggctataacttcagacctaaaggaatttaaaactatataggcagatgtccaagttttgaaacaccaaaacgggaagggcattagctcagtatgtgggaccaggggaaagtagatcatgagtccgagagtggcaagatataacccan

SEQ ID NO: 442575 - DNA, 4548 bp, Homo sapiens
agtgcggtagcaggagggggcggggaggtaagcggaggctccgagctctaggccggccggcggtggcggcggcgaggccgggactcgggcttagggcctgctgtggaggcagcggcggacgccgagctaagcagtttctctggaaacccccctggtaagtgtggaggaggcgggacactctgacccaagacgaaaggcctgtagctccagccaaagaaaataaaccttaggagggagaaggaaaaaaaaaatccatcagctgttcctgagaacagcctgcattggaatctacagagaggacaactaatgtgagtgaggaagtgactgtatgtggactgtggagaaagtaagtcacgtgggcccttgaggacctggactgggttaggaacagttgtactttcagaggtgaggtgtcgagaagggaaagtgaatgtggtctggagtgtgtccttggccttggctccacagggtgtgctttcctctggggccgtcagggagctcatcccttgtgttctgccagggtggggtacggggtttgacactgaggagggtaacctgctggctggagcggcagagcagtggccttgatttgtcttttggaagattttaaaaaccaaaaagcataaacattctggtccttcagcaatgctttctctgaagaaatacttaacggaaggacttctccagttcaccattctgctgagtttgattggggtacgggtggacgtggatacttacctgacctcacagcttcccccactccgggagatcatcctggggcccagttctgcctatactcagacccagttccacaacctgaggaataccttggatggctatggtatccaccccaagagcatagacctggacaattacttcactgcccggcggctcctcagtcaggtgagggccctggacaggttccaggtgccaaccactgaggtaaatgcctggctggttcaccgagacccagaggggtctgtctctggcagtcagcccaactcaggcctcgccctcgagagttccagtggcctccaagatgtgacaggcccagacaacggggtgcgagaaagcgaaacggagcagggattcggtgaagatttggaggatttgggggctgtagcccccccagtcagtggagacttaaccaaagaggacatagatctgattgacatcctttggcgacaggatattgatctgggggctgggcgtgaggtttttgactatagtcaccgccagaaggagcaggatgtggagaaggagctgcgagatggaggcgagcaggacacctgggcaggcgagggcgcggaagctctggcacggaacctgctagtggatggagagactggggagagcttccctgcacagtttccagcagacatttccagcataacagaagcagtgcctagtgagagtgagccccctgctcttcaaaacaacctcttgtctcctcttctgaccgggacagagtcaccatttgatttggaacagcagtggcaagatctcatgtccatcatggaaatgcaggccatggaagtgaacacatcagcaagtgaaatcctgtacagtgcccctcctggagacccactgagcaccaactacagccttgcccccaacactcccatcaatcagaatgtcagcctgcatcaggcgtccctggggggctgcagccaggacttcttactcttcagccccgaggtggaaagcctgcctgtggccagtagctccacgctgctcccgttggcccccagcaattctaccagcctcaactccaccttcggctccaccaacctgacagggctcttctttccaccccagctcaatggcacagccaatgacacagcaggcccagagctgcctgaccctttggggggtctgttagatgaagctatgttggatgagatcagccttatggacctggccattgaagaaggctttaaccctgtgcaggcctcccagctggaggaggaatttgactctgactcaggcctttccttagactcgagccatagcccttcttccctaagcagctctgaaggcagttcttcctcttcttcctcctcctcttcctcttcttcctctgcttcttcctctgcctcttcctccttttctgaggaaggtgcggttggctacagctctgactctgagaccctggatctggaagaggccgagggtgctgtgggctaccagcctgagtattccaagttctgccgcatgagctaccaggatccagctcagctctcatgcctgccctacctggagcacgtgggccacaaccacacatacaacatggcacccagtgccctggactcagccgacctgccaccacccagtgccctcaagaaaggcagcaaggagaagcaggctgacttcctggacaagcagatgagccgggatgagcaccgagcccgagccatgaagatccctttcaccaatgacaaaatcatcaacctgcctgtggaggagttcaatgaactgctgtccaaataccagttgagtgaagcccagctgagcctcatccgagacatccggcgccggggcaagaacaagatggcggcgcagaactgccgcaagcgcaagctggacaccatcctgaatctggagcgtgatgtggaggacctgcagcgtgacaaagcccggctgctgcgggagaaagtggagttcctgcgctccctgcgacagatgaagcagaaggtccagagcctgtaccaggaggtgtttgggcggctgcgagatgagaacggacgaccctactcgcccagtcagtatgcgctccagtacgccggggacggcagtgtcctcctcatcccccgcacgatggccgaccagcaggcccggcggcaggagaggaagccaaaggaccggagaaagtgagcctggggaagaagggggtttgaagcccaccaagaccgaaactggagaagggctggacctggacctggacctggacctacagcggggacttaaatgccttcttatccaatatatcttctcagatgggatgactgcgggtcagtgtacaggaagaggcaggcactggctggctcagctccactcgggtggagtggaagtggccagaccatttagacggacagggtcctcaccctacccctttcctgtgaggcaggggtggtggtggagttgctggaggtagaggagctatgtggagcaaaggccgacagaggggaaggaatggacctgtgagaggaagggaaggtggcagaaagtctcatttcaggaaggagggggttggggaggggcggtgttaactctttctgctccttgcattttgacatccctgaaggggagctcttggatatcattggccatgtttcaatcgaatggagccactgggccccaacactggctttgagatttagagtcaaagggtagagtgaacaggaaagggtcacgtggtcccatgttgcaacagccccaacatcacgcatgtcattcactgccttgccactccatctccctccgtgctccagccacccctgagctgaggctcccattgtctccatcagagcctgcatgtgtatgccgtcctcccctggtccggtgtttgtgttccccacccctcacagactgcctgagctcttctgtaagctggggtagggtgatggcagtgctccgggaactgggcctgcagccttcctcttctgggactgctgtgaggcagaggaatgatggagaatctagtgtagcagcctccaggcaggattcagcacaacactggggagtcacccttccctcgggcctctgcctaccaacaactgggcttatcactgggaaaacacaaaaaattacacaacccagcaacaacaaaagaactagtcctcttagaatttcttgcgctttgatttttttagggcttgtgccctgtttcacttatagggtctagaatgcttgtgttgagtaaaaaggagatgcccaatattcaaagctgctaaatgttctctttgccataaagactccgtgtaactgtgtgaacacttgggatttttctcctctgtcccgaggtcgtcgtctgctttcttttttgggtttctttctagaagattgagaagtgcatatgacaggctgagagcacctccccaaacacacaagctctcagccacaggcagcttctccacagccccagcttcgcacaggctcctggagggctgcctgggggaggcagacatgggagtgccaaggtggccagatggttccaggactacaatgtctttatttttaactgtttgccactgctgccctcacccctgcccggctctggagtaccgtctgccccagacaagtgggagtgaaatgggggtggggggaagcactgattcccagttagggggtgcctaactgagcagtagggatagaaggtgtgaacctgggagtgcttttataaattattttccttgtagattttatttttaatttatctctgtgacctgccagggagaggggagagagagagagatgctgttgagcacatgacaaaataaaataaaatggatgattcattcttaaaaaaacacaacaaccccaacaacc

SEQ ID NO: 442576 - DNA, 4585 bp, Homo sapiens
agtgcggtagcaggagggggcggggaggtaagcggaggctccgagctctaggccggccggcggtggcggcggcgaggccgggactcgggcttagggcctgctgtggaggcagcggcggacgccgagctaagcagtttctctggaaacccccctggtaagtgtggaggaggcgggacactctgacccaagacgaaaggcctgtagctccagccaaagaaaataaaccttaggagggagaaggaaaaaaaaaatccatcagctgttcctgagaacagcctgcattggaatctacagagaggacaactaatgtgagtgaggaagtgactgtatgtggactgtggagaaagtaagtcacgtgggcccttgaggacctggactgggttaggaacagttgtactttcagaggtgaggtgtcgagaagggaaagtgaatgtggtctggagtgtgtccttggccttggctccacagggtgtgctttcctctggggccgtcagggagctcatcccttgtgttctgccagggtggggtacggggtttgacactgaggagggtaacctgctggctggagcggcagagcagtggccttgatttgtcttttggaagattttaaaaaccaaaaagcataaacattctggtccttcagcaatgctttctctgaagaaatacttaacggaaggacttctccagttcaccattctgctgagtttgattggggtacgggtggacgtggatacttacctgacctcacagcttcccccactccgggagatcatcctggggcccagttctgcctatactcagacccagttccacaacctgaggaataccttggatggctatggtatccaccccaagagcatagacctggacaattacttcactgcccggcggctcctcagtcaggtgagggccctggacaggttccaggtgccaaccactgaggtaaatgcctggctggttcaccgagacccagaggggtctgtctctggcagtcagcccaactcaggcctcgccctcgagagttccagtggcctccaagatgtgacaggcccagacaacggggtgcgagaaagcgaaacggagcagggattcggtgaagatttggaggatttgggggctgtagcccccccagtcagtggagacttaaccaaagaggacatagatctgattgacatcctttggcgacaggatattgatctgggggctgggcgtgaggtttttgactatagtcaccgccagaaggagcaggatgtggagaaggagctgcgagatggaggcgagcaggacacctgggcaggcgagggcgcggaagctctggcacggaacctgctagtggatggagagactggggagagcttccctgcacagtttccagcagacatttccagcataacagaagcagtgcctagtgagagtgagccccctgctcttcaaaacaacctcttgtctcctcttctgaccgggacagagtcaccatttgatttggaacagcagtggcaagatctcatgtccatcatggaaatgcaggccatggaagtgaacacatcagcaagtgaaatcctgtacagtgcccctcctggagacccactgagcaccaactacagccttgcccccaacactcccatcaatcagaatgtcagcctgcatcaggcgtccctggggggctgcagccaggacttcttactcttcagccccgaggtggaaagcctgcctgtggccagtagctccacgctgctcccgttggcccccagcaattctaccagcctcaactccaccttcggctccaccaacctgacagggctcttctttccaccccagctcaatggcacagccaatgacacagcaggcccagagctgcctgaccctttggggggtctgttagatgaagctatgttggatgagatcagccttatggacctggccattgaagaaggctttaaccctgtgcaggcctcccagctggaggaggaatttgactctgactcaggcctttccttagactcgagccatagcccttcttccctaagcagctctgaaggcagttcttcctcttcttcctcctcctcttcctcttcttcctctgcttcttcctctgcctcttcctccttttctgaggaaggtgcggttggctacagctctgactctgagaccctggatctggaagaggccgagggtgctgtgggctaccagcctgagtattccaagttctgccgcatgagctaccaggatccagctcagctctcatgcctgccctacctggagcacgtgggccacaaccacacatacaacatggcacccagtgccctggactcagccgacctgccaccacccagtgccctcaagaaaggcagcaaggagaagcaggctgacttcctggacaagcagatgagccgggatgagcaccgagcccgagccatgaagatccctttcaccaatgacaaaatcatcaacctgcctgtggaggagttcaatgaactgctgtccaaataccagttgagtgaagcccagctgagcctcatccgagacatccggcgccggggcaagaacaagatggcggcgcagaactgccgcaagcgcaagctggacaccatcctgaatctggagcgtgatgtggaggacctgcagcgtgacaaagcccggctgctgcgggagaaagtggagttcctgcgctccctgcgacagatgaagcagaaggtccagagcctgtaccaggaggtgtttgggcggctgcgagatgagaacggacgaccctactcgcccagtcagtatgcgctccagtacgccggggacggcagtgtcctcctcatcccccgcacgatggccgaccagcaggcccggcggcaggagaggaagccaaaggaccggagaaagtgagcctggggaagaagggggtttgaagcccaccaagaccgaaactggagaagggctggacctggacctggacctggacctacagcggggacttaaatgccttcttatccaatatatcttctcagatgggatgactgcgggtcagtgtacaggaagaggcaggcactggctggctcagctccactcgggtggagtggaagtggccagaccatttagacggacagggtcctcaccctacccctttcctgtgaggcaggggtggtggtggagttgctggaggtagaggagctatgtggagcaaaggccgacagaggggaaggaatggacctgtgagaggaagggaaggtggcagaaagtctcatttcaggaaggagggggttggggaggggcggtgttaactctttctgctccttgcattttgacatccctgaaggggagctcttggatatcattggccatgtttcaatcgaatggagccactgggccccaacactggctttgagatttagagtcaaagggtagagtgaacaggaaagggtcacgtggtcccatgttgcaacagccccaacatcacgcatgtcattcactgccttgccactccatctccctccgtgctccagccacccctgagctgaggctcccattgtctccatcagagcctgcatgtgtatgccgtcctcccctggtccggtgtttgtgttccccacccctcacagactgcctgagctcttctgtaagctggggtagggtgatggcagtgctccgggaactgggcctgcagccttcctcttctgggactgctgtgaggcagaggaatgatggagaatctagtgtagcagcctccaggcaggattcagcacaacactggggagtcacccttccctcgggcctctgcctaccaacaactgggcttatcactgggaaaacacaaaaaattacacaacccagcaacaacaaaagaactagtcctcttagaatttcttgcgctttgatttttttagggcttgtgccctgtttcacttatagggtctagaatgcttgtgttgagtaaaaaggagatgcccaatattcaaagctgctaaatgttctctttgccataaagactccgtgtaactgtgtgaacacttgggatttttctcctctgtcccgaggtcgtcgtctgctttcttttttgggtttctttctagaagattgagaagtgcatatgacaggctgagagcacctccccaaacacacaagctctcagccacaggcagcttctccacagccccagcttcgcacaggctcctggagggctgcctgggggaggcagacatgggagtgccaaggtggccagatggttccaggactacaatgtctttatttttaactgtttgccactgctgccctcacccctgcccggctctggagtaccgtctgccccagacaagtgggagtgaaatgggggtggggggaagcactgattcccagttagggggtgcctaactgagcagtagggatagaaggtgtgaacctgggagtgcttttataaattattttccttgtagattttatttttaatttatctctgtgacctgccagggagaggggagagagagagagatgctgttgagcacatgacaaaataaaataaaatggatgattcattcttaaagtgcactttttccccactttgaatttaaattgagaataaaggaaatggactcattgtagg

SEQ ID NO: 442577 - DNA, 4742 bp, Homo sapiens
agtgcggtagcaggagggggcggggaggtaagcggaggctccgagctctaggccggccggcggtggcggcggcgaggccgggactcgggcttagggcctgctgtggaggcagcggcggacgccgagctaagcagtttctctggaaacccccctggtaagtgtggaggaggcgggacactctgacccaagacgaaaggcctgtagctccagccaaagaaaataaaccttaggagggagaaggaaaaaaaaaatccatcagctgttcctgagaacagcctgcattggaatctacagagaggacaactaatgtgagtgaggaagtgactgtatgtggactgtggagaaagtaagtcacgtgggcccttgaggacctggactgggttaggaacagttgtactttcagaggtgaggtgtcgagaagggaaagtgaatgtggtctggagtgtgtccttggccttggctccacagggtgtgctttcctctggggccgtcagggagctcatcccttgtgttctgccagggtggggtacggggtttgacactgaggagggtaacctgctggctggagcggcagagcagtggccttgatttgtcttttggaagattttaaaaaccaaaaagcataaacattctggtccttcagcaatgctttctctgaagaaatacttaacggaaggacttctccagttcaccattctgctgagtttgattggggtacgggtggacgtggatacttacctgacctcacagcttcccccactccgggagatcatcctggggcccagttctgcctatactcagacccagttccacaacctgaggaataccttggatggctatggtatccaccccaagagcatagacctggacaattacttcactgcccggcggctcctcagtcaggtgagggccctggacaggttccaggtgccaaccactgaggtaaatgcctggctggttcaccgagacccagaggggtctgtctctggcagtcagcccaactcaggcctcgccctcgagagttccagtggcctccaagatgtgacaggcccagacaacggggtgcgagaaagcgaaacggagcagggattcggtgaagatttggaggatttgggggctgtagcccccccagtcagtggagacttaaccaaagaggacatagatctgattgacatcctttggcgacaggatattgatctgggggctgggcgtgaggtttttgactatagtcaccgccagaaggagcaggatgtggagaaggagctgcgagatggaggcgagcaggacacctgggcaggcgagggcgcggaagctctggcacggaacctgctagtggatggagagactggggagagcttccctgcacaggtgcctagtggggaggaccagacggccctgtccctggaagagtgccttaggctgctggaagccacctgcccctttggggagaatgctgagtttccagcagacatttccagcataacagaagcagtgcctagtgagagtgagccccctgctcttcaaaacaacctcttgtctcctcttctgaccgggacagagtcaccatttgatttggaacagcagtggcaagatctcatgtccatcatggaaatgcaggccatggaagtgaacacatcagcaagtgaaatcctgtacagtgcccctcctggagacccactgagcaccaactacagccttgcccccaacactcccatcaatcagaatgtcagcctgcatcaggcgtccctggggggctgcagccaggacttcttactcttcagccccgaggtggaaagcctgcctgtggccagtagctccacgctgctcccgttggcccccagcaattctaccagcctcaactccaccttcggctccaccaacctgacagggctcttctttccaccccagctcaatggcacagccaatgacacagcaggcccagagctgcctgaccctttggggggtctgttagatgaagctatgttggatgagatcagccttatggacctggccattgaagaaggctttaaccctgtgcaggcctcccagctggaggaggaatttgactctgactcaggcctttccttagactcgagccatagcccttcttccctaagcagctctgaaggcagttcttcctcttcttcctcctcctcttcctcttcttcctctgcttcttcctctgcctcttcctccttttctgaggaaggtgcggttggctacagctctgactctgagaccctggatctggaagaggccgagggtgctgtgggctaccagcctgagtattccaagttctgccgcatgagctaccaggatccagctcagctctcatgcctgccctacctggagcacgtgggccacaaccacacatacaacatggcacccagtgccctggactcagccgacctgccaccacccagtgccctcaagaaaggcagcaaggagaagcaggctgacttcctggacaagcagatgagccgggatgagcaccgagcccgagccatgaagatccctttcaccaatgacaaaatcatcaacctgcctgtggaggagttcaatgaactgctgtccaaataccagttgagtgaagcccagctgagcctcatccgagacatccggcgccggggcaagaacaagatggcggcgcagaactgccgcaagcgcaagctggacaccatcctgaatctggagcgtgatgtggaggacctgcagcgtgacaaagcccggctgctgcgggagaaagtggagttcctgcgctccctgcgacagatgaagcagaaggtccagagcctgtaccaggaggtgtttgggcggctgcgagatgagaacggacgaccctactcgcccagtcagtatgcgctccagtacgccggggacggcagtgtcctcctcatcccccgcacgatggccgaccagcaggcccggcggcaggagaggaagccaaaggaccggagaaagtgagcctggggaagaagggggtttgaagcccaccaagaccgaaactggagaagggctggacctggacctggacctggacctacagcggggacttaaatgccttcttatccaatatatcttctcagatgggatgactgcgggtcagtgtacaggaagaggcaggcactggctggctcagctccactcgggtggagtggaagtggccagaccatttagacggacagggtcctcaccctacccctttcctgtgaggcaggggtggtggtggagttgctggaggtagaggagctatgtggagcaaaggccgacagaggggaaggaatggacctgtgagaggaagggaaggtggcagaaagtctcatttcaggaaggagggatagaaggaaggaaggaaggaacccccccccccccccgaaaaaaaaatcaaagcgggaagaaaatcagagggaaggttaaggttggctctggccaggattccaggcagcaggttggagtgactggtgggcctagatcactggtgtgataaaccccatttcaccccggggggggtggggtacacagacacagggtgggggttggggaggggcggtgttaactctttctgctccttgcattttgacatccctgaaggggagctcttggatatcattggccatgtttcaatcgaatggagccactgggccccaacactggctttgagatttagagtcaaagggtagagtgaacaggaaagggtcacgtggtcccatgttgcaacagccccaacatcacgcatgtcattcactgccttgccactccatctccctccgtgctccagccacccctgagctgaggctcccattgtctccatcagagcctgcatgtgtatgccgtcctcccctggtccggtgtttgtgttccccacccctcacagactgctctgggactgctgtgaggcagaggaatgatggagaatctagtgtagcagcctccaggcaggattcagcacaacactggggagtcacccttccctcgggcctctgcctaccaacaactgggcttatcactgggaaaacacaaaaaattacacaacccagcaacaacaaaagaactagtcctcttagaatttcttgcgctttgatttttttagggcttgtgccctgtttcacttatagggtctagaatgcttgtgttgagtaaaaaggagatgcccaatattcaaagctgctaaatgttctctttgccataaagactccgtgtaactgtgtgaacacttgggatttttctcctctgtcccgaggtcgtcgtctgctttcttttttgggtttctttctagaagattgagaagtgcatatgacaggctgagagcacctccccaaacacacaagctctcagccacaggcagcttctccacagccccagcttcgcacaggctcctggagggctgcctgggggaggcagacatgggagtgccaaggtggccagatggttccaggactacaatgtctttatttttaactgtttgccactgctgccctcacccctgcccggctctggagtaccgtctgccccagacaagtgggagtgaaatgggggtggggggaagcactgattcccagttagggggtgcctaactgagcagtagggatagaaggtgtgaacctgggagtgcttttataaattattttccttgtagattttatttttaatttatctctgtgacctgccagggagaggggagagagagagagatgctgttgagcacatgacaaaataaaataaaatggatgattcattcttaa

SEQ ID NO: 442578 - DNA, 4208 bp, Homo sapiens
agtgcggtagcaggagggggcggggaggtaagcggaggctccgagctctaggccggccggcggtggcggcggcgaggccgggactcgggcttagggcctgctgtggaggcagcggcggacgccgagctaagcagtttctctggaaacccccctggtaagtgtggaggaggcgggacactctgacccaagacgaaaggcctgtagctccagccaaagaaaataaaccttaggagggagaaggaaaaaaaaaatccatcagctgttcctgagaacagcctgcattggaatctacagagaggacaactaatgtgagtgaggaagtgactgtatgtggactgtggagaaagtaagtcacgtgggcccttgaggacctggactgggttaggaacagttgtactttcagaggtgaggtgtcgagaagggaaagtgaatgtggtctggagtgtgtccttggccttggctccacagggtgtgctttcctctggggccgtcagggagctcatcccttgtgttctgccagggtggggtacggggtttgacactgaggagggtaacctgctggctggagcggcagagcagtggccttgatttgtcttttggaagattttaaaaaccaaaaagcataaacattctggtccttcagcaatgctttctctgaagaaatacttaacggaaggacttctccagttcaccattctgctgagtttgattggggtacgggtggacgtggatacttacctgacctcacagcttcccccactccgggagatcatcctggggcccagttctgcctatactcagacccagttccacaacctgaggaataccttggatggctatggtatccaccccaagagcatagacctggacaattacttcactgcccggcggctcctcagtcaggtgagggccctggacaggttccaggtgccaaccactgaggtaaatgcctggctggttcaccgagacccagaggggtctgtctctggcagtcagcccaactcaggcctcgccctcgagagttccagtggcctccaagatgtgacaggcccagacaacggggtgcgagaaagcgaaacggagcagggattcggtgaagatttggaggatttgggggctgtagcccccccagtcagtggagacttaaccaaagaggacatagatctgattgacatcctttggcgacaggatattgatctgggggctgggcgtgaggtttttgactatagtcaccgccagaaggagcaggatgtggagaaggagctgcgagatggaggcgagcaggacacctgggcaggcgagggcgcggaagctctggcacggaacctgctagtggatggagagactggggagagcttccctgcacaggtgcctagtggggaggaccagacggccctgtccctggaagagtgccttaggctgctggaagccacctgcccctttggggagaatgctgagtttccagcagacatttccagcataacagaagcagtgcctagtgagagtgagccccctgctcttcaaaacaacctcttgtctcctcttctgaccgggacagagtcaccatttgatttggaacagcagtggcaagatctcatgtccatcatggaaatgcaggccatggaagtgaacacatcagcaagtgaaatcctgtacagtgcccctcctggagacccactgagcaccaactacagccttgcccccaacactcccatcaatcagaatgtcagcctgcatcaggcgtccctggggggctgcagccaggacttcttactcttcagccccgaggtggaaagcctgcctgtggccagtagctccacgctgctcccgttggcccccagcaattctaccagcctcaactccaccttcggctccaccaacctgacagggctcttctttccaccccagctcaatggcacagccaatgacacagcaggcccagagctgcctgaccctttggggggtctgttagatgaagctatgttggatgagatcagccttatggacctggccattgaagaaggctttaaccctgtgcaggcctcccagctggaggaggaatttgactctgactcaggcctttccttagactcgagccatagcccttcttccctaagcagctctgaaggcagttcttcctcttcttcctcctcctcttcctcttcttcctctgcttcttcctctgcctcttcctccttttctgaggaaggtgcggttggctacagctctgactctgagaccctggatctggaagaggccgagggtgctgtgggctaccagcctgagtattccaagttctgccgcatgagctaccaggatccagctcagctctcatgcctgccctacctggagcacgtgggccacaaccacacatacaacatggcacccagtgccctggactcagccgacctgccaccacccagtgccctcaagaaaggcagcaaggagaagcaggctgacttcctggacaagcagatgagccgggatgagcaccgagcccgagccatgaagatccctttcaccaatgacaaaatcatcaacctgcctgtggaggagttcaatgaactgctgtccaaataccagttgagtgaagcccagctgagcctcatccgagacatccggcgccggggcaagaacaagatggcggcgcagaactgccgcaagcgcaagctggacaccatcctgaatctggagcgtgatgtggaggacctgcagcgtgacaaagcccggctgctgcgggagaaagtggagttcctgcgctccctgcgacagatgaagcagaaggtccagagcctgtaccaggaggtgtttgggcggctgcgagatgagaacggacgaccctactcgcccagtcagtatgcgctccagtacgccggggacggcagtgtcctcctcatcccccgcacgatggccgaccagcaggcccggcggcaggagaggaagccaaaggaccggagaaagtgagcctggggaagaagggggtttgaagcccaccaagaccgaaactggagaagggctggacctggacctggacctggacctacagcggggacttaaatgccttcttatccaatatatcttctcagatgggatgactgcgggtcagtgtacaggaagaggcaggcactggctggctcagctccactcgggtggagtggaagtggccagaccatttagacggacagggtcctcaccctacccctttcctgtgaggcaggggtggtggtggagttgctggaggtagaggagctatgtggagcaaaggccgacagaggggaaggaatggacctgtgagaggaagggaaggtggcagaaagtctcatttcaggaaggagggatagaaggaaggaaggaaggaacccccccccccccccgaaaaaaaaatcaaagcgggaagaaaatcagagggaaggttaaggttggctctggccaggattccaggcagcaggttggagtgactggtgggcctagatcactgaaacacaaaaaattacacaacccagcaacaacaaaagaactagtcctcttagaatttcttgcgctttgatttttttagggcttgtgccctgtttcacttatagggtctagaatgcttgtgttgagtaaaaaggagatgcccaatattcaaagctgctaaatgttctctttgccataaagactccgtgtaactgtgtgaacacttgggatttttctcctctgtcccgaggtcgtcgtctgctttcttttttgggtttctttctagaagattgagaagtgcatatgacaggctgagagcacctccccaaacacacaagctctcagccacaggcagcttctccacagccccagcttcgcacaggctcctggagggctgcctgggggaggcagacatgggagtgccaaggtggccagatggttccaggactacaatgtctttatttttaactgtttgccactgctgccctcacccctgcccggctctggagtaccgtctgccccagacaagtgggagtgaaatgggggtggggggaagcactgattcccagttagggggtgcctaactgagcagtagggatagaaggtgtgaacctgggagtgcttttataaattattttccttgtagattttatttttaatttatctctgtgacctgccagggagaggggagagagagagagatgctgttgagcacatgacaaaataaaataaaatggatgattcattcttaa

SEQ ID NO: 442579 - DNA, 4136 bp, Homo sapiens
agtgcggtagcaggagggggcggggaggtaagcggaggctccgagctctaggccggccggcggtggcggcggcgaggccgggactcgggcttagggcctgctgtggaggcagcggcggacgccgagctaagcagtttctctggaaacccccctggtaagtgtggaggaggcgggacactctgacccaagacgaaaggcctgtagctccagccaaagaaaataaaccttaggagggagaaggaaaaaaaaaatccatcagctgttcctgagaacagcctgcattggaatctacagagaggacaactaatgtgagtgaggaagtgactgtatgtggactgtggagaaagtaagtcacgtgggcccttgaggacctggactgggttaggaacagttgtactttcagaggtgaggtgtcgagaagggaaagtgaatgtggtctggagtgtgtccttggccttggctccacagggtgtgctttcctctggggccgtcagggagctcatcccttgtgttctgccagggtggggtacggggtttgacactgaggagggtaacctgctggctggagcggcagagcagtggccttgatttgtcttttggaagattttaaaaaccaaaaagcataaacattctggtccttcagcaatgctttctctgaagaaatacttaacggaaggacttctccagttcaccattctgctgagtttgattggggtacgggtggacgtggatacttacctgacctcacagcttcccccactccgggagatcatcctggggcccagttctgcctatactcagacccagttccacaacctgaggaataccttggatggctatggtatccaccccaagagcatagacctggacaattacttcactgcccggcggctcctcagtcaggtgagggccctggacaggttccaggtgccaaccactgaggtaaatgcctggctggttcaccgagacccagaggggtctgtctctggcagtcagcccaactcaggcctcgccctcgagagttccagtggcctccaagatgtgacaggcccagacaacggggtgcgagaaagcgaaacggagcagggattcggtgaagatttggaggatttgggggctgtagcccccccagtcagtggagacttaaccaaagaggacatagatctgattgacatcctttggcgacaggatattgatctgggggctgggcgtgaggtttttgactatagtcaccgccagaaggagcaggatgtggagaaggagctgcgagatggaggcgagcaggacacctgggcaggcgagggcgcggaagctctggcacggaacctgctagtggatggagagactggggagagcttccctgcacagtttccagcagacatttccagcataacagaagcagtgcctagtgagagtgagccccctgctcttcaaaacaacctcttgtctcctcttctgaccgggacagagtcaccatttgatttggaacagcagtggcaagatctcatgtccatcatggaaatgcaggccatggaagtgaacacatcagcaagtgaaatcctgtacagtgcccctcctggagacccactgagcaccaactacagccttgcccccaacactcccatcaatcagaatgtcagcctgcatcaggcgtccctggggggctgcagccaggacttcttactcttcagccccgaggtggaaagcctgcctgtggccagtagctccacgctgctcccgttggcccccagcaattctaccagcctcaactccaccttcggctccaccaacctgacagggctcttctttccaccccagctcaatggcacagccaatgacacagcaggcccagagctgcctgaccctttggggggtctgttagatgaagctatgttggatgagatcagccttatggacctggccattgaagaaggctttaaccctgtgcaggcctcccagctggaggaggaatttgactctgactcaggcctttccttagactcgagccatagcccttcttccctaagcagctctgaaggcagttcttcctcttcttcctcctcctcttcctcttcttcctctgcttcttcctctgcctcttcctccttttctgaggaaggtgcggttggctacagctctgactctgagaccctggatctggaagaggccgagggtgctgtgggctaccagcctgagtattccaagttctgccgcatgagctaccaggatccagctcagctctcatgcctgccctacctggagcacgtgggccacaaccacacatacaacatggcacccagtgccctggactcagccgacctgccaccacccagtgccctcaagaaaggcagcaaggagaagcaggctgacttcctggacaagcagatgagccgggatgagcaccgagcccgagccatgaagatccctttcaccaatgacaaaatcatcaacctgcctgtggaggagttcaatgaactgctgtccaaataccagttgagtgaagcccagctgagcctcatccgagacatccggcgccggggcaagaacaagatggcggcgcagaactgccgcaagcgcaagctggacaccatcctgaatctggagcgtgatgtggaggacctgcagcgtgacaaagcccggctgctgcgggagaaagtggagttcctgcgctccctgcgacagatgaagcagaaggtccagagcctgtaccaggaggtgtttgggcggctgcgagatgagaacggacgaccctactcgcccagtcagtatgcgctccagtacgccggggacggcagtgtcctcctcatcccccgcacgatggccgaccagcaggcccggcggcaggagaggaagccaaaggaccggagaaagtgagcctggggaagaagggggtttgaagcccaccaagaccgaaactggagaagggctggacctggacctggacctggacctacagcggggacttaaatgccttcttatccaatatatcttctcagatgggatgactgcgggtcagtgtacaggaagaggcaggcactggctggctcagctccactcgggtggagtggaagtggccagaccatttagacggacagggtcctcaccctacccctttcctgtgaggcaggggtggtggtggagttgctggaggtagaggagctatgtggagcaaaggccgacagaggggaaggaatggacctgtgagaggaagggaaggtggcagaaagtctcatttcaggaaggagggggttggggaggggcggtgttaactctttctgctccttgcattttgacatccctgaaggggagctcttggatatcattggccatgtttcaatcgaatggagccactgggccccaacactggctttgagatttagagtcaaagggtagagtgaacaggaaagggtcacgtggtcccatgttgcaacagccccaacatcacgcatgtcattcactgccttgccactccatctccctccgtgctccagccacccctgagctgaggctcccattgtctccatcagagcctgcatgtgtatgccgtcctcccctggtccggtgtttgtgttccccacccctcacagactgcctgagctcttctgtaagctggggtagggtgatggcagtgctccgggaactgggcctgcagccttcctcttctgggactgctgtgaggcagaggaatgatggagaatctagtgtagcagcctccaggcaggattcagcacaacactggggagtcacccttccctcgggcctctgcctaccaacaactgggcttatcactgggaaaacacaaaaaattacacaacccagcaacaacaaaagaactagtcctcttagaatttcttgcgctttgatttttttagggcttgtgccctgtttcacttatagggtctagaatgcttgtgttgagtaaaaaggagatgcccaatattcaaagctgctaaatgttctctttgccataaagactccgtgtaactgtgtgaacacttgggatttttctcctctgtcccgaggtcgtcgtctgctttcttttttgggtttctttctagaagattgagaagtgcatatgacaggctgagagcacctccgctacacagctgaagaggaatcctcgggagcagccctcc

SEQ ID NO: 442580 - DNA, 4172 bp, Homo sapiens
agtgcggtagcaggagggggcggggaggtaagcggaggctccgagctctaggccggccggcggtggcggcggcgaggccgggactcgggcttagggcctgctgtggaggcagcggcggacgccgagctaagcagtttctctggaaacccccctggtaagtgtggaggaggcgggacactctgacccaagacgaaaggcctgtagctccagccaaagaaaataaaccttaggagggagaaggaaaaaaaaaatccatcagctgttcctgagaacagcctgcattggaatctacagagaggacaactaatgtgagtgaggaagtgactgtatgtggactgtggagaaagtaagtcacgtgggcccttgaggacctggactgggttaggaacagttgtactttcagaggtgaggtgtcgagaagggaaagtgaatgtggtctggagtgtgtccttggccttggctccacagggtgtgctttcctctggggccgtcagggagctcatcccttgtgttctgccagggtggggtacggggtttgacactgaggagggtaacctgctggctggagcggcagagcagtggccttgatttgtcttttggaagattttaaaaaccaaaaagcataaacattctggtccttcagcaatgctttctctgaagaaatacttaacggaaggacttctccagttcaccattctgctgagtttgattggggtacgggtggacgtggatacttacctgacctcacagcttcccccactccgggagatcatcctggggcccagttctgcctatactcagacccagttccacaacctgaggaataccttggatggctatggtatccaccccaagagcatagacctggacaattacttcactgcccggcggctcctcagtcaggtgagggccctggacaggttccaggtgccaaccactgaggtaaatgcctggctggttcaccgagacccagaggggtctgtctctggcagtcagcccaactcaggcctcgccctcgagagttccagtggcctccaagatgtgacaggcccagacaacggggtgcgagaaagcgaaacggagcagggattcggtgaagatttggaggatttgggggctgtagcccccccagtcagtggagacttaaccaaagaggacatagatctgattgacatcctttggcgacaggatattgatctgggggctgggcgtgaggtttttgactatagtcaccgccagaaggagcaggatgtggagaaggagctgcgagatggaggcgagcaggacacctgggcaggcgagggcgcggaagctctggcacggaacctgctagtggatggagagactggggagagcttccctgcacagtttccagcagacatttccagcataacagaagcagtgcctagtgagagtgagccccctgctcttcaaaacaacctcttgtctcctcttctgaccgggacagagtcaccatttgatttggaacagcagtggcaagatctcatgtccatcatggaaatgcaggccatggaagtgaacacatcagcaagtgaaatcctgtacagtgcccctcctggagacccactgagcaccaactacagccttgcccccaacactcccatcaatcagaatgtcagcctgcatcaggcgtccctggggggctgcagccaggacttcttactcttcagccccgaggtggaaagcctgcctgtggccagtagctccacgctgctcccgttggcccccagcaattctaccagcctcaactccaccttcggctccaccaacctgacagggctcttctttccaccccagctcaatggcacagccaatgacacagcaggcccagagctgcctgaccctttggggggtctgttagatgaagctatgttggatgagatcagccttatggacctggccattgaagaaggctttaaccctgtgcaggcctcccagctggaggaggaatttgactctgactcaggcctttccttagactcgagccatagcccttcttccctaagcagctctgaaggcagttcttcctcttcttcctcctcctcttcctcttcttcctctgcttcttcctctgcctcttcctccttttctgaggaaggtgcggttggctacagctctgactctgagaccctggatctggaagaggccgagggtgctgtgggctaccagcctgagtattccaagttctgccgcatgagctaccaggatccagctcagctctcatgcctgccctacctggagcacgtgggccacaaccacacatacaacatggcacccagtgccctggactcagccgacctgccaccacccagtgccctcaagaaaggcagcaaggagaagcaggctgacttcctggacaagcagatgagccgggatgagcaccgagcccgagccatgaagatccctttcaccaatgacaaaatcatcaacctgcctgtggaggagttcaatgaactgctgtccaaataccagttgagtgaagcccagctgagcctcatccgagacatccggcgccggggcaagaacaagatggcggcgcagaactgccgcaagcgcaagctggacaccatcctgaatctggagcgtgatgtggaggacctgcagcgtgacaaagcccggctgctgcgggagaaagtggagttcctgcgctccctgcgacagatgaagcagaaggtccagagcctgtaccaggaggtgtttgggcggctgcgagatgagaacggacgaccctactcgcccagtcagtatgcgctccagtacgccggggacggcagtgtcctcctcatcccccgcacgatggccgaccagcaggcccggcggcaggagaggaagccaaaggaccggagaaagtgagcctggggaagaagggggtttgaagcccaccaagaccgaaactggagaagggctggacctggacctggacctggacctacagcggggacttaaatgccttcttatccaatatatcttctcagatgggatgactgcgggtcagtgtacaggaagaggcaggcactggctggctcagctccactcgggtggagtggaagtggccagaccatttagacggacagggtcctcaccctacccctttcctgtgaggcaggggtggtggtggagttgctggaggtagaggagctatgtggagcaaaggccgacagaggggaaggaatggacctgtgagaggaagggaaggtggcagaaagtctcatttcaggaaggagggatagaaggaaggaaggaaggcacgtgggccacaaccacacatacaacattgcacccattgccctggactcagccgacctgccaccacccagtgccctcaagaaaggcagcaaggagaagcaggctgacttcctggacaagcagatgagccgggatgagcaccgagcccgagccatgaagatccctttcaccaatgaaacacaaaaaattacacaacccagcaacaacaaaagaactagtcctcttagaatttcttgcgctttgatttttttagggcttgtgccctgtttcacttatagggtctagaatgcttgtgttgagtaaaaaggagatgcccaatattcaaagctgctaaatgttctctttgccataaagactccgtgtaactgtgtgaacacttgggatttttctcctctgtcccgaggtcgtcgtctgctttcttttttgggtttctttctagaagattgagaagtgcatatgacaggctgagagcacctccccaaacacacaagctctcagccacaggcagcttctccacagccccagcttcgcacaggctcctggagggctgcctgggggaggcagacatgggagtgccaaggtggccagatggttccaggactacaatgtctttatttttaactgtttgccactgctgccctcacccctgcccggctctggagtaccgtctgccccagacaagtgggagtgaaatgggggtggggggaagcactgattcccagttagggggtgcctaactgagcagtagggatagaaggtgtgaacctgggagtgcttttataaattattttccttgtagattttatttttaatttatctctgtgacctgccagggagaggggagagagagagagatgctgttgagcacatgacaaaataaaataaaatggatgattcattcttaa

SEQ ID NO: 442581 - DNA, 3940 bp, Homo sapiens
agtgcggtagcaggagggggcggggaggtaagcggaggctccgagctctaggccggccggcggtggcggcggcgaggccgggactcgggcttagggcctgctgtggaggcagcggcggacgccgagctaagcagtttctctggaaacccccctggtaagtgtggaggaggcgggacactctgacccaagacgaaaggcctgtagctccagccaaagaaaataaaccttaggagggagaaggaaaaaaaaaatccatcagctgttcctgagaacagcctgcattggaatctacagagaggacaactaatgtgagtgaggaagtgactgtatgtggactgtggagaaagtaagtcacgtgggcccttgaggacctggactgggttaggaacagttgtactttcagaggtgaggtgtcgagaagggaaagtgaatgtggtctggagtgtgtccttggccttggctccacagggtgtgctttcctctggggccgtcagggagctcatcccttgtgttctgccagggtggggtacggggtttgacactgaggagggtaacctgctggctggagcggcagagcagtggccttgatttgtcttttggaagattttaaaaaccaaaaagcataaacattctggtccttcagcaatgctttctctgaagaaatacttaacggaaggacttctccagttcaccattctgctgagtttgattggggtacgggtggacgtggatacttacctgacctcacagcttcccccactccgggagatcatcctggggcccagttctgcctatactcagacccagttccacaacctgaggaataccttggatggctatggtatccaccccaagagcatagacctggacaattacttcactgcccggcggctcctcagtcaggtgagggccctggacaggttccaggtgccaaccactgaggtaaatgcctggctggttcaccgagacccagaggggtctgtctctggcagtcagcccaactcaggcctcgccctcgagagttccagtggcctccaagatgtgacaggcccagacaacggggtgcgagaaagcgaaacggagcagggattcggtgaagatttggaggatttgggggctgtagcccccccagtcagtggagacttaaccaaagaggacatagatctgattgacatcctttggcgacaggatattgatctgggggctgggcgtgaggtttttgactatagtcaccgccagaaggagcaggatgtggagaaggagctgcgagatggaggcgagcaggacacctgggcaggcgagggcgcggaagctctggcacggaacctgctagtggatggagagactggggagagcttccctgcacagtttccagcagacatttccagcataacagaagcagtgcctagtgagagtgagccccctgctcttcaaaacaacctcttgtctcctcttctgaccgggacagagtcaccatttgatttggaacagcagtggcaagatctcatgtccatcatggaaatgcaggccatggaagtgaacacatcagcaagtgaaatcctgtacagtgcccctcctggagacccactgagcaccaactacagccttgcccccaacactcccatcaatcagaatgtcagcctgcatcaggcgtccctggggggctgcagccaggacttcttactcttcagccccgaggtggaaagcctgcctgtggccagtagctccacgctgctcccgttggcccccagcaattctaccagcctcaactccaccttcggctccaccaacctgacagggctcttctttccaccccagctcaatggcacagccaatgacacagcaggcccagagctgcctgaccctttggggggtctgttagatgaagctatgttggatgagatcagccttatggacctggccattgaagaaggctttaaccctgtgcaggcctcccagctggaggaggaatttgactctgactcaggcctttccttagactcgagccatagcccttcttccctaagcagctctgaaggcagttcttcctcttcttcctcctcctcttcctcttcttcctctgcttcttcctctgcctcttcctccttttctgaggaaggtgcggttggctacagctctgactctgagaccctggatctggaagaggccgagggtgctgtgggctaccagcctgagtattccaagttctgccgcatgagctaccaggatccagctcagctctcatgcctgccctacctggagcacgtgggccacaaccacacatacaacatggcacccagtgccctggactcagccgacctgccaccacccagtgccctcaagaaaggcagcaaggagaagcaggctgacttcctggacaagcagatgagccgggatgagcaccgagcccgagccatgaagatccctttcaccaatgacaaaatcatcaacctgcctgtggaggagttcaatgaactgctgtccaaataccagttgagtgaagcccagctgagcctcatccgagacatccggcgccggggcaagaacaagatggcggcgcagaactgccgcaagcgcaagctggacaccatcctgaatctggagcgtgatgtggaggacctgcagcgtgacaaagcccggctgctgcgggagaaagtggagttcctgcgctccctgcgacagatgaagcagaaggtccagagcctgtaccaggaggtgtttgggcggctgcgagatgagaacggacgaccctactcgcccagtcagtatgcgctccagtacgccggggacggcagtgtcctcctcatcccccgcacgatggccgaccagcaggcccggcggcaggagaggaagccaaaggaccggagaaagtgagcctggggaagaagggggtttgaagcccaccaagaccgaaactggagaagggctggacctggacctggacctggacctacagcggggacttaaatgccttcttatccaatatatcttctcagatgggatgactgcgggtcagtgtacaggaagaggcaggcactggctggctcagctccactcgggtggagtggaagtggccagaccatttagacggacagggtcctcaccctacccctttcctgtgaggcaggggtggtggtggagttgctggaggtagaggagctatgtggagcaaaggccgacagaggggaaggaatggacctgtgagaggaagggaaggtggcagaaagtctcatttcaggaaggagggggttggggaggggcggtgttaactctttctgctccttgcattttgacatccctgaaggggagctcttggatatcattggccatgtttcaatcgaatggagccactgggccccaacactggctttgagatttagagtcaaagggtagagtgaacaggaaagggtcacgtggtcccatgttgcaacagccccaacatcacgcatgtcattcactgccttgccactccatctccctccgtgctccagccacccctgagctgaggctcccattgtctccatcagagcctgcatgtgtatgccgtcctcccctggtccggtgtttgtgttccccacccctcacagactgcctgagctcttctgtaagctggggtagggtgatggcagtgctccgggaactgggcctgcagccttcctcttctgggactgctgtgaggcagaggaatgatggagaatctagtgtagcagcctccaggcaggattcagcacaacactggggagtcacccttccctcgggcctctgcctaccaacaactgggcttatcactgggaaaacacaaaaaattacacaacccagcaacaacaaaagaactagtcctcttagaatttcttgcgctttgatttttttagggcttgtgccctgtttcacttatagggtctagaatgcttgtgttgagtaaaaaggagatgcccaatat

SEQ ID NO: 442582 - DNA, 3655 bp, Homo sapiens
agtgcggtagcaggagggggcggggaggtaagcggaggctccgagctctaggccggccggcggtggcggcggcgaggccgggactcgggcttagggcctgctgtggaggcagcggcggacgccgagctaagcagtttctctggaaacccccctggtaagtgtggaggaggcgggacactctgacccaagacgaaaggcctgtagctccagccaaagaaaataaaccttaggagggagaaggaaaaaaaaaatccatcagctgttcctgagaacagcctgcattggaatctacagagaggacaactaatgtgagtgaggaagtgactgtatgtggactgtggagaaagtaagtcacgtgggcccttgaggacctggactgggttaggaacagttgtactttcagaggtgaggtgtcgagaagggaaagtgaatgtggtctggagtgtgtccttggccttggctccacagggtgtgctttcctctggggccgtcagggagctcatcccttgtgttctgccagggtggggtacggggtttgacactgaggagggtaacctgctggctggagcggcagagcagtggccttgatttgtcttttggaagattttaaaaaccaaaaagcataaacattctggtccttcagcaatgctttctctgaagaaatacttaacggaaggacttctccagttcaccattctgctgagtttgattggggtacgggtggacgtggatacttacctgacctcacagcttcccccactccgggagatcatcctggggcccagttctgcctatactcagacccagttccacaacctgaggaataccttggatggctatggtatccaccccaagagcatagacctggacaattacttcactgcccggcggctcctcagtcaggtgagggccctggacaggttccaggtgccaaccactgaggtaaatgcctggctggttcaccgagacccagaggggtctgtctctggcagtcagcccaactcaggcctcgccctcgagagttccagtggcctccaagatgtgacaggcccagacaacggggtgcgagaaagcgaaacggagcagggattcggtgaagatttggaggatttgggggctgtagcccccccagtcagtggagacttaaccaaagaggacatagatctgattgacatcctttggcgacaggatattgatctgggggctgggcgtgaggtttttgactatagtcaccgccagaaggagcaggatgtggagaaggagctgcgagatggaggcgagcaggacacctgggcaggcgagggcgcggaagctctggcacggaacctgctagtggatggagagactggggagagcttccctgcacaggtgcctagtggggaggaccagacggccctgtccctggaagagtgccttaggctgctggaagccacctgcccctttggggagaatgctgagtttccagcagacatttccagcataacagaagcagtgcctagtgagagtgagccccctgctcttcaaaacaacctcttgtctcctcttctgaccgggacagagtcaccatttgatttggaacagcagtggcaagatctcatgtccatcatggaaatgcaggccatggaagtgaacacatcagcaagtgaaatcctgtacagtgcccctcctggagacccactgagcaccaactacagccttgcccccaacactcccatcaatcagaatgtcagcctgcatcaggcgtccctggggggctgcagccaggacttcttactcttcagccccgaggtggaaagcctgcctgtggccagtagctccacgctgctcccgttggcccccagcaattctaccagcctcaactccaccttcggctccaccaacctgacagggctcttctttccaccccagctcaatggcacagccaatgacacagcaggcccagagctgcctgaccctttggggggtctgttagatgaagctatgttggatgagatcagccttatggacctggccattgaagaaggctttaaccctgtgcaggcctcccagctggaggaggaatttgactctgactcaggcctttccttagactcgagccatagcccttcttccctaagcagctctgaaggcagttcttcctcttcttcctcctcctcttcctcttcttcctctgcttcttcctctgcctcttcctccttttctgaggaaggtgcggttggctacagctctgactctgagaccctggatctggaagaggccgagggtgctgtgggctaccagcctgagtattccaagttctgccgcatgagctaccaggatccagctcagctctcatgcctgccctacctggagcacgtgggccacaaccacacatacaacatggcacccagtgccctggactcagccgacctgccaccacccagtgccctcaagaaaggcagcaaggagaagcaggctgacttcctggacaagcagatgagccgggatgagcaccgagcccgagccatgaagatccctttcaccaatgacaaaatcatcaacctgcctgtggaggagttcaatgaactgctgtccaaataccagttgagtgaagcccagctgagcctcatccgagacatccggcgccggggcaagaacaagatggcggcgcagaactgccgcaagcgcaagctggacaccatcctgaatctggagcgtgatgtggaggacctgcagcgtgacaaagcccggctgctgcgggagaaagtggagttcctgcgctccctgcgacagatgaagcagaaggtccagagcctgtaccaggaggtgtttgggcggctgcgagatgagaacggacgaccctactcgcccagtcagtatgcgctccagtacgccggggacggcagtgtcctcctcatcccccgcacgatggccgaccagcaggcccggcggcaggagaggaagccaaaggaccggagaaagtgagcctggggaagaagggggtttgaagcccaccaagaccgaaactggagaagggctggacctggacctggacctggacctacagcggggacttaaatgccttcttatccaatatatcttctcagatgggatgactgcgggtcagtgtacaggaagaggcaggcactggctggctcagctccactcgggtggagtggaagtggccagaccatttagacggacagggtcctcaccctacccctttcctgtgaggcaggggtggtggtggagttgctggaggtagaggagctatgtggagcaaaggccgacagaggggaaggaatggacctgtgagaggaagggaaggtggcagaaagtctcatttcaggaaggagggatagaaggaaggaaggaaggaacccccccccccccccgaaaaaaaaatcaaagcgggaagaaaatcagagggaaggttaaggttggctctggccaggattccaggcagcaggttgcgacgtgtgaccgtgggtgggcgcctaaatctcaccgtggtgtgtgtgatataaaccccccattttcaccccccgggggggggtgttggggttacccccggaccaccgcgggtgtggcggcgttggcgagagcggcgccgggtgttttaagcctcttctcgtgcctcctgtgtgccatttgtgagacatctcccttagaagcg

SEQ ID NO: 442583 - DNA, 3382 bp, Homo sapiens
  misc_feature (3336)..(3336): n is a, c, g, or t
agtgcggtagcaggagggggcggggaggtaagcggaggctccgagctctaggccggccggcggtggcggcggcgaggccgggactcgggcttagggcctgctgtggaggcagcggcggacgccgagctaagcagtttctctggaaacccccctggtaagtgtggaggaggcgggacactctgacccaagacgaaaggcctgtagctccagccaaagaaaataaaccttaggagggagaaggaaaaaaaaaatccatcagctgttcctgagaacagcctgcattggaatctacagagaggacaactaatgtgagtgaggaagtgactgtatgtggactgtggagaaagtaagtcacgtgggcccttgaggacctggactgggttaggaacagttgtactttcagaggtgaggtgtcgagaagggaaagtgaatgtggtctggagtgtgtccttggccttggctccacagggtgtgctttcctctggggccgtcagggagctcatcccttgtgttctgccagggtggggtacggggtttgacactgaggagggtaacctgctggctggagcggcagagcagtggccttgatttgtcttttggaagattttaaaaaccaaaaagcataaacattctggtccttcagcaatgctttctctgaagaaatacttaacggaaggacttctccagttcaccattctgctgagtttgattggggtacgggtggacgtggatacttacctgacctcacagcttcccccactccgggagatcatcctggggcccagttctgcctatactcagacccagttccacaacctgaggaataccttggatggctatggtatccaccccaagagcatagacctggacaattacttcactgcccggcggctcctcagtcaggtgagggccctggacaggttccaggtgccaaccactgaggtaaatgcctggctggttcaccgagacccagaggggtctgtctctggcagtcagcccaactcaggcctcgccctcgagagttccagtggcctccaagatgtgacaggcccagacaacggggtgcgagaaagcgaaacggagcagggattcggtgaagatttggaggatttgggggctgtagcccccccagtcagtggagacttaaccaaagaggacatagatctgattgacatcctttggcgacaggatattgatctgggggctgggcgtgaggtttttgactatagtcaccgccagaaggagcaggatgtggagaaggagctgcgagatggaggcgagcaggacacctgggcaggcgagggcgcggaagctctggcacggaacctgctagtggatggagagactggggagagcttccctgcacagtttccagcagacatttccagcataacagaagcagtgcctagtgagagtgagccccctgctcttcaaaacaacctcttgtctcctcttctgaccgggacagagtcaccatttgatttggaacagcagtggcaagatctcatgtccatcatggaaatgcaggccatggaagtgaacacatcagcaagtgaaatcctgtacagtgcccctcctggagacccactgagcaccaactacagccttgcccccaacactcccatcaatcagaatgtcagcctgcatcaggcgtccctggggggctgcagccaggacttcttactcttcagccccgaggtggaaagcctgcctgtggccagtagctccacgctgctcccgttggcccccagcaattctaccagcctcaactccaccttcggctccaccaacctgacagggctcttctttccaccccagctcaatggcacagccaatgacacagcaggcccagagctgcctgaccctttggggggtctgttagatgaagctatgttggatgagatcagccttatggacctggccattgaagaaggctttaaccctgtgcaggcctcccagctggaggaggaatttgactctgactcaggcctttccttagactcgagccatagcccttcttccctaagcagctctgaaggcagttcttcctcttcttcctcctcctcttcctcttcttcctctgcttcttcctctgcctcttcctccttttctgaggaaggtgcggttggctacagctctgactctgagaccctggatctggaagaggccgagggtgctgtgggctaccagcctgagtattccaagttctgccgcatgagctaccaggatccagctcagctctcatgcctgccctacctggagcacgtgggccacaaccacacatacaacatggcacccagtgccctggactcagccgacctgccaccacccagtgccctcaagaaaggcagcaaggagaagcaggctgacttcctggacaagcagatgagccgggatgagcaccgagcccgagccatgaagatccctttcaccaatgacaaaatcatcaacctgcctgtggaggagttcaatgaactgctgtccaaataccagttgagtgaagcccagctgagcctcatccgagacatccggcgccggggcaagaacaagatggcggcgcagaactgccgcaagcgcaagctggacaccatcctgaatctggagcgtgatgtggaggacctgcagcgtgacaaagcccggctgctgcgggagaaagtggagttcctgcgctccctgcgacagatgaagcagaaggtccagagcctgtaccaggaggtgtttgggcggctgcgagatgagaacggacgaccctactcgcccagtcagtatgcgctccagtacgccggggacggcagtgtcctcctcatcccccgcacgatggccgaccagcaggcccggcggcaggagaggaagccaaaggaccggagaaagtgagcctggggaagaagggggtttgaagcccaccaagaccgaaactggagaagggctggacctggacctggacctggacctacagcggggacttaaatgccttcttatccaatatatcttctcagatgggatgactgcgggtcagtgtacaggaagaggcaggcactggctggctcagctccactcgggtggcggacgagggccgccctttaacggaggggctcaacctaacccttccgtgagcacggcgggggggaaagtcaggaaaaggcctctgttgtcacagcggcagacaggaaggaatgatcctctcgcaaggcaggggcgaaacacctccaagagaggagcaacgagagagagctccccccaaaaaagagtggacggattacggggacgaggacgcgtccaagcgagcagacattgacggcctgctcgacggtgatgacacgtgagaccctattccancagccaatcacggcttgcgtcatccatgacgcagctacagacacgc

SEQ ID NO: 442584 - DNA, 2532 bp, Homo sapiens
agtgcggtagcaggagggggcggggaggtaagcggaggctccgagctctaggccggccggcggtggcggcggcgaggccgggactcgggcttagggcctgctgtggaggcagcggcggacgccgagctaagcagtttctctggaaacccccctggtaagtgtggaggaggcgggacactctgacccaagacgaaaggcctgtagctccagccaaagaaaataaaccttaggagggagaaggaaaaaaaaaatccatcagctgttcctgagaacagcctgcattggaatctacagagaggacaactaatgtgagtgaggaagtgactgtatgtggactgtggagaaagtaagtcacgtgggcccttgaggacctggactgggttaggaacagttgtactttcagaggtgaggtgtcgagaagggaaagtgaatgtggtctggagtgtgtccttggccttggctccacagggtgtgctttcctctggggccgtcagggagctcatcccttgtgttctgccagggtggggtacggggtttgacactgaggagggtaacctgctggctggagcggcagagcagtggccttgatttgtcttttggaagattttaaaaaccaaaaagcataaacattctggtccttcagcaatgctttctctgaagaaatacttaacggaaggacttctccagttcaccattctgctgagtttgattggggtacgggtggacgtggatacttacctgacctcacagcttcccccactccgggagatcatcctggggcccagttctgcctatactcagacccagttccacaacctgaggaataccttggatggctatggtatccaccccaagagcatagacctggacaattacttcactgcccggcggctcctcagtcaggtgagggccctggacaggttccaggtgccaaccactgaggtaaatgcctggctggttcaccgagacccagaggggtctgtctctggcagtcagcccaactcaggcctcgccctcgagagttccagtggcctccaagatgtgacaggcccagacaacggggtgcgagaaagcgaaacggagcagggattcggtgaagatttggaggatttgggggctgtagcccccccagtcagtggagacttaaccaaagaggacatagatctgattgacatcctttggcgacaggatattgatctgggggctgggcgtgaggtttttgactatagtcaccgccagaaggagcaggatgtggagaaggagctgcgagatggaggcgagcaggacacctgggcaggcgagggcgcggaagctctggcacggaacctgctagtggatggagagactggggagagcttccctgcacagtttccagcagacatttccagcataacagaagcagtgcctagtgagagtgagccccctgctcttcaaaacaacctcttgtctcctcttctgaccgggacagagtcaccatttgatttggaacagcagtggcaagatctcatgtccatcatggaaatgcaggccatggaagtgaacacatcagcaagtgaaatcctgtacagtgcccctcctggagacccactgagcaccaactacagccttgcccccaacactcccatcaatcagaatgtcagcctgcatcaggcgtccctggggggctgcagccaggacttcttactcttcagccccgaggtggaaagcctgcctgtggccagtagctccacgctgctcccgttggcccccagcaattctaccagcctcaactccaccttcggctccaccaacctgacagggctcttctttccaccccagctcaatggcacagccaatgacacagcaggcccagagctgcctgaccctttggggggtctgttagatgaagctatgttggatgagatcagccttatggacctggccattgaagaaggctttaaccctgtgcaggcctcccagctggaggaggaatttgactctgactcaggcctttccttagactcgagccatagcccttcttccctaagcagctctgaaggcagttcttcctcttcttcctcctcctcttcctcttcttcctctgcttcttcctctgcctcttcctccttttctgaggaaggtgcggttggctacagctctgactctgagaccctggatctggaagaggccgagggtgctgtgggctaccagcctgagtattccaagttctgccgcatgagctaccaggatccagctcagctctcatgcctgccctacctggagcacgtgggccacaaccacacatacaacatggcacccagtgccctggactcagccgacctgccaccacccagtgccctcaagaaaggcagcaaggagaagcaggctgacttcctggacaagcagatgagccgggatgagcaccgagcccgagccatgaagatccctttcaccaatgacaaaataaaataaaatggatgattcattcttaaagtgcactttttccccactttgaatttaaattgagaataaaggaaatggactcattgtagg

SEQ ID NO: 442585 - DNA, 911 bp, Homo sapiens
cctgttacgcccggaattactgggagtcgaggtccgagcttatgtgcctggtactggctagtgtgcttgtcgtgcgaggtcacgtgactcgggcttagtgtgcctgcatgtggagtgcaggcgtgtgtgacagcctagactaagcatgtttctctggaaacccccctggtaagtgtggaggaggcgggacactctgacccaagacgaaaggcctgtagctccagccaaagaaaataaaccttaggagggagaaggaaaaaaaaaatccatcagctgttcctgagaacagcctgcattggaatctacagagaggacaactaatgtgagtgaggaagtgactgtatgtggactgtggagaaagtaagtcacgtgggcccttgaggacctggactgggttaggaacagttgtactttcagaggtgaggtgtcgagaagggaaagtgaatgtggtctggagtgtgtccttggccttggctccacagggtgtgctttcctctggggccgtcagggagctcatcccttgtgttctgccagggtggggtacggggtttgacactgaggagggtaacctgctggctggagcggcagagcagtggccttgatttgtcttttggaagattttaaaaaccaaaaagcataaacattctggtccttcagcaatgctttctctgaagaaatacttaacggaaggacttctccagttcaccattctgctgagtttgattggggtacgggtggacgtggatacttacctgacctcacagcttcccccactccgggagatcatcctggggcccagttctgcctatactcagacccagttccacaacctgaggaataccttggatggctatggtatccaccccaagagcatagacccagaccagcttacgggatcgtctagatcgacc

SEQ ID NO: 442586 - DNA, 4825 bp, Homo sapiens
cctgttacgcccggaattactgggagtcgaggtccgagcttatgtgcctggtactggctagtgtgcttgtcgtgcgaggtcacgtgactcgggcttagtgtgcctgcatgtggagtgcaggcgtgtgtgacagcctagactaagcatgtttctctggaaacccccctggtaagtgtggaggaggcgggacactctgacccaagacgaaaggcctgtagctccagccaaagaaaataaaccttaggagggagaaggaaaaaaaaaatccatcagctgttcctgagaacagcctgcattggaatctacagagaggacaactaatgtgagtgaggaagtgactgtatgtggactgtggagaaagtaagtcacgtgggcccttgaggacctggactgggttaggaacagttgtactttcagaggtgaggtgtcgagaagggaaagtgaatgtggtctggagtgtgtccttggccttggctccacagggtgtgctttcctctggggccgtcagggagctcatcccttgtgttctgccagggtggggtacggggtttgacactgaggagggtaacctgctggctggagcggcagagcagtggccttgatttgtcttttggaagattttaaaaaccaaaaagcataaacattctggtccttcagcaatgctttctctgaagaaatacttaacggaaggacttctccagttcaccattctgctgagtttgattggggtacgggtggacgtggatacttacctgacctcacagcttcccccactccgggagatcatcctggggcccagttctgcctatactcagacccagttccacaacctgaggaataccttggatggctatggtatccaccccaagagcatagacctggacaattacttcactgcccggcggctcctcagtcaggtgagggccctggacaggttccaggtgccaaccactgaggtaaatgcctggctggttcaccgagacccagaggggtctgtctctggcagtcagcccaactcaggcctcgccctcgagagttccagtggcctccaagatgtgacaggcccagacaacggggtgcgagaaagcgaaacggagcagggattcggtgaagatttggaggatttgggggctgtagcccccccagtcagtggagacttaaccaaagaggacatagatctgattgacatcctttggcgacaggatattgatctgggggctgggcgtgaggtttttgactatagtcaccgccagaaggagcaggatgtggagaaggagctgcgagatggaggcgagcaggacacctgggcaggcgagggcgcggaagctctggcacggaacctgctagtggatggagagactggggagagcttccctgcacaggtgcctagtggggaggaccagacggccctgtccctggaagagtgccttaggctgctggaagccacctgcccctttggggagaatgctgagtttccagcagacatttccagcataacagaagcagtgcctagtgagagtgagccccctgctcttcaaaacaacctcttgtctcctcttctgaccgggacagagtcaccatttgatttggaacagcagtggcaagatctcatgtccatcatggaaatgcaggccatggaagtgaacacatcagcaagtgaaatcctgtacagtgcccctcctggagacccactgagcaccaactacagccttgcccccaacactcccatcaatcagaatgtcagcctgcatcaggcgtccctggggggctgcagccaggacttcttactcttcagccccgaggtggaaagcctgcctgtggccagtagctccacgctgctcccgttggcccccagcaattctaccagcctcaactccaccttcggctccaccaacctgacagggctcttctttccaccccagctcaatggcacagccaatgacacagcaggcccagagctgcctgaccctttggggggtctgttagatgaagctatgttggatgagatcagccttatggacctggccattgaagaaggctttaaccctgtgcaggcctcccagctggaggaggaatttgactctgactcaggcctttccttagactcgagccatagcccttcttccctaagcagctctgaaggcagttcttcctcttcttcctcctcctcttcctcttcttcctctgcttcttcctctgcctcttcctccttttctgaggaaggtgcggttggctacagctctgactctgagaccctggatctggaagaggccgagggtgctgtgggctaccagcctgagtattccaagttctgccgcatgagctaccaggatccagctcagctctcatgcctgccctacctggagcacgtgggccacaaccacacatacaacatggcacccagtgccctggactcagccgacctgccaccacccagtgccctcaagaaaggcagcaaggagaagcaggctgacttcctggacaagcagatgagccgggatgagcaccgagcccgagccatgaagatccctttcaccaatgacaaaatcatcaacctgcctgtggaggagttcaatgaactgctgtccaaataccagttgagtgaagcccagctgagcctcatccgagacatccggcgccggggcaagaacaagatggcggcgcagaactgccgcaagcgcaagctggacaccatcctgaatctggagcgtgatgtggaggacctgcagcgtgacaaagcccggctgctgcgggagaaagtggagttcctgcgctccctgcgacagatgaagcagaaggtccagagcctgtaccaggaggtgtttgggcggctgcgagatgagaacggacgaccctactcgcccagtcagtatgcgctccagtacgccggggacggcagtgtcctcctcatcccccgcacgatggccgaccagcaggcccggcggcaggagaggaagccaaaggaccggagaaagtgagcctggggaagaagggggtttgaagcccaccaagaccgaaactggagaagggctggacctggacctggacctggacctacagcggggacttaaatgccttcttatccaatatatcttctcagatgggatgactgcgggtcagtgtacaggaagaggcaggcactggctggctcagctccactcgggtggagtggaagtggccagaccatttagacggacagggtcctcaccctacccctttcctgtgaggcaggggtggtggtggagttgctggaggtagaggagctatgtggagcaaaggccgacagaggggaaggaatggacctgtgagaggaagggaaggtggcagaaagtctcatttcaggaaggagggatagaaggaaggaaggaaggaacccccccccccccccgaaaaaaaaatcaaagcgggaagaaaatcagagggaaggttaaggttggctctggccaggattccaggcagcaggttggagtgactggtgggcctagatcactggtgtgataaaccccatttcaccccggggggggtggggtacacagacacagggtgggggttggggaggggcggtgttaactctttctgctccttgcattttgacatccctgaaggggagctcttggatatcattggccatgtttcaatcgaatggagccactgggccccaacactggctttgagatttagagtcaaagggtagagtgaacaggaaagggtcacgtggtcccatgttgcaacagccccaacatcacgcatgtcattcactgccttgccactccatctccctccgtgctccagccacccctgagctgaggctcccattgtctccatcagagcctgcatgtgtatgccgtcctcccctggtccggtgtttgtgttccccacccctcacagactgcctgagctcttctgtaagctggggtagggtgatggcagtgctccgggaactgggcctgcagccttcctcttctgggactgctgtgaggcagaggaatgatggagaatctagtgtagcagcctccaggcaggattcagcacaacactggggagtcacccttccctcgggcctctgcctaccaacaactgggcttatcactgggaaaacacaaaaaattacacaacccagcaacaacaaaagaactagtcctcttagaatttcttgcgctttgatttttttagggcttgtgccctgtttcacttatagggtctagaatgcttgtgttgagtaaaaaggagatgcccaatattcaaagctgctaaatgttctctttgccataaagactccgtgtaactgtgtgaacacttgggatttttctcctctgtcccgaggtcgtcgtctgctttcttttttgggtttctttctagaagattgagaagtgcatatgacaggctgagagcacctccccaaacacacaagctctcagccacaggcagcttctccacagccccagcttcgcacaggctcctggagggctgcctgggggaggcagacatgggagtgccaaggtggccagatggttccaggactacaatgtctttatttttaactgtttgccactgctgccctcacccctgcccggctctggagtaccgtctgccccagacaagtgggagtgaaatgggggtggggggaagcactgattcccagttagggggtgcctaactgagcagtagggatagaaggtgtgaacctgggagtgcttttataaattattttccttgtagattttatttttaatttatctctgtgacctgccagggagaggggagagagagagagatgctgttgagcacatgacaaaataaaataaaatggatgattcattcttaa

SEQ ID NO: 442587 - DNA, 4644 bp, Homo sapiens
agtgcggtagcaggagggggcggggaggtaagcggaggctccgagctctaggccggccggcggtggcggcggcgaggccgggactcgggcttagggcctgctgtggaggcagcggcggacgccgagctaagcagtttctctggaaacccccctggtaagtgtggaggaggcgggacactctgacccaagacgaaaggcctgtagctccagccaaagaaaataaaccttaggagggagaaggaaaaaaaaaatccatcagctgttcctgagaacagcctgcattggaatctacagagaggacaactaatgtgagtgaggaagtgactgtatgtggactgtggagaaagtaagtcacgtgggcccttgaggacctggactgggttaggaacagttgtactttcagaggtgaggtgtcgagaagggaaagtgaatgtggtctggagtgtgtccttggccttggctccacagggtgtgctttcctctggggccgtcagggagctcatcccttgtgttctgccagggtggggtacggggtttgacactgaggagggtaacctgctggctggagcggcagagcagtggccttgatttgtcttttggaagattttaaaaaccaaaaagcataaacattctggtccttcagcaatgctttctctgaagaaatacttaacggaaggacttctccagttcaccattctgctgagtttgattggggtacgggtggacgtggatacttacctgacctcacagcttcccccactccgggagatcatcctggggcccagttctgcctatactcagacccagttccacaacctgaggaataccttggatggctatggtatccaccccaagagcatagacctggacaattacttcactgcccggcggctcctcagtcaggtgagggccctggacaggttccaggtgccaaccactgaggtaaatgcctggctggttcaccgagacccagaggggtctgtctctggcagtcagcccaactcaggcctcgccctcgagagttccagtggcctccaagatgtgacaggcccagacaacggggtgcgagaaagcgaaacggagcagggattcggtgaagatttggaggatttgggggctgtagcccccccagtcagtggagacttaaccaaagaggacatagatctgattgacatcctttggcgacaggatattgatctgggggctgggcgtgaggtttttgactatagtcaccgccagaaggagcaggatgtggagaaggagctgcgagatggaggcgagcaggacacctgggcaggcgagggcgcggaagctctggcacggaacctgctagtggatggagagactggggagagcttccctgcacagtttccagcagacatttccagcataacagaagcagtgcctagtgagagtgagccccctgctcttcaaaacaacctcttgtctcctcttctgaccgggacagagtcaccatttgatttggaacagcagtggcaagatctcatgtccatcatggaaatgcaggccatggaagtgaacacatcagcaagtgaaatcctgtacagtgcccctcctggagacccactgagcaccaactacagccttgcccccaacactcccatcaatcagaatgtcagcctgcatcaggcgtccctggggggctgcagccaggacttcttactcttcagccccgaggtggaaagcctgcctgtggccagtagctccacgctgctcccgttggcccccagcaattctaccagcctcaactccaccttcggctccaccaacctgacagggctcttctttccaccccagctcaatggcacagccaatgacacagcaggcccagagctgcctgaccctttggggggtctgttagatgaagctatgttggatgagatcagccttatggacctggccattgaagaaggctttaaccctgtgcaggcctcccagctggaggaggaatttgactctgactcaggcctttccttagactcgagccatagcccttcttccctaagcagctctgaaggcagttcttcctcttcttcctcctcctcttcctcttcttcctctgcttcttcctctgcctcttcctccttttctgaggaaggtgcggttggctacagctctgactctgagaccctggatctggaagaggccgagggtgctgtgggctaccagcctgagtattccaagttctgccgcatgagctaccaggatccagtcagccgacctgccaccacccagtgccctcaagaaaggcagcaaggagaagcaggctgacttcctggacaagcagatgagccgggatgagcaccgagcccgagccatgaagatccctttcaccaatgacaaaatcatcaacctgcctgtggaggagttcaatgaactgctgtccaaataccagttgagtgaagcccagctgagcctcatccgagacatccggcgccggggcaagaacaagatggcggcgcagaactgccgcaagcgcaagctggacaccatcctgaatctggagcgtgatgtggaggacctgcagcgtgacaaagcccggctgctgcgggagaaagtggagttcctgcgctccctgcgacagatgaagcagaaggtccagagcctgtaccaggaggtgtttgggcggctgcgagatgagaacggacgaccctactcgcccagtcagtatgcgctccagtacgccggggacggcagtgtcctcctcatcccccgcacgatggccgaccagcaggcccggcggcaggagaggaagccaaaggaccggagaaagtgagcctggggaagaagggggtttgaagcccaccaagaccgaaactggagaagggctggacctggacctggacctggacctacagcggggacttaaatgccttcttatccaatatatcttctcagatgggatgactgcgggtcagtgtacaggaagaggcaggcactggctggctcagctccactcgggtggagtggaagtggccagaccatttagacggacagggtcctcaccctacccctttcctgtgaggcaggggtggtggtggagttgctggaggtagaggagctatgtggagcaaaggccgacagaggggaaggaatggacctgtgagaggaagggaaggtggcagaaagtctcatttcaggaaggagggatagaaggaaggaaggaaggaacccccccccccccccgaaaaaaaaatcaaagcgggaagaaaatcagagggaaggttaaggttggctctggccaggattccaggcagcaggttggagtgactggtgggcctagatcactggtgtgataaaccccatttcaccccggggggggtggggtacacagacacagggtgggggttggggaggggcggtgttaactctttctgctccttgcattttgacatccctgaaggggagctcttggatatcattggccatgtttcaatcgaatggagccactgggccccaacactggctttgagatttagagtcaaagggtagagtgaacaggaaagggtcacgtggtcccatgttgcaacagccccaacatcacgcatgtcattcactgccttgccactccatctccctccgtgctccagccacccctgagctgaggctcccattgtctccatcagagcctgcatgtgtatgccgtcctcccctggtccggtgtttgtgttccccacccctcacagactgcctgagctcttctgtaagctggggtagggtgatggcagtgctccgggaactgggcctgcagccttcctcttctgggactgctgtgaggcagaggaatgatggagaatctagtgtagcagcctccaggcaggattcagcacaacactggggagtcacccttccctcgggcctctgcctaccaacaactgggcttatcactgggaaaacacaaaaaattacacaacccagcaacaacaaaagaactagtcctcttagaatttcttgcgctttgatttttttagggcttgtgccctgtttcacttatagggtctagaatgcttgtgttgagtaaaaaggagatgcccaatattcaaagctgctaaatgttctctttgccataaagactccgtgtaactgtgtgaacacttgggatttttctcctctgtcccgaggtcgtcgtctgctttcttttttgggtttctttctagaagattgagaagtgcatatgacaggctgagagcacctccccaaacacacaagctctcagccacaggcagcttctccacagccccagcttcgcacaggctcctggagggctgcctgggggaggcagacatgggagtgccaaggtggccagatggttccaggactacaatgtctttatttttaactgtttgccactgctgccctcacccctgcccggctctggagtaccgtctgccccagacaagtgggagtgaaatgggggtggggggaagcactgattcccagttagggggtgcctaactgagcagtagggatagaaggtgtgaacctgggagtgcttttataaattattttccttgtagattttatttttaatttatctctgtgacctgccagggagaggggagagagagagagatgctgttgagcacatgacaaaataaaataaaatggatgattcattcttaa

SEQ ID NO: 442588 - DNA, 2749 bp, Homo sapiens
cctactatctgattcagatcgtctcatcctctgaggcaggggagcagctgtgttcatcgctgctggttcattcttcctcttcttcctcctcctcttcctcttcttcctctgcttcttcctctgcctcttcctccttttctgaggaaggtgcggttggctacagctctgactctgagaccctggatctggaagaggccgagggtgctgtgggctaccagcctgagtattccaagttctgccgcatgagctaccaggatccagctcagctctcatgcctgccctacctggagcacgtgggccacaaccacacatacaacatggcacccagtgccctggactcagccgacctgccaccacccagtgccctcaagaaaggcagcaaggagaagcaggctgacttcctggacaagcagatgagccgggatgagcaccgagcccgagccatgaagatccctttcaccaatgacaaaatcatcaacctgcctgtggaggagttcaatgaactgctgtccaaataccagttgagtgaagcccagctgagcctcatccgagacatccggcgccggggcaagaacaagatggcggcgcagaactgccgcaagcgcaagctggacaccatcctgaatctggagcgtgatgtggaggacctgcagcgtgacaaagcccggctgctgcgggagaaagtggagttcctgcgctccctgcgacagatgaagcagaaggtccagagcctgtaccaggaggtgtttgggcggctgcgagatgagaacggacgaccctactcgcccagtcagtatgcgctccagtacgccggggacggcagtgtcctcctcatcccccgcacgatggccgaccagcaggcccggcggcaggagaggaagccaaaggaccggagaaagtgagcctggggaagaagggggtttgaagcccaccaagaccgaaactggagaagggctggacctggacctggacctggacctacagcggggacttaaatgccttcttatccaatatatcttctcagatgggatgactgcgggtcagtgtacaggaagaggcaggcactggctggctcagctccactcgggtggagtggaagtggccagaccatttagacggacagggtcctcaccctacccctttcctgtgaggcaggggtggtggtggagttgctggaggtagaggagctatgtggagcaaaggccgacagaggggaaggaatggacctgtgagaggaagggaaggtggcagaaagtctcatttcaggaaggagggatagaaggaaggaaggaaggaacccccccccccccccgaaaaaaaaatcaaagcgggaagaaaatcagagggaaggttaaggttggctctggccaggattccaggcagcaggttggagtgactggtgggcctagatcactggtgtgataaaccccatttcaccccggggggggtggggtacacagacacagggtgggggttggggaggggcggtgttaactctttctgctccttgcattttgacatccctgaaggggagctcttggatatcattggccatgtttcaatcgaatggagccactgggccccaacactggctttgagatttagagtcaaagggtagagtgaacaggaaagggtcacgtggtcccatgttgcaacagccccaacatcacgcatgtcattcactgccttgccactccatctccctccgtgctccagccacccctgagctgaggctcccattgtctccatcagagcctgcatgtgtatgccgtcctcccctggtccggtgtttgtgttccccacccctcacagactgcctgagctcttctgtaagctggggtagggtgatggcagtgctccgggaactgggcctgcagccttcctcttctgggactgctgtgaggcagaggaatgatggagaatctagtgtagcagcctccaggcaggattcagcacaacactggggagtcacccttccctcgggcctctgcctaccaacaactgggcttatcactgggaaaacacaaaaaattacacaacccagcaacaacaaaagaactagtcctcttagaatttcttgcgctttgatttttttagggcttgtgccctgtttcacttatagggtctagaatgcttgtgttgagtaaaaaggagatgcccaatattcaaagctgctaaatgttctctttgccataaagactccgtgtaactgtgtgaacacttgggatttttctcctctgtcccgaggtcgtcgtctgctttcttttttgggtttctttctagaagattgagaagtgcatatgacaggctgagagcacctccccaaacacacaagctctcagccacaggcagcttctccacagccccagcttcgcacaggctcctggagggctgcctgggggaggcagacatgggagtgccaaggtggccagatggttccaggactacaatgtctttatttttaactgtttgccactgctgccctcacccctgcccggctctggagtaccgtctgccccagacaagtgggagtgaaatgggggtggggggaagcactgattcccagttagggggtgcctaactgagcagtagggatagaaggtgtgaacctgggagtgcttttataaattattttccttgtagattttatttttaatttatctctgtgacctgccagggagaggggagagagagagagatgctgttgagcacatgacaaaataaaataaaatggatgattcattcttaa

SEQ ID NO: 442589 - DNA, 4545 bp, Homo sapiens
agtgcggtagcaggagggggcggggaggtaagcggaggctccgagctctaggccggccggcggtggcggcggcgaggccgggactcgggcttagggcctgctgtggaggcagcggcggacgccgagctaagcagtttctctggaaacccccctggtaagtgtggaggaggcgggacactctgacccaagacgaaaggcctgtagctccagccaaagaaaataaaccttaggagggagaaggaaaaaaaaaatccatcagctgttcctgagaacagcctgcattggaatctacagagaggacaactaatgtgagtgaggaagtgactgtatgtggactgtggagaaagtaagtcacgtgggcccttgaggacctggactgggttaggaacagttgtactttcagaggtgaggtgtcgagaagggaaagtgaatgtggtctggagtgtgtccttggccttggctccacagggtgtgctttcctctggggccgtcagggagctcatcccttgtgttctgccagggtggggtacggggtttgacactgaggagggtaacctgctggctggagcggcagagcagtggccttgatttgtcttttggaagattttaaaaaccaaaaagcataaacattctggtccttcagcaatgctttctctgaagaaatacttaacggaaggacttctccagttcaccattctgctgagtttgattggggtacgggtggacgtggatacttacctgacctcacagcttcccccactccgggagatcatcctggggcccagttctgcctatactcagacccagttccacaacctgaggaataccttggatggctatggtatccaccccaagagcatagacctggacaattacttcactgcccggcggctcctcagtcaggtgagggccctggacaggttccaggtgccaaccactgaggtaaatgcctggctggttcaccgagacccagaggggtctgtctctggcagtcagcccaactcaggcctcgccctcgagagttccagtggcctccaagatgtgacaggcccagacaacggggtgcgagaaagcgaaacggagcagggattcggtgaagatttggaggatttgggggctgtagcccccccagtcagtggagacttaaccaaagaggacatagatctgattgacatcctttggcgacaggatattgatctgggggctgggcgtgaggtttttgactatagtcaccgccagaaggagcaggatgtggagaaggagctgcgagatggaggcgagcaggacacctgggcaggcgagggcgcggaagctctggcacggaacctgctagtggatggagagactggggagagcttccctgcacagtttccagcagacatttccagcataacagaagcagtgcctagtgagagtgagccccctgctcttcaaaacaacctcttgtctcctcttctgaccgggacagagtcaccatttgatttggaacagcagtggcaagatctcatgtccatcatggaaatgcaggccatggaagtgaacacatcagcaagtgaaatcctgtacagtgcccctcctggagacccactgagcaccaactacagccttgcccccaacactcccatcaatcagaatgtcagcctgcatcaggcgtccctggggggctgcagccaggacttcttactcttcagccccgaggtggaaagcctgcctgtggccagtagctccacgctgctcccgttggcccccagcaattctaccagcctcaactccaccttcggctccaccaacctgacagggctcttctttccaccccagctcaatggcacagccaatgacacagcaggcccagagctgcctgaccctttggggggtctgttagatgaagctatgttggatgagatcagccttatggacctggccattgaagaaggctttaaccctgtgcaggcctcccagctggaggaggaatttgactctgactcaggcctttccttagactcgagccatagcccttcttccctaagcagctctgaaggcagttcttcctcttcttcctcctcctcttcctcttcttcctctgcttcttcctctgcctcttcctccttttctgaggaaggtgcggttggctacagctctgactctgagaccctggatctggaagaggccgagggtgctgtgggctaccagcctgagtattccaagttctgccgcatgagctaccaggatccagctcagctctcatgcctgccctacctggagcacgtgggccacaaccacacatacaacatggcacccagtgccctggactcagccgacctgccaccacccagtgccctcaagaaaggcagcaaggagaagcaggctgacttcctggacaagcagatgagccgggatgagcaccgagcccgagccatgaagatccctttcaccaatgacaaaatcatcaacctgcctgtggaggagttcaatgaactgctgtccaaataccagttgagtgaagcccagctgagcctcatccgagacatccggcgccggggcaagaacaagatggcggcgcagaactgccgcaagcgcaagctggacaccatcctgaatctggagcgtgatgtggaggacctgcagcgtgacaaagcccggctgctgcgggagaaagtggagttcctgcgctccctgcgacagatgaagcagaaggtccagagcctgtaccaggaggtgtttgggcggctgcgagatgagaacggacgaccctactcgcccagtcagtatgcgctccagtacgccggggacggcagtgtcctcctcatcccccgcacgatggccgaccagcaggcccggcggcaggagaggaagccaaaggaccggagaaagtgagcctggggaagaagggggtttgaagcccaccaagaccgaaactggagaagggctggacctggacctggacctggacctacagcggggacttaaatgccttcttatccaatatatcttctcagatgggatgactgcgggtcagtgtacaggaagaggcaggcactggctggctcagctccactcgggtggagtggaagtggccagaccatttagacggacagggtcctcaccctacccctttcctgtgaggcaggggtggtggtggagttgctggaggtagaggagctatgtggagcaaaggccgacagaggggaaggaatggacctgtgagaggaagggaaggtggcagaaagtctcatttcaggaaggagggggttggggaggggcggtgttaactctttctgctccttgcattttgacatccctgaaggggagctcttggatatcattggccatgtttcaatcgaatggagccactgggccccaacactggctttgagatttagagtcaaagggtagagtgaacaggaaagggtcacgtggtcccatgttgcaacagccccaacatcacgcatgtcattcactgccttgccactccatctccctccgtgctccagccacccctgagctgaggctcccattgtctccatcagagcctgcatgtgtatgccgtcctcccctggtccggtgtttgtgttccccacccctcacagactgcctgagctcttctgtaagctggggtagggtgatggcagtgctccgggaactgggcctgcagccttcctcttctgggactgctgtgaggcagaggaatgatggagaatctagtgtagcagcctccaggcaggattcagcacaacactggggagtcacccttccctcgggcctctgcctaccaacaactgggcttatcactgggaaaacacaaaaaattacacaacccagcaacaacaaaagaactagtcctcttagaatttcttgcgctttgatttttttagggcttgtgccctgtttcacttatagggtctagaatgcttgtgttgagtaaaaaggagatgcccaatattcaaagctgctaaatgttctctttgccataaagactccgtgtaactgtgtgaacacttgggatttttctcctctgtcccgaggtcgtcgtctgctttcttttttgggtttctttctagaagattgagaagtgcatatgacaggctgagagcacctccccaaacacacaagctctcagccacaggcagcttctccacagccccagcttcgcacaggctcctggagggctgcctgggggaggcagacatgggagtgccaaggtggccagatggttccaggactacaatgtctttatttttaactgtttgccactgctgccctcacccctgcccggctctggagtaccgtctgccccagacaagtgggagtgaaatgggggtggggggaagcactgattcccagttagggggtgcctaactgagcagtagggatagaaggtgtgaacctgggagtgcttttataaattattttccttgtagattttatttttaatttatctctgtgacctgccagggagaggggagagagagagagatgctgttgagcacatgacaaaataaaataaaatggatgattcattcttaaaaaaaaaaacacaacaacacg

SEQ ID NO: 442590 - DNA, 4811 bp, Homo sapiens
agtgcggtagcaggagggggcggggaggtaagcggaggctccgagctctaggccggccggcggtggcggcggcgaggccgggactcgggcttagggcctgctgtggaggcagcggcggacgccgagctaagcagtttctctggaaacccccctggtaagtgtggaggaggcgggacactctgacccaagacgaaaggcctgtagctccagccaaagaaaataaaccttaggagggagaaggaaaaaaaaaatccatcagctgttcctgagaacagcctgcattggaatctacagagaggacaactaatgtgagtgaggaagtgactgtatgtggactgtggagaaagtaagtcacgtgggcccttgaggacctggactgggttaggaacagttgtactttcagaggtgaggtgtcgagaagggaaagtgaatgtggtctggagtgtgtccttggccttggctccacagggtgtgctttcctctggggccgtcagggagctcatcccttgtgttctgccagggtggggtacggggtttgacactgaggagggtaacctgctggctggagcggcagagcagtggccttgatttgtcttttggaagattttaaaaaccaaaaagcataaacattctggtccttcagcaatgctttctctgaagaaatacttaacggaaggacttctccagttcaccattctgctgagtttgattggggtacgggtggacgtggatacttacctgacctcacagcttcccccactccgggagatcatcctggggcccagttctgcctatactcagacccagttccacaacctgaggaataccttggatggctatggtatccaccccaagagcatagacctggacaattacttcactgcccggcggctcctcagtcaggtgagggccctggacaggttccaggtgccaaccactgaggtaaatgcctggctggttcaccgagacccagaggggtctgtctctggcagtcagcccaactcaggcctcgccctcgagagttccagtggcctccaagatgtgacaggcccagacaacggggtgcgagaaagcgaaacggagcagggattcggtgaagatttggaggatttgggggctgtagcccccccagtcagtggagacttaaccaaagaggacatagatctgattgacatcctttggcgacaggatattgatctgggggctgggcgtgaggtttttgactatagtcaccgccagaaggagcaggatgtggagaaggagctgcgagatggaggcgagcaggacacctgggcaggcgagggcgcggaagctctggcacggaacctgctagtggatggagagactggggagagcttccctgcacagtttccagcagacatttccagcataacagaagcagtgcctagtgagagtgagccccctgctcttcaaaacaacctcttgtctcctcttctgaccgggacagagtcaccatttgatttggaacagcagtggcaagatctcatgtccatcatggaaatgcaggccatggaagtgaacacatcagcaagtgaaatcctgtacagtgcccctcctggagacccactgagcaccaactacagccttgcccccaacactcccatcaatcagaatgtcagcctgcatcaggcgtccctggggggctgcagccaggacttcttactcttcagccccgaggtggaaagcctgcctgtggccagtagctccacgctgctcccgttggcccccagcaattctaccagcctcaactccaccttcggctccaccaacctgacagggctcttctttccaccccagctcaatggcacagccaatgacacagcaggcccagagctgcctgaccctttggggggtctgttagatgaagctatgttggatgagatcagccttatggacctggccattgaagaaggctttaaccctgtgcaggcctcccagctggaggaggaatttgactctgactcaggcctttccttagactcgagccatagcccttcttccctaagcagctctgaaggcagttcttcctcttcttcctcctcctcttcctcttcttcctctgcttcttcctctgcctcttcctccttttctgaggaaggtgcggttggctacagctctgactctgagaccctggatctggaagaggccgagggtgctgtgggctaccagcctgagtattccaagttctgccgcatgagctaccaggatccagctcagctctcatgcctgccctacctggagcacgtgggccacaaccacacatacaacatggcacccagtgccctggactcagccgacctgccaccacccagtgccctcaagaaaggcagcaaggagaagcaggctgacttcctggacaagcagatgagccgggatgagcaccgagcccgagccatgaagatccctttcaccaatgacaaaatcatcaacctgcctgtggaggagttcaatgaactgctgtccaaataccagttgagtgaagcccagctgagcctcatccgagacatccggcgccggggcaagaacaagatggcggcgcagaactgccgcaagcgcaagctggacaccatcctgaatctggagcgtgatgtggaggacctgcagcgtgacaaagcccggctgctgcgggagaaagtggagttcctgcgctccctgcgacagatgaagcagaaggtccagagcctgtaccaggaggtgtttgggcggctgcgagatgagaacggacgaccctactcgcccagtcagtatgcgctccagtacgccggggacggcagtgtcctcctcatcccccgcacgatggccgaccagcaggcccggcggcaggagaggaagccaaaggaccggagaaagtgagcctggggaagaagggggtttgaagcccaccaagaccgaaactggagaagggctggacctggacctggacctggacctacagcggggacttaaatgccttcttatccaatatatcttctcagatgggatgactgcgggtcagtgtacaggaagaggcaggcactggctggctcagctccactcgggtggagtggaagtggccagaccatttagacggacagggtcctcaccctacccctttcctgtgaggcaggggtggtggtggagttgctggaggtagaggagctatgtggagcaaaggccgacagaggggaaggaatggacctgtgagaggaagggaaggtggcagaaagtctcatttcaggaaggagggggttggggaggggcggtgttaactctttctgctccttgcattttgacatccctgaaggggagctcttggatatcattggccatgtttcaatcgaatggagccactgggccccaacactggctttgagatttagagtcaaagggtagagtgaacaggaaagggtcacgtggtcccatgttgcaacagccccaacatcacgcatgtcattcactgccttgccactccatctccctccgtgctccagccacccctgagctgaggctcccattgtctccatcagagcctgcatgtgtatgccgtcctcccctggtccggtgtttgtgttccccacccctcacagactgcctgagctcttctgtaagctggggtagggtgatggcagtgctccgggaactgggcctgcagccttcctcttctgggactgctgtgaggcagaggaatgatggagaatctagtgtagcagcctccaggcaggattcagcacaacactggggagtcacccttccctcgggcctctgcctaccaacaactgggcttatcactgggaaaacacaaaaaattacacaacccagcaacaacaaaagaactagtcctcttagaatttcttgcgctttgatttttttagggcttgtgccctgtttcacttatagggtctagaatgcttgtgttgagtaaaaaggagatgcccaatattcaaagctgctaaatgttctctttgccataaagactccgtgtaactgtgtgaacacttgggatttttctcctctgtcccgaggtcgtcgtctgctttcttttttgggtttctttctagaagattgagaagtgcatatgacaggctgagagcacctccccaaacacacaagctctcagccacaggcagcttctccacagccccagcttcgcacaggctcctggagggctgcctgggggaggcagacatgggagtgccaaggtggccagatggttccaggactacaatgtctttatttttaactgtttgccactgctgccctcacccctgcccggctctggagtaccgtctgccccagacaagtgggagtgaaatgggggtggggggaagcactgattcccagttagggggtgcctaactgagcagtagggatagaaggtgtgaacctgggagtgcttttataaattattttccttgtagattttatttttaatttatctctgtgacctgccagggagaggggagagagagagagatgctgttgagcacatgacaaaataaaataaaatggatgattcattcttaaaagcaaaaaacaaaaaaaaactttgaaattgttcctattgggacccaatataagcgaagggtaaccaaagggtatccggaagaaaattctgcgttattaaattgcgaagggccacagttgggcccctaggtatacacctttggtaagcataaattttaaaagaggcctaaaacgacattatacaaacatataatagggcgcgatatagtccactgttttatataaccccaaaacacctgaataagaggtatatatgacacacagtactgagagaaacagcacgagag

SEQ ID NO: 442591 - DNA, 2520 bp, Homo sapiens
cctgttacgcccggaattactgggagtcgaggtccgagcttatgtgcctggtactggctagtgtgcttgtcgtgcgaggtcacgtgactcgggcttagtgtgcctgcatgtggagtgcaggcgtgtgtgacagcctagactaagcatgtttctctggaaacccccctggtaagtgtggaggaggcgggacactctgacccaagacgaaaggcctgtagctccagccaaagaaaataaaccttaggagggagaaggaaaaaaaaaatccatcagctgttcctgagaacagcctgcattggaatctacagagaggacaactaatgtgagtgaggaagtgactgtatgtggactgtggagaaagtaagtcacgtgggcccttgaggacctggactgggttaggaacagttgtactttcagaggtgaggtgtcgagaagggaaagtgaatgtggtctggagtgtgtccttggccttggctccacagggtgtgctttcctctggggccgtcagggagctcatcccttgtgttctgccagggtggggtacggggtttgacactgaggagggtaacctgctggctggagcggcagagcagtggccttgatttgtcttttggaagattttaaaaaccaaaaagcataaacattctggtccttcagcaatgctttctctgaagaaatacttaacggaaggacttctccagttcaccattctgctgagtttgattggggtacgggtggacgtggatacttacctgacctcacagcttcccccaacactggctttgagatttagagtcaaagggtagagtgaacaggaaagggtcacgtggtcccatgttgcaacagccccaacatcacgcatgtcattcaatgccttgccactccatctccctccgtgctccacctacccctttcctgtgaggcaggggtggtggtggagttgctggaggtagaggagctatgtggagcaaaggccgacagaggggaaggaatggacctgtgagaggaagggaaggtggcagaaagtctcatttcaggaaggagggatagaaggaaggaaggaaggaacccccccccccccccgaaaaaaaaatcaaagcgggaagaaaatcagagggaaggttaaggttggctctggccaggattccaggcagcaggttggagtgactggtgggcctagatcactggtgtgataaaccccatttcaccccggggggggtggggtacacagacacagggtgggggttggggaggggcggtgttaactctttctgctccttgcattttgacatccctgaaggggagctcttggatatcattggccatgtttcaatcgaatggagccactgggccccaacactggctttgagatttagagtcaaagggtagagtgaacaggaaagggtcacgtggtcccatgttgcaacagccccaacatcacgcatgtcattcactgccttgccactccatctccctccgtgctccagccacccctgagctgaggctcccattgtctccatcagagcctgcatgtgtatgccgtcctcccctggtccggtgtttgtgttccccacccctcacagactgcctgagctcttctgtaagctggggtagggtgatggcagtgctccgggaactgggcctgcagccttcctcttctgggactgctgtgaggcagaggaatgatggagaatctagtgtagcagcctccaggcaggattcagcacaacactggggagtcacccttccctcgggcctctgcctaccaacaactgggcttatcactgggaaaacacaaaaaattacacaacccagcaacaacaaaagaactagtcctcttagaatttcttgcgctttgatttttttagggcttgtgccctgtttcacttatagggtctagaatgcttgtgttgagtaaaaaggagatgcccaatattcaaagctgctaaatgttctctttgccataaagactccgtgtaactgtgtgaacacttgggatttttctcctctgtcccgaggtcgtcgtctgctttcttttttgggtttctttctagaagattgagaagtgcatatgacaggctgagagcacctccccaaacacacaagctctcagccacaggcagcttctccacagccccagcttcgcacaggctcctggagggctgcctgggggaggcagacatgggagtgccaaggtggccagatggttccaggactacaatgtctttatttttaactgtttgccactgctgccctcacccctgcccggctctggagtaccgtctgccccagacaagtgggagtgaaatgggggtggggggaagcactgattcccagttagggggtgcctaactgagcagtagggatagaaggtgtgaacctgggagtgcttttataaattattttccttgtagattttatttttaatttatctctgtgacctgccagggagaggggagagagagagagatgctgttgagcacatgacaaaataaaataaaatggatgattcattcttaa

SEQ ID NO: 442592 - DNA, 4462 bp, Homo sapiens
agtgcggtagcaggagggggcggggaggtaagcggaggctccgagctctaggccggccggcggtggcggcggcgaggccgggactcgggcttagggcctgctgtggaggcagcggcggacgccgagctaagcagtttctctggaaacccccctggtaagtgtggaggaggcgggacactctgacccaagacgaaaggcctgtagctccagccaaagaaaataaaccttaggagggagaaggaaaaaaaaaatccatcagctgttcctgagaacagcctgcattggaatctacagagaggacaactaatgtgagtgaggaagtgactgtatgtggactgtggagaaagtaagtcacgtgggcccttgaggacctggactgggttaggaacagttgtactttcagaggtgaggtgtcgagaagggaaagtgaatgtggtctggagtgtgtccttggccttggctccacagggtgtgctttcctctggggccgtcagggagctcatcccttgtgttctgccagggtggggtacggggtttgacactgaggagggtaacctgctggctggagcggcagagcagtggccttgatttgtcttttggaagattttaaaaaccaaaaagcataaacattctggtccttcagcaatgctttctctgaagaaatacttaacggaaggacttctccagttcaccattctgctgagtttgattggggtacgggtggacgtggatacttacctgacctcacagcttcccccactccgggagatcatcctggggcccagttctgcctatactcagacccagttccacaacctgaggaataccttggatggctatggtatccaccccaagagcatagacctggacaattacttcactgcccggcggctcctcagtcaggtgagggccctggacaggttccaggtgccaaccactgaggtaaatgcctggctggttcaccgagacccagaggggtctgtctctggcagtcagcccaactcaggcctcgccctcgagagttccagtggcctccaagatgtgacaggcccagacaacggggtgcgagaaagcgaaacggagcagggattcggtgaagatttggaggatttgggggctgtagcccccccagtcagtggagacttaaccaaagaggacatagatctgattgacatcctttggcgacaggatattgatctgggggctgggcgtgaggtttttgactatagtcaccgccagaaggagcaggatgtggagaaggagctgcgagatggaggcgagcaggacacctgggcaggcgagggcgcggaagctctggcacggaacctgctagtggatggagagactggggagagcttccctgcacagtttccagcagacatttccagcataacagaagcagtgcctagtgagagtgagccccctgctcttcaaaacaacctcttgtctcctcttctgaccgggacagagtcaccatttgatttggaacagcagtggcaagatctcatgtccatcatggaaatgcaggccatggaagtgaacacatcagcaagtgaaatcctgtacagtgcccctcctggagacccactgagcaccaactacagccttgcccccaacactcccatcaatcagaatgtcagcctgcatcaggcgtccctggggggctgcagccaggacttcttactcttcagccccgaggtggaaagcctgcctgtggccagtagctccacgctgctcccgttggcccccagcaattctaccagcctcaactccaccttcggctccaccaacctgacagggctcttctttccaccccagctcaatggcacagccaatgacacagcaggcccagagctgcctgaccctttggggggtctgttagatgaagctatgttggatgagatcagccttatggacctggccattgaagaaggctttaaccctgtgcaggcctcccagctggaggaggaatttgactctgactcaggcctttccttagactcgagccatagcccttcttccctaagcagctctgaaggcagttcttcctcttcttcctcctcctcttcctcttcttcctctgcttcttcctctgcctcttcctccttttctgaggaaggtgcggttggctacagctctgactctgagaccctggatctggaagaggccgagggtgctgtgggctaccagcctgagtattccaagttctgccgcatgagctaccaggatccagctcagctctcatgcctgccctacctggagcacgtgggccacaaccacacatacaacatggcacccagtgccctggactcagccgacctgccaccacccagtgccctcaagaaaggcagcaaggagaagcaggctgacttcctggacaagcagatgagccgggatgagcaccgagcccgagccatgaagatccctttcaccaatgacaaaatcatcaacctgcctgtggaggagttcaatgaactgctgtccaaataccagttgagtgaagcccagctgagcctcatccgagacatccggcgccggggcaagaacaagatggcggcgcagaactgccgcaagcgcaagctggacaccatcctgaatctggagcgtgatgtggaggacctgcagcgtgacaaagcccggctgctgcgggagaaagtggagttcctgcgctccctgcgacagatgaagcagaaggtccagagcctgtaccaggaggtgtttgggcggctgcgagatgagaacggacgaccctactcgcccagtcagtatgcgctccagtacgccggggacggcagtgtcctcctcatcccccgcacgatggccgaccagcaggcccggcggcaggagaggaagccaaaggaccggagaaagtgagcctggggaagaagggggtttgaagcccaccaagaccgaaactggagaagggctggacctggacctggacctggacctacagcggggacttaaatgccttcttatccaatatatcttctcagatgggatgactgcgggtcagtgtacaggaagaggcaggcactggctggctcagctccactcgggtggagtggaagtggccagaccatttagacggacagggtcctcaccctacccctttcctgtgaggcaggggtggtggtggagttgctggaggtagaggagctatgtggagcaaaggccgacagaggggaaggaatggacctgtgagaggaagggaaggtggcagaaagtctcatttcaggaaggagggggttggggaggggcggtgttaactctttctgctccttgcattttgacatccctgaaggggagctcttggatatcattggccatgtttcaatcgaatggagccactgggccccaacactggctttgagatttagagtcaaagggtagagtgaacaggaaagggtcacgtggtcccatgttgcaacagccccaacatcacgcatgtcattcactgccttgccactccatctccctccgtgctccagccacccctgagctgaggctcccattgtctccatcagagcctgcatgtgtatgccgtcctcccctggtccggtgtttgtgttccccacccctcacagactgcctgagctcttctgtaagctggggtagggtgatggcagtgctccgggaactgggcctgcagccttcctcttctgggactgctgtgaggcagaggaatgatggagaatctagtgtagcagcctccaggcaggattcagcacaacactggggagtcacccttccctcgggcctctgcctaccaacaactgggcttatcactgggaaaacacaaaaaattacacaacccagcaacaacaaaagaactagtcctcttagaatttcttgcgctttgattttatattgggcatctcctttttactcaacacaagcattctagaccctatccgtgtaactgtgtgaacacttgggatttttctcctctgtcccgaggtcgtcgtctgctttcttttttgggtttctttctagaagattgagaagtgcatatgacaggctgagagcacctccccaaacacacaagctctcagccacaggcagcttctccacagccccagcttcgcacaggctcctggagggctgcctgggggaggcagacatgggagtgccaaggtggccagatggttccaggactacaatgtctttatttttaactgtttgccactgctgccctcacccctgcccggctctggagtaccgtctgccccagacaagtgggagtgaaatgggggtggggggaagcactgattcccagttagggggtgcctaactgagcagtagggatagaaggtgtgaacctgggagtgcttttataaattattttccttgtagattttatttttaatttatctctgtgacctgccagggagaggggagagagagagagatgctgttgagcacatgacaaaataaaataaaatggatgattcattcttaa

SEQ ID NO: 442593 - DNA, 3828 bp, Homo sapiens
agtgcggtagcaggagggggcggggaggtaagcggaggctccgagctctaggccggccggcggtggcggcggcgaggccgggactcgggcttagggcctgctgtggaggcagcggcggacgccgagctaagcagtttctctggaaacccccctggtaagtgtggaggaggcgggacactctgacccaagacgaaaggcctgtagctccagccaaagaaaataaaccttaggagggagaaggaaaaaaaaaatccatcagctgttcctgagaacagcctgcattggaatctacagagaggacaactaatgtgagtgaggaagtgactgtatgtggactgtggagaaagtaagtcacgtgggcccttgaggacctggactgggttaggaacagttgtactttcagaggtgaggtgtcgagaagggaaagtgaatgtggtctggagtgtgtccttggccttggctccacagggtgtgctttcctctggggccgtcagggagctcatcccttgtgttctgccagggtggggtacggggtttgacactgaggagggtaacctgctggctggagcggcagagcagtggccttgatttgtcttttggaagattttaaaaaccaaaaagcataaacattctggtccttcagcaatgctttctctgaagaaatacttaacggaaggacttctccagttcaccattctgctgagtttgattggggtacgggtggacgtggatacttacctgacctcacagcttcccccactccgggagatcatcctggggcccagttctgcctatactcagacccagttccacaacctgaggaataccttggatggctatggtatccaccccaagagcatagacctggacaattacttcactgcccggcggctcctcagtcaggtgagggccctggacaggttccaggtgccaaccactgaggtaaatgcctggctggttcaccgagacccagaggggtctgtctctggcagtcagcccaactcaggcctcgccctcgagagttccagtggcctccaagatgtgacaggcccagacaacggggtgcgagaaagcgaaacggagcagggattcggtgaagatttggaggatttgggggctgtagcccccccagtcagtggagacttaaccaaagaggacatagatctgattgacatcctttggcgacaggatattgatctgggggctgggcgtgaggtttttgactatagtcaccgccagaaggagcaggatgtggagaaggagctgcgagatggaggcgagcaggacacctgggcaggcgagggcgcggaagctctggcacggaacctgctagtggatggagagactggggagagcttccctgcacagtttccagcagacatttccagcataacagaagcagtgcctagtgagagtgagccccctgctcttcaaaacaacctcttgtctcctcttctgaccgggacagagtcaccatttgatttggaacagcagtggcaagatctcatgtccatcatggaaatgcaggccatggaagtgaacacatcagcaagtgaaatcctgtacagtgcccctcctggagacccactgagcaccaactacagccttgcccccaacactcccatcaatcagaatgtcagcctgcatcaggcgtccctggggggctgcagccaggacttcttactcttcagccccgaggtggaaagcctgcctgtggccagtagctccacgctgctcccgttggcccccagcaattctaccagcctcaactccaccttcggctccaccaacctgacagggctcttctttccaccccagctcaatggcacagccaatgacacagcaggcccagagctgcctgaccctttggggggtctgttagatgaagctatgttggatgagatcagccttatggacctggccattgaagaaggctttaaccctgtgcaggcctcccagctggaggaggaatttgactctgactcaggcctttccttagactcgagccatagcccttcttccctaagcagctctgaaggcagttcttcctcttcttcctcctcctcttcctcttcttcctctgcttcttcctctgcctcttcctccttttctgaggaaggtgcggttggctacagctctgactctgagaccctggatctggaagaggccgagggtgctgtgggctaccagcctgagtattccaagttctgccgcatgagctaccaggatccagctcagctctcatgcctgccctacctggagcacgtgggccacaaccacacatacaacatggcacccagtgccctggactcagccgacctgccaccacccagtgccctcaagaaaggcagcaaggagaagcaggctgacttcctggacaagcagatgagccgggatgagcaccgagcccgagccatgaagatccctttcaccaatgacaaaatcatcaacctgcctgtggaggagttcaatgaactgctgtccaaataccagttgagtgaagcccagctgagcctcatccgagacatccggcgccggggcaagaacaagatggcggcgcagaactgccgcaagcgcaagctggacaccatcctgaatctggagcgtgatgtggaggacctgcagcgtgacaaagcccggctgctgcgggagaaagtggagttcctgcgctccctgcgacagatgaagcagaaggtccagagcctgtaccaggaggtgtttgggcggctgcgagatgagaacggacgaccctactcgcccagtcagtatgcgctccagtacgccggggacggcagtgtcctcctcatcccccgcacgatggccgaccagcaggcccggcggcaggagaggaagccaaaggaccggagaaagtgagcctggggaagaagggggtttgaagcccaccaagaccgaaactggagaagggctggacctggacctggacctggacctacagcggggactttctgggactgctgtgaggcagaggaatgatggagaatctagtgtagcagcctccaggcaggattcagcacaacactggggagtcacccttccctcgggcctctgcctaccaacaactgggcttatcactgggaaaacacaaaaaattacacaacccagcaacaacaaaagaactagtcctcttagaatttcttgcgctttgatttttttagggcttgtgccctgtttcacttatagggtctagaatgcttgtgttgagtaaaaaggagatgcccaatattcaaagctgctaaatgttctctttgccataaagactccgtgtaactgtgtgaacacttgggatttttctcctctgtcccgaggtcgtcgtctgctttcttttttgggtttctttctagaagattgagaagtgcatatgacaggctgagagcacctccccaaacacacaagctctcagccacaggcagcttctccacagccccagcttcgcacaggctcctggagggctgcctgggggaggcagacatgggagtgccaaggtggccagatggttccaggactacaatgtctttatttttaactgtttgccactgctgccctcacccctgcccggctctggagtaccgtctgccccagacaagtgggagtgaaatgggggtggggggaagcactgattcccagttagggggtgcctaactgagcagtagggatagaaggtgtgaacctgggagtgcttttataaattattttccttgtagattttatttttaatttatctctgtgacctgccagggagaggggagagagagagagatgctgttgagcacatgacaaaataaaataaaatggatgattcattcttaa

SEQ ID NO: 442594 - DNA, 4387 bp, Homo sapiens
agtgcggtagcaggagggggcggggaggtaagcggaggctccgagctctaggccggccggcggtggcggcggcgaggccgggactcgggcttagggcctgctgtggaggcagcggcggacgccgagctaagcagtttctctggaaacccccctggtaagtgtggaggaggcgggacactctgacccaagacgaaaggcctgtagctccagccaaagaaaataaaccttaggagggagaaggaaaaaaaaaatccatcagctgttcctgagaacagcctgcattggaatctacagagaggacaactaatgtgagtgaggaagtgactgtatgtggactgtggagaaagtaagtcacgtgggcccttgaggacctggactgggttaggaacagttgtactttcagaggtgaggtgtcgagaagggaaagtgaatgtggtctggagtgtgtccttggccttggctccacagggtgtgctttcctctggggccgtcagggagctcatcccttgtgttctgccagggtggggtacggggtttgacactgaggagggtaacctgctggctggagcggcagagcagtggccttgatttgtcttttggaagattttaaaaaccaaaaagcataaacattctggtccttcagcaatgctttctctgaagaaatacttaacggaaggacttctccagttcaccattctgctgagtttgattggggtacgggtggacgtggatacttacctgacctcacagcttcccccactccgggagatcatcctggggcccagttctgcctatactcagacccagttccacaacctgaggaataccttggatggctatggtatccaccccaagagcatagacctggacaattacttcactgcccggcggctcctcagtcaggtgagggccctggacaggttccaggtgccaaccactgaggtaaatgcctggctggttcaccgagacccagaggggtctgtctctggcagtcagcccaactcaggcctcgccctcgagagttccagtggcctccaagatgtgacaggcccagacaacggggtgcgagaaagcgaaacggagcagggattcggtgaagatttggaggatttgggggctgtagcccccccagtcagtggagacttaaccaaagaggacatagatctgattgacatcctttggcgacaggatattgatctgggggctgggcgtgaggtttttgactatagtcaccgccagaaggagcaggatgtggagaaggagctgcgagatggaggcgagcaggacacctgggcaggcgagggcgcggaagctctggcacggaacctgctagtggatggagagactggggagagcttccctgcacagtttccagcagacatttccagcataacagaagcagtgcctagtgagagtgagccccctgctcttcaaaacaacctcttgtctcctcttctgaccgggacagagtcaccatttgatttggaacagcagtggcaagatctcatgtccatcatggaaatgcaggccatggaagtgaacacatcagcaagtgaaatcctgtacagtgcccctcctggagacccactgagcaccaactacagccttgcccccaacactcccatcaatcagaatgtcagcctgcatcaggcgtccctggggggctgcagccaggacttcttactcttcagccccgaggtggaaagcctgcctgtggccagtagctccacgctgctcccgttggcccccagcaattctaccagcctcaactccaccttcggctccaccaacctgacagggctcttctttccaccccagctcaatggcacagccaatgacacagcaggcccagagctgcctgaccctttggggggtctgttagatgaagctatgttggatgagatcagccttatggacctggccattgaagaaggctttaaccctgtgcaggcctcccagctggaggaggaatttgactctgactcaggcctttccttagactcgagccatagcccttcttccctaagcagctctgaaggcagttcttcctcttcttcctcctcctcttcctcttcttcctctgcttcttcctctgcctcttcctccttttctgaggaaggtgcggttggctacagctctgactctgagaccctggatctggaagaggccgagggtgctgtgggctaccagcctgagtattccaagttctgccgcatgagctaccaggatccagctcagctctcatgcctgccctacctggagcacgtgggccacaaccacacatacaacatggcacccagtgccctggactcagccgacctgccaccacccagtgccctcaagaaaggcagcaaggagaagcaggctgacttcctggacaagcagatgagccgggatgagcaccgagcccgagccatgaagatccctttcaccaatgacaaaatcatcaacctgcctgtggaggagttcaatgaactgctgtccaaataccagttgagtgaagcccagctgagcctcatccgagacatccggcgccggggcaagaacaagatggcggcgcagaactgccgcaagcgcaagctggacaccatcctgaatctggagcgtgatgtggaggacctgcagcgtgacaaagcccggctgctgcgggagaaagtggagttcctgcgctccctgcgacagatgaagcagaaggtccagagcctgtaccaggaggtgtttgggcggctgcgagatgagaacggacgaccctactcgcccagtcagtatgcgctccagtacgccggggacggcagtgtcctcctcatcccccgcacgatggccgaccagcaggcccggcggcaggagaggaagccaaaggaccggagaaagtgagcctggggaagaagggggtttgaagcccaccaagaccgaaactggagaagggctggacctggacctggacctggacctacagcggggacttaaatgccttcttatccaatatatcttctcagatgggatgactgcgggtcagtgtacaggaagaggcaggcactggctggctcagctccactcgggtggagtggaagtggccagaccatttagacggacagggtcctcaccctacccctttcctgtgaggcaggggtggtggtggagttgctggaggtagaggagctatgtggagcaaaggccgacagaggggaaggaatggacctgtgagaggaagggaaggtggcagaaagtctcatttcaggaaggagggggttggggaggggcggtgttaactctttctgctccttgcattttgacatccctgaaggggagctcttggatatcattggccatgtttcaatcgaatggagccactgggccccaacactggctttgagatttagagtcaaagggtagagtgaacaggaaagggtcacgtggtcccatgttgcaacagccccaacatcacgcatgtcattcactgccttgccactccatctccctccgtgctccagccacccctgagctgaggctcccattgtctccatcagagcctgcatgtgtatgccgtcctcccctggtccggtgtttgtgttccccacccctcacagactgcctgagctcttctgtaagctggggtagggtgatggcagtgctccgggaactgggcctgcagccttcctcttctgggactgctgtgaggcagaggaatgatggagaatctagtgtagcagcctccaggcaggattcagcacaacactggggagtcacccttccctcgggcctctgcctaccaacaactgggcttatcactgggaaaacacaaaaaattacacaacccagcaacaacaaaagaactagtcctcttagaatttcttgcgctttgatttttttagggcttgtgccctgtttcacttatagggtctagaatgcttgtgttgagtaaaaaggagatgcccaatattcaaagctgctaaatgttctctttgccataaagactccgtgtaactgtgtgaacacttgggatttttctcctctgtccgcagacatgggagtgccaaggtggccagatggttccaggactacaatgtctttatttttaactgtttgccactgctgccctcacccctgcccggctctggagtaccgtctgccccagacaagtgggagtgaaatgggggtggggggaagcactgattcccagttagggggtgcctaactgagcagtagggatagaaggtgtgaacctgggagtgcttttataaattattttccttgtagattttatttttaatttatctctgtgacctgccagggagaggggagagagagagagatgctgttgagcacatgacaaaataaaataaaatggatgattcattcttaaaaaaacacaacaaccccaacaacc

SEQ ID NO: 442595 - DNA, 4227 bp, Homo sapiens
agtgcggtagcaggagggggcggggaggtaagcggaggctccgagctctaggccggccggcggtggcggcggcgaggccgggactcgggcttagggcctgctgtggaggcagcggcggacgccgagctaagcagtttctctggaaacccccctggtaagtgtggaggaggcgggacactctgacccaagacgaaaggcctgtagctccagccaaagaaaataaaccttaggagggagaaggaaaaaaaaaatccatcagctgttcctgagaacagcctgcattggaatctacagagaggacaactaatgtgagtgaggaagtgactgtatgtggactgtggagaaagtaagtcacgtgggcccttgaggacctggactgggttaggaacagttgtactttcagaggtgaggtgtcgagaagggaaagtgaatgtggtctggagtgtgtccttggccttggctccacagggtgtgctttcctctggggccgtcagggagctcatcccttgtgttctgccagggtggggtacggggtttgacactgaggagggtaacctgctggctggagcggcagagcagtggccttgatttgtcttttggaagattttaaaaaccaaaaagcataaacattctggtccttcagcaatgctttctctgaagaaatacttaacggaaggacttctccagttcaccattctgctgagtttgattggggtacgggtggacgtggatacttacctgacctcacagcttcccccactccgggagatcatcctggggcccagttctgcctatactcagacccagttccacaacctgaggaataccttggatggctatggtatccaccccaagagcatagacctggacaattacttcactgcccggcggctcctcagtcaggtgagggccctggacaggttccaggtgccaaccactgaggtaaatgcctggctggttcaccgagacccagaggggtctgtctctggcagtcagcccaactcaggcctcgccctcgagagttccagtggcctccaagatgtgacaggcccagacaacggggtgcgagaaagcgaaacggagcagggattcggtgaagatttggaggatttgggggctgtagcccccccagtcagtggagacttaaccaaagaggacatagatctgattgacatcctttggcgacaggatattgatctgggggctgggcgtgaggtttttgactatagtcaccgccagaaggagcaggatgtggagaaggagctgcgagatggaggcgagcaggacacctgggcaggcgagggcgcggaagctctggcacggaacctgctagtggatggagagactggggagagcttccctgcacaggtgcctagtggggaggaccagacggccctgtccctggaagagtgccttaggctgctggaagccacctgcccctttggggagaatgctgagtttccagcagacatttccagcataacagaagcagtgcctagtgagagtgagccccctgctcttcaaaacaacctcttgtctcctcttctgaccgggacagagtcaccatttgatttggaacagcagtggcaagatctcatgtccatcatggaaatgcaggccatggaagtgaacacatcagcaagtgaaatcctgtacagtgcccctcctggagacccactgagcaccaactacagccttgcccccaacactcccatcaatcagaatgtcagcctgcatcaggcgtccctggggggctgcagccaggacttcttactcttcagccccgaggtggaaagcctgcctgtggccagtagctccacgctgctcccgttggcccccagcaattctaccagcctcaactccaccttcggctccaccaacctgacagggctcttctttccaccccagctcaatggcacagccaatgacacagcaggcccagagctgcctgaccctttggggggtctgttagatgaagctatgttggatgagatcagccttatggacctggccattgaagaaggctttaaccctgtgcaggcctcccagctggaggaggaatttgactctgactcaggcctttccttagactcgagccatagcccttcttccctaagcagctctgaaggcagttcttcctcttcttcctcctcctcttcctcttcttcctctgcttcttcctctgcctcttcctccttttctgaggaaggtgcggttggctacagctctgactctgagaccctggatctggaagaggccgagggtgctgtgggctaccagcctgagtattccaagttctgccgcatgagctaccaggatccagctcagctctcatgcctgccctacctggagcacgtgggccacaaccacacatacaacatggcacccagtgccctggactcagccgacctgccaccacccagtgccctcaagaaaggcagcaaggagaagcaggctgacttcctggacaagcagatgagccgggatgagcaccgagcccgagccatgaagatccctttcaccaatgacaaaatcatcaacctgcctgtggaggagttcaatgaactgctgtccaaataccagttgagtgaagcccagctgagcctcatccgagacatccggcgccggggcaagaacaagatggcggcgcagaactgccgcaagcgcaagctggacaccatcctgaatctggagcgtgatgtggaggacctgcagcgtgacaaagcccggctgctgcgggagaaagtggagttcctgcgctccctgcgacagatgaagcagaaggtccagagcctgtaccaggaggtgtttgggcggctgcgagatgagaacggacgaccctactcgcccagtcagtatgcgctccagtacgccggggacggcagtgtcctcctcatcccccgcacgatggccgaccagcaggcccggcggcaggagaggaagccaaaggaccggagaaagtgagcctggggaagaagggggtttgaagcccaccaagaccgaaactggagaagggctggacctggacctggacctggacctacagcggggacttaaatgccttcttatccaatatatcttctcagatgggatgactgcgggtcagtgtacaggaagaggcaggcactggctggctcagctccactcgggtggagtggaagtggccagaccatttagacggacagggtcctcaccctacccctttcctgtgaggcaggggtggtggtggagttgctggaggtagaggagctatgtggagcaaaggccgacagaggggaaggaatggacctgtgagaggaagggaaggtggcagaaagtctcatttcaggaaggagggatagaaggaaggaaggaaggaacccccccccccccccgaaaaaaaaatcaaagcgggaagaaaatcagagggaaggttaaggttggctctggccaggattccaggcagcaggttggagtgactggtgggcctagatcactggtgtgataaaccccatttcaccccggggggggtggggtacacagacacagggtgggggttggggaggggcggtgttaactctttctgctccttgcattttgacatccctgaaggggagctcttggatatcattggccatgtttcaatcgaatggagccactgggccccaacactggctttgagatttagagtcaaagggtagagtgaacaggaaagggtcacgtggtcccatgttgcaacagccccaacatcacgcatgtcattcactgccttgccactccatctccctccgtgctccagccacccctgagctgaggctcccattgtctccatcagagcctgcatgtgtatgccgtcctcccctggtccggtgtttgtgttccccacccctcacagactgcctgagctcttctgtaagctggggtagggtgatggcagtgctccgggaactgggcctgcagccttcctcttctgggactgctgtgaggcagaggaatgatggagaatctagtgtagcagcctccaggcaggattcagcacaacactggggagtcacccttccctcgggcctctgcctaccaacaactgggcttatcactgggaaaacacaaaaaattacacaacccagcaacaacaaaagaactagtcctcttagaatttcttgcgctttgatttttttagggcttgtgccctgtttcacttatagggtctagaatgcttgtgttgagtaaaaaggagatgcccaatat

SEQ ID NO: 442596 - DNA, 3256 bp, Homo sapiens
agtgcggtagcaggagggggcggggaggtaagcggaggctccgagctctaggccggccggcggtggcggcggcgaggccgggactcgggcttagggcctgctgtggaggcagcggcggacgccgagctaagcagtttctctggaaacccccctggtaagtgtggaggaggcgggacactctgacccaagacgaaaggcctgtagctccagccaaagaaaataaaccttaggagggagaaggaaaaaaaaaatccatcagctgttcctgagaacagcctgcattggaatctacagagaggacaactaatgtgagtgaggaagtgactgtatgtggactgtggagaaagtaagtcacgtgggcccttgaggacctggactgggttaggaacagttgtactttcagaggtgaggtgtcgagaagggaaagtgaatgtggtctggagtgtgtccttggccttggctccacagggtgtgctttcctctggggccgtcagggagctcatcccttgtgttctgccagggtggggtacggggtttgacactgaggagggtaacctgctggctggagcggcagagcagtggccttgatttgtcttttggaagattttaaaaaccaaaaagcataaacattctggtccttcagcaatgctttctctgaagaaatacttaacggaaggacttctccagttcaccattctgctgagtttgattggggtacgggtggacgtggatacttacctgacctcacagcttcccccactccgggagatcatcctggggcccagttctgcctatactcagacccagttccacaacctgaggaataccttggatggctatggtatccaccccaagagcatagacctggacaattacttcactgcccggcggctcctcagtcaggtgagggccctggacaggttccaggtgccaaccactgaggtaaatgcctggctggttcaccgagacccagaggggtctgtctctggcagtcagcccaactcaggcctcgccctcgagagttccagtggcctccaagatgtgacaggcccagacaacggggtgcgagaaagcgaaacggagcagggattcggtgaagatttggaggatttgggggctgtagcccccccagtcagtggagacttaaccaaagaggacatagatctgattgacatcctttggcgacaggatattgatctgggggctgggcgtgaggtttttgactatagtcaccgccagaaggagcaggatgtggagaaggagctgcgagatggaggcgagcaggacacctgggcaggcgagggcgcggaagctctggcacggaacctgctagtggatggagagactggggagagcttccctgcacagtttccagcagacatttccagcataacagaagcagtgcctagtgagagtgagccccctgctcttcaaaacaacctcttgtctcctcttctgaccgggacagagtcaccatttgatttggaacagcagtggcaagatctcatgtccatcatggaaatgcaggccatggaagtgaacacatcagcaagtgaaatcctgtacagtgcccctcctggagacccactgagcaccaactacagccttgcccccaacactcccatcaatcagaatgtcagcctgcatcaggcgtccctggggggctgcagccaggacttcttactcttcagccccgaggtggaaagcctgcctgtggccagtagctccacgctgctcccgttggcccccagcaattctaccagcctcaactccaccttcggctccaccaacctgacagggctcttctttccaccccagctcaatggcacagccaatgacacagcaggcccagagctgcctgaccctttggggggtctgttagatgaagctatgttggatgagatcagccttatggacctggccattgaagaaggctttaaccctgtgcaggcctcccagctggaggaggaatttgactctgactcaggcctttccttagactcgagccatagcccttcttccctaagcagctctgaaggcagttcttcctcttcttcctcctcctcttcctcttcttcctctgcttcttcctctgcctcttcctccttttctgaggaaggtgcggttggctacagctctgactctgagaccctggatctggaagaggccgagggtgctgtgggctaccagcctgagtattccaagttctgccgcatgagctaccaggatccagctcagctctcatgcctgccctacctggagcacgtgggccacaaccacacatacaacatggcacccagtgccctggactcagccgacctgccaccacccagtgccctcaagaaaggcagcaaggagaagcaggctgacttcctggacaagcagatgagccgggatgagcaccgagcccgagccatgaagatccctttcaccaatgacaaaatcatcaacctgcctgtggaggagttcaatgaactgctgtccaaataccagttgagtgaagcccagctgagcctcatccgagacatccggcgccggggcaagaacaagatggcggcgcagaactgccgcaagcgcaagctggacaccatcctgaatctggagcgtgatgtggaggacctgcagcgtgacaaagcccggctgctgcgggagaaagtggagttcctgcgctccctgcgacagatgaagcagaaggtccagagcctgtaccaggaggtgtttgggcggctgcgagatgagaacggacgaccctactcgcccagtcagtatgcgctccagtacgccggggacggcagtgtcctcctcatcccccgcacgatggccgaccagcaggcccggcggcaggagaggaagccaaaggaccggagaaagtgagcctggggaagaagggggtttgaagcccaccaagaccgaaactggagaagggctggacctggacctggacctggacctacagcggggacttaaatgccttcttatccaatatatcttctcagatgggatgactgcgggtcagtgtacaggaagaggcaggcactggctggctcagctccactcgggtggagtggaagtggccagaccatttagacggacagggtcctcaccctacccctttcctgtgaggcaggggtggtggtggagttgctggaggtagaggagctatgtggagcaaaggccgacagaggggaaggaatggacctgtgagaggaagggaaggtggcagttaccatgcagcgtacggtaccggctcgatctt

SEQ ID NO: 442597 - DNA, 1696 bp, Homo sapiens
cctgttacgcccggaattactgggagtcgaggtccgagcttatgtgcctggtactggctagtgtgcttgtcgtgcgaggtcacgtgactcgggcttagtgtgcctgcatgtggagtgcaggcgtgtgtgacagcctagactaagcatgtttctctggaaacccccctggtaagtgtggaggaggcgggacactctgacccaagacgaaaggcctgtagctccagccaaagaaaataaaccttaggagggagaaggaaaaaaaaaatccatcagctgttcctgagaacagcctgcattggaatctacagagaggacaactaatgtgagtgaggaagtgactgtatgtggactgtggagaaagtaagtcacgtgggcccttgaggacctggactgggttaggaacagttgtactttcagaggtgaggtgtcgagaagggaaagtgaatgtggtctggagtgtgtccttggccttggctccacagggtgtgctttcctctggggccgtcagggagctcatcccttgtgttctgccagggtggggtacggggtttgacactgaggagggtaacctgctggctggagcggcagagcagtggccttgatttgtcttttggaagattttaaaaaccaaaaagcataaacattctggtccttcagcaatgctttctctgaagaaatacttaacggaaggacttctccagttcaccattctgctgagtttgattggggtacgggtggacgtggatacttacctgacctcacagcttcccccactccgggagatcatcctggggcccagttctgcctatactcagacccagttccacaacctgaggaataccttggatggctatggtatccaccccaagagcatagacctggacaattacttcactgcccggcggctcctcagtcaggtgagggccctggacaggttccaggtgccaaccactgaggtaaatgcctggctggttcaccgagacccagaggggtctgtctctggcagtcagcccaactcaggcctcgccctcgagagttccagtggcctccaagatgtgacaggcccagacaacggggtgcgagaaagcgaaacggagcagggattcggtgaagatttggaggatttgggggctgtagcccccccagtcagtggagacttaaccaaagaggacatagatctgattgacatcctttggcgacaggatattgatctgggggctgggcgtgaggtttttgactatagtcaccgccagaaggagcaggatgtggagaaggagctgcgagatggaggcgagcaggacacctgggcaggcgagggcgcggaagctctggcacggaacctgctagtggatggagagactggggagagcttccctgcacagtttccagcagacatttccagcataacagaagcagtgcctagtgagagtgagccccctgctcttcaaaacaacctcttgtctcctcttctgaccgggacagagtcaccatttgatttggaacagcagtggcaagatctcatgtccatcatggaaatgcaggctggagtgcagtgacgtgatctcggctcactgcaactgccactgggctcaagccatcttcccacctccgcctcctgaatagctgggactacaggcgcacgccaccacgcctaggtaatttttgtagagacaagctttcgctatattgcccaggc

SEQ ID NO: 442598 - DNA, 597 bp, Homo sapiens
  misc_feature (429)..(429): n is a, c, g, or t
cctgttacgcccggaattactgggagtcgaggtccgagcttatgtgcctggtactggctagtgtgcttgtcgtgcgaggtcacgtgactcgggcttagtgtgcctgcatgtggagtgcaggcgtgtgtgacagcctagactaagcatgtttctctggaaacccccctggtaagtgtggaggaggcgggacactctgacccaagacgaaaggcctgtagctccagccaaagaaaataaaccttaggagggagaaggaaaaaaaaaatccatcagctgttcctgagaacagcctgcattggaatctacagagaggacaactaatgtgagtgaggaagtgactgtatgtggactgtggagaaagtaagtcacgtgggcccttgaggacctggactgggttaggaacagttgtactttcagaggtgaggtgcngatgaatagcgaggtgccgatgaatagcgaggtgccgatgaatagcgaagtgccgatgaatagcgaggtgccgatgaatagcgaggtgccgatgaatagcgaacctcgctattcatcggcaccattagctctagaggtccatgcatactgatattatacgtgtgatcc

SEQ ID NO: 442599 - DNA, 2496 bp, Homo sapiens
  misc_feature (2)..(2): n is a, c, g, or t
  misc_feature (5)..(6): n is a, c, g, or t
gnaanngtggccgggactttgcaggcagcggcggccgggggcggagcgggatcgagccctcgccgaggcctgccgccatgggcccgcgccgccgccgccgcctgtcacccgggccgcgcgggccgtgagcgtcatggccttggccggggcccctgcgggcggcccatgcgcgccggcgctggaggccctgctcggggccggcgcgctgcggctgctcgactcctcgcagatcgtcatcatctccgccgcgcaggacgccagcgccccgccggctcccaccggccccgcggcgcccgccgccggcccctgcgaccctgacctgctgctcttcgccacaccgcaggcgccccggcccacacccagtgcgccgcggcccgcgctcggccgcccgccggtgaagcggaggctggacctggaaactgaccatcagtacctggccgagagcagtgggccagctcggggcagaggccgccatccaggaaaaggtgtgaaatccccgggggagaagtcacgctatgagacctcactgaatctgaccaccaagcgcttcctggagctgctgagccactcggctgacggtgtcgtcgacctgaactgggctgccgaggtgctgaaggtgcagaagcggcgcatctatgacatcaccaacgtccttgagggcatccagctcattgccaagaagtccaagaaccacatccagtggctgggcagccacaccacagtgggcgtcggcggacggcttgaggggttgacccaggacctccgacagctgcaggagagcgagcagcagctggaccacctgatgaatatctgtactacgcagctgcgcctgctctccgaggacactgacagccagcgcctggcctacgtgacgtgtcaggaccttcgtagcattgcagaccctgcagagcagatggttatggtgatcaaagcccctcctgagacccagctccaagccgtggactcttcggagaactttcagatctcccttaagagcaaacaaggcccgatcgatgttttcctgtgccctgaggagaccgtaggtgggatcagccctgggaagaccccatcccaggaggtcacttctgaggaggagaacagggccactgactctgccaccatagtgtcaccaccaccatcatctcccccctcatccctcaccacagatcccagccagtctctactcagcctggagcaagaaccgctgttgtcccggatgggcagcctgcgggctcccgtggacgaggaccgcctgtccccgctggtggcggccgactcgctcctggagcatgtgcgggaggacttctccggcctcctccctgaggagttcatcagcctttccccaccccacgaggccctcgactaccacttcggcctcgaggagggcgagggcatcagagacctcttcgactgtgactttggggacctcacccccctggatttctgacagggcttggagggaccagggtttccagagatgctcaccttgtctctgcagccctggagccccctgtccctggccgtcctcccagcctgtttggaaacatttaatttatacccctctcctctgtctccagaagcttctagctctggggtctggctaccgctaggaggctgagcaagccaggaagggaaggagtctgtgtggtgtgtatgtgcatgcagcctacacccacacgtgtgtaccgggggtgaatgtgtgtgagcatgtgtgtgtgcatgtaccggggaatgaaggtgaacatacacctctgtgtgtgcactgcagacacgccccagtgtgtccacatgtgtgtgcatgagtccatgtgtgcgcgtgggggggctctaactgcactttcggcccttttgctctgggggtcccacaaggcccagggcagtgcctgctcccagaatctggtgctctgaccaggccaggtggggaggctttggctggctgggcgtgtaggacggtgagagcacttctgtcttaaaggttttttctgattgaagctttaatggagcgttatttatttatcgaggcctctttggtgagcctggggaatcagcaaaggggaggaggggtgtggggttgataccccaactccctctacccttgagcaagggcaggggtccctgagctgttcttctgccccatactgaaggaactgaggcctgggtgatttatttattgggaaagtgagggagggagacagactgactgacagccatgggtggtcagatggtggggtgggccctctccagggggccagttcagggccccagctgccccccaggatggatatgagatgggagaggtgagtgggggaccttcactgatgtgggcaggaggggtggtgaaggcctcccccagcccagaccctgtggtccctcctgcagtgtctgaagcgcctgcctccccactgctctgccccaccctccaatctgcactttgatttgcttcctaacagctctgttccctcctgctttggttttaataaatattttgatgacgtt

SEQ ID NO: 442600 - DNA, 1059 bp, Homo sapiens
ctttaagacagaaaaaacctttaagcttcaatcagaaaaaacctttaagacagaagtgctctcaccgtcctacaggttttttctgattgaagctttaatggagcgttatttatttatcgaggcctctttggtgagcctggggaatcagcaaaggggaggaggggtgtggggttgataccccaactccctctacccttgagcaagggcaggggtccctgagctgttcttctgccccatactgaaggaactgaggcctgggtgatttatttattgggaaagtgagggagggagacagactgactgacagccatgggtggtcagatggtggggtgggccctctccagggggccagttcagggccccagctgccccccaggatggatatgagatgggagaggtgagtgggggaccttcactgatgtgggcaggaggggtggtgaaggcctcccccagcccagaccctgtggtccctcctgcagtgtctgaagcgcctgcctccccactgctctgccccaccctccaatctgcactttgatttgcttcctaacagctctgttccctcctgctttggttttaataaatattttgatgacgttaaaaaaaaaaaaaaaaaaaaaaaaaaaaaaaaaaaaaaaaaaaaaaaagggggggggggggaaaaagtattcccgggggggcccattggggggtgacccccagagtttttttgtgtggtcaaccagaggggtggccccatatagaggagggcgtgcgtttattattaaaacgacagagggacagctgggggcgggtggtgaaaaaccgcgtgctaggggagcgggggaggaaaactgtgcgccgctgggggagtctttgtggggagagagagaacgacttacctacttggcggggggggccagacacatattagtggggacgacattctctcctacacggaagtatttagcacggctctgagagggagaaatttctacaattttgcaaagggtgattcggggtgtgaacaacaacgggtggtaattatgcgtgggctcagagaggtcggccaacggggtttag

SEQ ID NO: 442601 - DNA, 2257 bp, Homo sapiens
  misc_feature (12)..(12): n is a, c, g, or t
  misc_feature (16)..(16): n is a, c, g, or t
  misc_feature (23)..(23): n is a, c, g, or t
  misc_feature (31)..(31): n is a, c, g, or t
  misc_feature (44)..(44): n is a, c, g, or t
  misc_feature (51)..(51): n is a, c, g, or t
  misc_feature (58)..(58): n is a, c, g, or t
  misc_feature (68)..(68): n is a, c, g, or t
  misc_feature (81)..(81): n is a, c, g, or t
  misc_feature (110)..(110): n is a, c, g, or t
  misc_feature (119)..(119): n is a, c, g, or t
  misc_feature (125)..(125): n is a, c, g, or t
  misc_feature (140)..(140): n is a, c, g, or t
  misc_feature (143)..(143): n is a, c, g, or t
  misc_feature (148)..(148): n is a, c, g, or t
  misc_feature (152)..(152): n is a, c, g, or t
  misc_feature (155)..(155): n is a, c, g, or t
  misc_feature (159)..(159): n is a, c, g, or t
  misc_feature (161)..(161): n is a, c, g, or t
  misc_feature (166)..(166): n is a, c, g, or t
  misc_feature (170)..(170): n is a, c, g, or t
  misc_feature (184)..(184): n is a, c, g, or t
  misc_feature (202)..(202): n is a, c, g, or t
  misc_feature (210)..(210): n is a, c, g, or t
  misc_feature (213)..(213): n is a, c, g, or t
  misc_feature (224)..(224): n is a, c, g, or t
  misc_feature (239)..(239): n is a, c, g, or t
  misc_feature (250)..(251): n is a, c, g, or t
  misc_feature (264)..(264): n is a, c, g, or t
  misc_feature (269)..(270): n is a, c, g, or t
  misc_feature (279)..(279): n is a, c, g, or t
  misc_feature (307)..(307): n is a, c, g, or t
  misc_feature (309)..(309): n is a, c, g, or t
  misc_feature (318)..(318): n is a, c, g, or t
  misc_feature (325)..(325): n is a, c, g, or t
  misc_feature (327)..(328): n is a, c, g, or t
  misc_feature (338)..(338): n is a, c, g, or t
  misc_feature (340)..(340): n is a, c, g, or t
  misc_feature (364)..(364): n is a, c, g, or t
  misc_feature (408)..(408): n is a, c, g, or t
  misc_feature (417)..(417): n is a, c, g, or t
  misc_feature (420)..(420): n is a, c, g, or t
  misc_feature (426)..(426): n is a, c, g, or t
  misc_feature (430)..(430): n is a, c, g, or t
  misc_feature (466)..(466): n is a, c, g, or t
  misc_feature (497)..(497): n is a, c, g, or t
  misc_feature (501)..(501): n is a, c, g, or t
  misc_feature (548)..(548): n is a, c, g, or t
  misc_feature (554)..(554): n is a, c, g, or t
  misc_feature (569)..(569): n is a, c, g, or t
gtcatcatctcnaccncgacagnacgccagngccccgccggatnccaccgnaccagangacgaacganacggacccctacnaacctaaaataatactcttcgccacacanaagacgacncggacnaaacccagatacaangcnggacnaaanatnggcngnccgcnggtnaaaaggaggctagnaactggaaaataaaaatnaatacatngcnaaaaaaagtgngcaaactcggggaanaagacgcaatnnaggaaaaagtatnaaatnnccggggganaagtaaaactatgaaaaataaataaatntnaaaaaaaancgattantnnagctgctgancnactcggctgaaggtgtcgtcgaantgaactgggatgcagaggtgctgaaagtgcaaaaacggagaatntataaaatnaanaaagtncttnagggaataaaactcattgaaaaaaaatcaaaaaacnaaatcaagtggctgggcaaaacaaaaaagtnggcntcggcggacggcttgaagggttgaaacaggacctccgaaagatgcanaaagcnaaaaaatggaaaatnatgaatatatgtactagtaatggctgctctcagaggacactgacagaaagcctggcctacgtgacgtgtcaggaccttcgtagcattgcagaccctgcagagcagatggttatggtgatcaaagcccctcctgagacccagctccaagccgtggactcttcggagaactttcagatctcccttaagagcaaacaaggcccgatcgatgttttcctgtgccctgaggagaccgtaggtgggatcagccctgggaagaccccatcccaggaggtcacttctgaggaggagaacagggccactgactctgccaccatagtgtcaccaccaccatcatctcccccctcatccctcaccacagatcccagccagtctctactcagcctggagcaagaaccgctgttgtcccggatgggcagcctgcgggctcccgtggacgaggaccgcctgtccccgctggtggcggccgactcgctcctggagcatgtgcgggaggacttctccggcctcctccctgaggagttcatcagcctttccccaccccacgaggccctcgactaccacttcggcctcgaggagggcgagggcatcagagacctcttcgactgtgactttggggacctcacccccctggatttctgacagggcttggagggaccagggtttccagagatgctcaccttgtctctgcagccctggagccccctgtccctggccgtcctcccagcctgtttggaaacatttaatttatacccctctcctctgtctccagaagcttctagctctggggtctggctaccgctaggaggctgagcaagccaggaagggaaggagtctgtgtggtgtgtatgtgcatgcagcctacacccacacgtgtgtaccgggggtgaatgtgtgtgagcatgtgtgtgtgcatgtaccggggaatgaaggtgaacatacacctctgtgtgtgcactgcagacacgccccagtgtgtccacatgtgtgtgcatgagtccatgtgtgcgcgtgggggggctctaactgcactttcggcccttttgctctgggggtcccacaaggcccagggcagtgcctgctcccagaatctggtgctctgaccaggccaggtggggaggctttggctggctgggcgtgtaggacggtgagagcacttctgtcttaaaggttttttctgattgaagctttaatggagcgttatttatttatcgaggcctctttggtgagcctggggaatcagcaaaggggaggaggggtgtggggttgataccccaactccctctacccttgagcaagggcaggggtccctgagctgttcttctgccccatactgaaggaactgaggcctgggtgatttatttattgggaaagtgagggagggagacagactgactgacagccatgggtggtcagatggtggggtgggccctctccagggggccagttcagggccccagctgccccccaggatggatatgagatgggagaggtgagtgggggaccttcactgatgtgggcaggaggggtggtgaaggcctcccccagcccagaccctgtggtccctcctgcagtgtctgaagcgcctgcctccccactgctctgccccaccctccaatctgcactttgatttgcttcctaacagctctgttccctcctgctttggttttaataaatattttgatgacgtt

SEQ ID NO: 442602 - DNA, 2817 bp, Homo sapiens
  misc_feature (2)..(2): n is a, c, g, or t
  misc_feature (5)..(6): n is a, c, g, or t
gnaanngtggccgggactttgcaggcagcggcggccgggggcggagcgggatcgagccctcgccgaggcctgccgccatgggcccgcgccgccgccgccgcctgtcacccgggccgcgcgggccgtgagcgtcatggccttggccggggcccctgcgggcggcccatgcgcgccggcgctggaggccctgctcggggccggcgcgctgcggctgctcgactcctcgcagatcgtcatcatctccgccgcgcaggacgccagcgccccgccggctcccaccggccccgcggcgcccgccgccggcccctgcgaccctgacctgctgctcttcgccacaccgcaggcgccccggcccacacccagtgcgccgcggcccgcgctcggccgcccgccggtgaagcggaggctggacctggaaactgaccatcagtacctggccgagagcagtgggccagctcggggcagaggccgccatccaggaaaaggtgtgaaatccccgggggagaagtcacgctatgagacctcactgaatctgaccaccaagcgcttcctggagctgctgagccactcggctgacggtgtcgtcgacctgaactgggctgccgaggtgctgaaggtgcagaagcggcgcatctatgacatcaccaacgtccttgagggcatccagctcattgccaagaagtccaagaaccacatccagtggctgggcagccacaccacagtgggcgtcggcggacggcttgaggggttgacccaggacctccgacagctgcaggagagcgagcagcagctggaccacctgatgaatatctgtactacgcagctgcgcctgctctccgaggacactgacagccagcgcctggcctacgtgacgtgtcaggaccttcgtagcattgcagaccctgcagagcagatggttatggtgatcaaagcccctcctgagacccagctccaagccgtggactcttcggagaactttcagatctcccttaagagcaaacaaggcccgatcgatgttttcctgtgccctgaggagaccgtaggtgggatcagccctgggaagaccccatcccaggaggtcacttctgaggaggagaacagggccactgactctgccaccatagtgtcaccaccaccatcatctcccccctcatccctcaccacagatcccagccagtctctactcagcctggagcaaggtgggtgatgggtaggtgggtggggtggggcagggcccctcttctggggggtgggcaggcacgacagcccctgccttcctccctgctggggcatccccggcctgtgatgctccccgtctccccagaaccgctgttgtcccggatgggcagcctgcgggctcccgtggacgaggaccgcctgtccccgctggtggcggccgactcgctcctggagcatgtgcgggaggacttctccggcctcctccctgaggagttcatcagcctttccccaccccacgaggccctcgactaccacttcggcctcgaggagggcgagggcatcagagacctcttcgactgtgactttggggacctcacccccctggatttctgacagggcttggagggaccagggtttccagagatgctcaccttgtctctgcagccctggagccccctgtccctggccgtcctcccagcctgtttggaaacatttaatttatacccctctcctctgtctccagaagcttctagctctggggtctggctaccgctaggaggctgagcaagccaggaagggaaggagtctgtgtggtgtgtatgtgcatgcagcctacacccacacgtgtgtaccgggggtgaatgtgtgtgagcatgtgtgtgtgcatgtaccggggaatgaaggtgaacatacacctctgtgtgtgcactgcagacacgccccagtgtgtccacatgtgtgtgcatgagtccatgtgtgcgcgtgggggggctctaactgcactttcggcccttttgctctgggggtcccacaaggcccagggcagtgcctgctcccagaatctggtgctctgaccaggccaggtggggaggctttggctggctgggcgtgtaggacggtgagagcacttctgtcttaaaggttttttctgattgaagctttaatggagcgttatttatttatcgaggcctctttggtgagcctggggaatcagcaaaggggaggaggggtgtggggttgataccccaactccctctacccttgagcaagggcaggggtccctgagctgttcttctgccccatactgaaggaactgaggcctgggtgatttatttattgggaaagtgagggagggagacagactgactgacagccatgggtggtcagatggtggggtgggccctctccagggggccagttcagggccccagctgccccccaggatggatatgagatgggagaggtgagtgggggaccttcactgatgtgggcaggaggggtggtgaaggcctcccccagcccagaccctgtggtccctcctgcagtgtctgaagcgcctgcctccccactgctctgccccaccctccaatctgcactttgatttgcttcctaacagctctgttccctcctgctttggttttaataaatattttgatgacgtttgggccgggttttgggactctgttgggaacatttcggggcgggagaggccaaggttgctggggaaatgcccattctccacttcccttctccctgtccgtgcccgatttgatttgagcctcataactcgaagaaaggtcagcttcctcgctgttttggtcctaactcaaaagcagatccagtaaaggtttttgttgt

SEQ ID NO: 442603 - DNA, 2959 bp, Homo sapiens
  misc_feature (2)..(2): n is a, c, g, or t
  misc_feature (5)..(6): n is a, c, g, or t
gnaanngtggccgggactttgcaggcagcggcggccgggggcggagcgggatcgagccctcgccgaggcctgccgccatgggcccgcgccgccgccgccgcctgtcacccgggccgcgcgggccgtgagcgtcatggccttggccggggcccctgcgggcggcccatgcgcgccggcgctggaggccctgctcggggccggcgcgctgcggctgctcgactcctcgcagatcgtcatcatctccgccgcgcaggacgccagcgccccgccggctcccaccggccccgcggcgcccgccgccggcccctgcgaccctgacctgctgctcttcgccacaccgcaggcgccccggcccacacccagtgcgccgcggcccgcgctcggccgcccgccggtgaagcggaggctggacctggaaactgaccatcagtacctggccgagagcagtgggccagctcggggcagaggccgccatccaggaaaaggtgtgaaatccccgggggagaagtcacgctatgagacctcactgaatctgaccaccaagcgcttcctggagctgctgagccactcggctgacggtgtcgtcgacctgaactgggctgccgaggtgctgaaggtgcagaagcggcgcatctatgacatcaccaacgtccttgagggcatccagctcattgccaagaagtccaagaaccacatccagtggctgggcagccacaccacagtgggcgtcggcggacggcttgaggggttgacccaggacctccgacagctgcaggagagcgagcagcagctggaccacctgatgaatatctgtactacgcagctgcgcctgctctccgaggacactgacagccagcgcctggcctacgtgacgtgtcaggaccttcgtagcattgcagaccctgcagagcagatggttatggtgatcaaagcccctcctgagacccagctccaagccgtggactcttcggagaactttcagatctcccttaagagcaaacaaggcccgatcgatgttttcctgtgccctgaggagaccgtaggtgggatcagccctgggaagaccccatcccaggaggtcacttctgaggaggagaacagggccactgactctgccaccatagtgtcaccaccaccatcatctcccccctcatccctcaccacagatcccagccagtctctactcagcctggagcaagaaccgctgttgtcccggatgggcagcctgcgggctcccgtggacgaggaccgcctgtccccgctggtggcggccgactcgctcctggagcatgtgcgggaggacttctccggcctcctccctgaggagttcatcagcctttccccaccccacgaggccctcgactaccacttcggcctcgaggagggcgagggcatcagagacctcttcgactgtgactttggggacctcacccccctggatttctgacagggcttggagggaccagggtttccagagatgctcaccttgtctctgcagccctggagccccctgtccctggccgtcctcccagcctgtttggaaacatttaatttatacccctctcctctgtctccagaagcttctagctctggggtctggctaccgctaggaggctgagcaagccaggaagggaaggagtctgtgtggtgtgtatgtgcatgcagcctacacccacacgtgtgtaccgggggtgaatgtgtgtgagcatgtgtgtgtgcatgtaccggggaatgaaggtgaacatacacctctgtgtgtgcactgcagacacgccccagtgtgtccacatgtgtgtgcatgagtccatgtgtgcgcgtgggggggctctaactgcactttcggcccttttgctctgggggtcccacaaggcccagggcagtgcctgctcccagaatctggtgctctgaccaggccaggtggggaggctttggctggctgggcgtgtaggacggtgagagcacttctgtcttaaaggttttttctgattgaagctttaatggagcgttatttatttatcgaggcctctttggtgagcctggggaatcagcaaaggggaggaggggtgtggggttgataccccaactccctctacccttgagcaagggcaggggtccctgagctgttcttctgccccatactgaaggaactgaggcctgggtgatttatttattgggaaagtgagggagggagacagactgactgacagccatgggtggtcagatggtggggtgggccctctccagggggccagttcagggccccagctgccccccaggatggatatgagatgggagaggtgagtgggggaccttcactgatgtgggcaggaggggtggtgaaggcctcccccagcccagaccctgtggtccctcctgcagtgtctgaagcgcctgcctccccactgctctgccccaccctccaatctgcactttgatttgcttcctaacagctctgttccctcctgctttggttttaataaatattttgatgacgttaaaaaaaaaaaaaaaaaaaaaaaaaaaaaaaaaaaaaaaaaaaaaaaagggggggggggggaaaaagtattcccgggggggcccattggggggtgacccccagagtttttttgtgtggtcaaccagaggggtggccccatatagaggagggcgtgcgtttattattaaaacgacagagggacagctgggggcgggtggtgaaaaaccgcgtgctaggggagcgggggaggaaaactgtgcgccgctgggggagtctttgtggggagagagagaacgacttacctacttggcggggggggccagacacatattagtggggacgacattctctcctacacggaagtatttagcacggctctgagagggagaaatttctacaattttgcaaagggtgattcggggtgtgaacaacaacgggtggtaattatgcgtgggctcagagaggtcggccaacggggtttag

SEQ ID NO: 442604 - DNA, 2476 bp, Homo sapiens
  misc_feature (2)..(2): n is a, c, g, or t
  misc_feature (5)..(6): n is a, c, g, or t
gnaanngtggccgggactttgcaggcagcggcggccgggggcggagcgggatcgagccctcgccgaggcctgccgccatgggcccgcgccgccgccgccgcctgtcacccgggccgcgcgggccgtgagcgtcatggccttggccggggcccctgcgggcggcccatgcgcgccggcgctggaggccctgctcggggccggcgcgctgcggctgctcgactcctcgcagatcgtcatcatctccgccgcgcaggacgccagcgccccgccggctcccaccggccccgcggcaccctgacctgctgctcttcgccacaccgcaggcgccccggcccacacccagtgcgccgcggcccgcgctcggccgcccgccggtgaagcggaggctggacctggaaactgaccatcagtacctggccgagagcagtgggccagctcggggcagaggccgccatccaggaaaaggtgtgaaatccccgggggagaagtcacgctatgagacctcactgaatctgaccaccaagcgcttcctggagctgctgagccactcggctgacggtgtcgtcgacctgaactgggctgccgaggtgctgaaggtgcagaagcggcgcatctatgacatcaccaacgtccttgagggcatccagctcattgccaagaagtccaagaaccacatccagtggctgggcagccacaccacagtgggcgtcggcggacggcttgaggggttgacccaggacctccgacagctgcaggagagcgagcagcagctggaccacctgatgaatatctgtactacgcagctgcgcctgctctccgaggacactgacagccagcgcctggcctacgtgacgtgtcaggaccttcgtagcattgcagaccctgcagagcagatggttatggtgatcaaagcccctcctgagacccagctccaagccgtggactcttcggagaactttcagatctcccttaagagcaaacaaggcccgatcgatgttttcctgtgccctgaggagaccgtaggtgggatcagccctgggaagaccccatcccaggaggtcacttctgaggaggagaacagggccactgactctgccaccatagtgtcaccaccaccatcatctcccccctcatccctcaccacagatcccagccagtctctactcagcctggagcaagaaccgctgttgtcccggatgggcagcctgcgggctcccgtggacgaggaccgcctgtccccgctggtggcggccgactcgctcctggagcatgtgcgggaggacttctccggcctcctccctgaggagttcatcagcctttccccaccccacgaggccctcgactaccacttcggcctcgaggagggcgagggcatcagagacctcttcgactgtgactttggggacctcacccccctggatttctgacagggcttggagggaccagggtttccagagatgctcaccttgtctctgcagccctggagccccctgtccctggccgtcctcccagcctgtttggaaacatttaatttatacccctctcctctgtctccagaagcttctagctctggggtctggctaccgctaggaggctgagcaagccaggaagggaaggagtctgtgtggtgtgtatgtgcatgcagcctacacccacacgtgtgtaccgggggtgaatgtgtgtgagcatgtgtgtgtgcatgtaccggggaatgaaggtgaacatacacctctgtgtgtgcactgcagacacgccccagtgtgtccacatgtgtgtgcatgagtccatgtgtgcgcgtgggggggctctaactgcactttcggcccttttgctctgggggtcccacaaggcccagggcagtgcctgctcccagaatctggtgctctgaccaggccaggtggggaggctttggctggctgggcgtgtaggacggtgagagcacttctgtcttaaaggttttttctgattgaagctttaatggagcgttatttatttatcgaggcctctttggtgagcctggggaatcagcaaaggggaggaggggtgtggggttgataccccaactccctctacccttgagcaagggcaggggtccctgagctgttcttctgccccatactgaaggaactgaggcctgggtgatttatttattgggaaagtgagggagggagacagactgactgacagccatgggtggtcagatggtggggtgggccctctccagggggccagttcagggccccagctgccccccaggatggatatgagatgggagaggtgagtgggggaccttcactgatgtgggcaggaggggtggtgaaggcctcccccagcccagaccctgtggtccctcctgcagtgtctgaagcgcctgcctccccactgctctgccccaccctccaatctgcactttgatttgcttcctaacagctctgttccctcctgctttggttttaataaatattttgatgacgtt

SEQ ID NO: 442605 - DNA, 2621 bp, Homo sapiens
  misc_feature (2)..(2): n is a, c, g, or t
  misc_feature (5)..(6): n is a, c, g, or t
gnaanngtggccgggactttgcaggcagcggcggccgggggcggagcgggatcgagccctcgccgaggcctgccgccatgggcccgcgccgccgccgccgcctgtcacccgggccgcgcgggccgtgagcgtcatggccttggccggggcccctgcgggcggcccatgcgcgccggcgctggaggccctgctcggggccggcgcgctgcggctgctcgactcctcgcagatcgtcatcatctccgccgcgcaggacgccagcgccccgccggctcccaccggccccgcggcgcccgccgccggcccctgcgaccctgacctgctgctcttcgccacaccgcaggcgccccggcccacacccagtgcgccgcggcccgcgctcggccgcccgccggtgaagcggaggctggacctggaaactgaccatcagtacctggccgagagcagtgggccagctcggggcagaggccgccatccaggaaaaggtgtgaaatccccgggggagaagtcacgctatgagacctcactgaatctgaccaccaagcgcttcctggagctgctgagccactcggctgacggtgtcgtcgacctgaactgggctgccgaggtgctgaaggtgcagaagcggcgcatctatgacatcaccaacgtccttgagggcatccagctcattgccaagaagtccaagaaccacatccagtggctgggcagccacaccacagtgggcgtcggcggacggcttgaggggttgacccaggacctccgacagctgcaggagagcgagcagcagctggaccacctgatgaatatctgtactacgcagctgcgcctgctctccgaggacactgacagccagcgcctggcctacgtgacgtgtcaggaccttcgtagcattgcagaccctgcagagcagatggttatggtgatcaaagcccctcctgagacccagctccaagccgtggactcttcggagaactttcagatctcccttaagagcaaacaaggcccgatcgatgttttcctgtgccctgaggagaccgtaggtgggatcagccctgggaagaccccatcccaggaggtcacttctgaggaggagaacagggccactgactctgccaccatagtgtcaccaccaccatcatctcccccctcatccctcaccacagatcccagccagtctctactcagcctggagcaaggtgggtgatgggtaggtgggtggggtggggcagggcccctcttctggggggtgggcaggcacgacagcccctgccttcctccctgctggggcatccccggcctgtgatgctccccgtctccccagaaccgctgttgtcccggatgggcagcctgcgggctcccgtggacgaggaccgcctgtccccgctggtggcggccgactcgctcctggagcatgtgcgggaggacttctccggcctcctccctgaggagttcatcagcctttccccaccccacgaggccctcgactaccacttcggcctcgaggagggcgagggcatcagagacctcttcgactgtgactttggggacctcacccccctggatttctgacagggcttggagggaccagggtttccagagatgctcaccttgtctctgcagccctggagccccctgtccctggccgtcctcccagcctgtttggaaacatttaatttatacccctctcctctgtctccagaagcttctagctctggggtctggctaccgctaggaggctgagcaagccaggaagggaaggagtctgtgtggtgtgtatgtgcatgcagcctacacccacacgtgtgtaccgggggtgaatgtgtgtgagcatgtgtgtgtgcatgtaccggggaatgaaggtgaacatacacctctgtgtgtgcactgcagacacgccccagtgtgtccacatgtgtgtgcatgagtccatgtgtgcgcgtgggggggctctaactgcactttcggcccttttgctctgggggtcccacaaggcccagggcagtgcctgctcccagaatctggtgctctgaccaggccaggtggggaggctttggctggctgggcgtgtaggacggtgagagcacttctgtcttaaaggttttttctgattgaagctttaatggagcgttatttatttatcgaggcctctttggtgagcctggggaatcagcaaaggggaggaggggtgtggggttgataccccaactccctctacccttgagcaagggcaggggtccctgagctgttcttctgccccatactgaaggaactgaggcctgggtgatttatttattgggaaagtgagggagggagacagactgactgacagccatgggtggtcagatggtggggtgggccctctccagggggccagttcagggccccagctgccccccaggatggatatgagatgggagaggtgagtgggggaccttcactgatgtgggcaggaggggtggtgaaggcctcccccagcccagaccctgtggtccctcctgcagtgtctgaagcgcctgcctccccactgctctgccccaccctccaatctgcactttgatttgcttcctaacagctctgttccctcctgctttggttttaataaatattttgatgacgtt

SEQ ID NO: 442606 - DNA, 2175 bp, Homo sapiens
  misc_feature (2)..(2): n is a, c, g, or t
  misc_feature (5)..(6): n is a, c, g, or t
gnaanngtggccgggactttgcaggcagcggcggccgggggcggagcgggatcgagccctcgccgaggcctgccgccatgggcccgcgccgccgccgccgcctgtcacccgggccgcgcgggccgtgagcgtcatggccttggccggggcccctgcgggcggcccatgcgcgccggcgctggaggccctgctcggggccggcgcgctgcggctgctcgactcctcgcagatcgtcatcatctccgccgcgcaggacgccagcgccccgccggctcccaccggccccgcggcgcccgccgccggcccctgcgaccctgacctgctgctcttcgccacaccgcaggcgccccggcccacacccagtgcgccgcggcccgcgctcggccgcccgccggtgaagcggaggctggacctggaaactgaccatcagtacctggccgagagcagtgggccagctcggggcagaggccgccatccaggaaaaggtgtgaaatccccgggggagaagtcacgctatgagacctcactgaatctgaccaccaagcgcttcctggagctgctgagccactcggctgacggtgtcgtcgacctgaactgggctgccgaggtgctgaaggtgcagaagcggcgcatctatgacatcaccaacgtccttgagggcatccagctcattgccaagaagtccaagaaccacatccagtggctgggcagccacaccacagtgggcgtcggcggacggcttgaggggttgacccaggacctccgacagctgcaggagagcgagcagcagctggaccacctgatgaatatctgtactacgcagctgcgcctgctctccgaggacactgacagccagcgcctggcctacgtgacgtgtcaggaccttcgtagcattgcagaccctgcagagcagatggttatggtgatcaaagcccctcctgagacccagctccaagccgtggactcttcggagaactttcagatctcccttaagagcaaacaaggcccgatcgatgttttcctgtgccctgaggagaccgtaggtgggatcagccctgggaagaccccatcccaggaggtcacttctgaggaggagaacagggccactgactctgccaccatagtgtcaccaccaccatcatctcccccctcatccctcaccacagatcccagccagtctctactcagcctggagcaagaaccgctgttgtcccggatgggcagcctgcgggctcccgtggacgaggaccgcctgtccccgctggtggcggccgactcgctcctggagcatgtgcgggaggacttctccggcctcctccctgaggagttcatcagcctttccccaccccacgaggccctcgactaccacttcggcctcgaggagggcgagggcatcagagacctcttcgactgtgactttggggacctcacccccctggatttctgacagggcttggagggaccagggtttccagagatgctcaccttgtctctgcagccctggagccccctgtccctggccgtcctcccagcctgtttggaaacatttaatttatacccctctcctctgtctccagaagcttctagctctggggtctggctaccgctaggaggctgagcaagccaggaagggaaggagtctgtgtggtgtgtatgtgcatgcagcctacacccacacgtgtgtaccgggggtgaatgtgtgtgagcatgtgtgtgtgcatgtaccggggaatgaaggtgaacatacacctctgtgtgtgcactgcagacacgccccagtgtgtccacatgtgtgtgcatgagtccatgtgtgcgcgtgggggggctctaactgcactttcggcccttttgctctgggggtcccacaaggcccagggcagtgcctgctcccagaatctggtgctctgaccaggccaggtggggaggctttggctggctgggcgtgtaggacggtgagagcacttctgtcttaaaggttttttctgattgaagctttaatggagcgttatttatttatcgaggcctcccccagcccagaccctgtggtccctcctgcagtgtctgaagcgcctgcctccccactgctctgccccaccctccaatctgcactttgatttgcttcctaacagctctgttccctcctgctttggttttaataaatattttgatgacgtt

SEQ ID NO: 442607 - DNA, 741 bp, Homo sapiens
ttcattttcttggggatcatagtcctgcattgactgttctttagtgtttgaaaacacatttttcgtatatcttgtctatattttagttgtttatgatggacgtatttagataatttaatatctttttttatgtgaatattttccatttttaaatgtgtccaaaaaaagttttaggaacacaggctgagctacaaaatgtttatacattttttttaaaaaaaaaaacatgctgagtcaggcgcggtggctcatgcctgtaatcccagcactttgagatggaggagggcagatcgtgaggtcagaagatagagaccatcctggctaacacagtgaaacaccatctctactaaaaatacaaaaaattagtccggcgtagtggcgggcccctgtagtcccagctacttgggaggctgaggcaggagaatggcgtgaacccgggaggtggagcttgcagtaagtggagattgtgccactgcactccagcctgggtgacagagcgagactctgtctcaaaaaaaaaaaaattggctaagggtggggtcttggaatgaatgaatgaattttatttacttataatagataatatatattatatataaattataaatatatatatttatagagagacactgtctctattatctttatagaggttgtagataatgtctctattattatagagtgagaccctgtctctattatctatatagagattatagatagtgtctttattatctagat

SEQ ID NO: 442608 - DNA, 5587 bp, Homo sapiens
  misc_feature (4227)..(4227): n is a, c, g, or t
cccaagggttcatgggtagcgtatttacaaaggagcctcctccgccagcccgtgccaccgctgctaatgagagcagtcattaagtaaatgagacgtcgcctttagctggcttaggagttcgcacactaaggggagaagatatttaattgaaacccgcacgcaggcttccccacatgtgaccgctgtacgggaggcagctgccttccctctcctcccccagtccaccctgcaccccccatgtaaatttcatgattgctttccgtgatgtcattttgaaagaggacagacaatagctgtggggaaagaaaatgagttccgaggtgagctgttaaatcagaggtggacacacggaggcaaggccagcagctgcaggacctcaagacacctgggcagacactgcaagatgagcttagaaaatgaagacaagcgagctcgcacccgatccaaggccctgcgaggacccccagagaccacagctgcagacctcagctgccccaccccaggatgcacaggctcagggcacgtccggggcaagtactccaggcaccgaagtttacagagctgccccctggccaagaagaggaagctggagggcgctgaggctgagcacctggtgtccaagaggaagtcacaccccctgaagctggctctggacgagggctatggtgtggacagcgacggcagtgaggacactgaggtgaaggacgcctctgtttcggatgaatcggaaggaactctggagggggccgaggctgagacgtcaggacaggacgagattcatcgccccgagacagctgaaggaaggagccccgtcaagtcccattttggatccaaccccatcggcagcgccactgcctcctccaagggcagctacagcagctaccagggaatcatcgcaacttctctcctgaacttgggtcaaattgctgaagagaccctggtggaagaggacttgggccaggcggccaagccaggtcctggcattgtgcacctgcttcaggaggctgcagagggagctgccagcgaggagggtgaaaagggcctcttcatccagccagaggatgccgaggaggtcgtcgaagtcaccaccgagcgctcccaggacctgtgtccccagtccctggaggatgcagccagtgaggagtccagcaagcagaaaggcatcctgagtcacgaagaggaggacgaggaggaggaggaggaggaagaggaggaggaggaggatgaagaagaggaagaggaagaggaggaggaagaggaagaggaggaggaggaagaggaagaggaggaggaagaggaagaggaagaggaggaggaggaggcagctcctgatgtgatctttcaggaagacacctctcacacctctgcccagaaggcccctgagctccggggcccagaatcacccagtcccaagcctgagtactctgttattgtggaggtccgctcggatgatgacaaggacgaggacacccactcccggaagtcaacagtcactgacgagtcggagatgcaggacatgatgacccggggaaacctgggcctcctggagcaggccatcgccctgaaggctgaacaggtgcgcacagtctgcgagccgggctgcccgcctgccgagcagagccagctgggcctgggagagccagggaaggcagcaaagcccctggacactgtgcggaagagttactacagtaaagatccttcaagagctgagaagcgtgagatcaagtgtccaacaccaggctgtgatggcactggccacgttaccgggttgtaccctcaccaccgcagcctttctggctgtccccacaaggataggatccccccagagatcttagccatgcatgagaacgtgctgaagtgccccactcctggctgcacaggccagggtcacgtgaacagcaaccgcaacacgcacagaagtttgtctgggtgtcccattgctgccgccgaaaaattagccaaatcccatgagaagcagcagccgcagacaggagatccttccaagagtagctccaattccgatcggatcctcaggcccatgtgcttcgtgaagcagctcgaggtccctccatatgggagctaccggcccaacgtggcccccgccacacccagggccaacttggccaaggagctggagaagttctccaaggtcacctttgactacgcaagtttcgatgctcaggtttttggcaaacgcatgcttgccccaaagattcagaccagcgaaacctcacctaaagcctttcaatgctttgactactcgcaggacgccgaggctgcacacatggctgccactgccatcctgaacctctccacgcgctgctgggagatgcctgagaacctcagcacgaagccacaggacctccccagcaagtctgtggatatcgaggtagacgaaaatggaaccctggacttgagcatgcacaaacaccgcaaacgagaaaatgctttccccagcagcagcagctgcagcagcagccccggtgtgaagtctcccgacgcctcccagcgccacagcagcaccagcgcccccagcagctccatgacctctccccagtccagccaggcctcccgccaggacgagtgggaccggcccctggactacaccaagcctagccgcctgagagaggaggaacctgaggagtcagagccagcagcccattcttttgcttcttctgaagcagatgaccaggaagtgtcggaagagaattttgaggagcggaagtatccgggggaagtcaccctgaccaactttaagctgaagtttctctccaaggacataaagaaggagctgctcacctgtcccacccctggctgtgacggcagcggccacatcaccgggaactacgcctcccaccgcagcctctctggttgccctcttgctgacaagagcctcagaaacctcatggctgcccactctgctgacctcaagtgccccacgcccggctgtgacggctctggccacatcacagggaactacgcttcacaccggagcttgtccggctgccctcgtgcaaagaaaagtggagtcaaggtggcacccaccaaggacgacaaggaggaccccgagctgatgaagtgcccagttccaggctgtgtggggctcggtcacatcagcgggaaatacgcctctcacaggagcgcatccggctgcccactggccgcccgcaggcagaaggaagggtccctcaatggctcgtcattctcctggaagtccctgaagaatgaaggaccgacctgccccaccccgggctgtgacggctctggccacgccaatgggagtttcctcacccaccggagtttgtcaggctgtcccagagcaacctttgctggaaagaagggaaaactgtcaggggatgaggtcctcagtccaaagttcaagactagcgacgtgttggagaatgatgaggagatcaagcagctgaaccaggagatccgagacctgaacgagtccaactcggagatggaggctgccatggtgcagctgcagtcccagatctcctccatggagaagaacctgaagaacatcgaggaggagaacaagctcattgaggagcagaatgaagccctgtttctggagctgtccggcctgagccaggccctcatccaaagtctcgccaatatccgccttccgcacatggagccaatatgcgaacagaatttcgatgcctatgtgagcaccctcaccgacatgtactccaaccaggacccggagaacaaggacctcctggagagcatcaagcaggctgtgaggggcatccaggtctaggccgtgtggtacccagaagtgtcccagcccaccacaccgtttacctccctcgccctgccccgcaccgtggggatgcccaactcacagtgacttcccgtttggggcccggtgtggccgcgggcgggtttatccaaagggatggctggaaattggccgctcccacgaggctccctccaggcttggggccgtggtggccctatctgtgtgcataggggcactgaagaattacaaagtgatttatttttgttttctgaaagaaatctgaagagcagctcaaagtctccagtggaagctcatggacaaggttctcagggaagttttggagtttgcaaccacagtattcctttgtctgtcgaggctgggagggtagccgtgagcgtggtgggtgggtggtgtgagtggcatcttggcctggaggacacgcctggggcagcgtgtctgtgctcagtgagggccgntgaagaaagtgcgttttctgttttcatttaattcagttttgtgttaagggtggaacaaagctctgttctagagggaaagttaggaataggcctcccagaggatactccagacagttgacaagcatcgcagcccctgtcaggtcaaggaattttaacctgggagactcctgaaaatcagcctaatgtctgggggcagctggcgctgaggctgtgcagatgtgtatggccttgggtcacagctccctactggggctgcagcctttagaccctgggtctgggatccacgtctagggaccactctggcttctgtgcatccacccaggcccccgacccatcactgccacattctccgggtcatggccgagcttgacctctgcatccatggtgacggaggtggcaatgacatcatcaaggtcagagggtaaattcctaacaggagaccacaaaggtttcacttcttttagatccatccaatatgcgaaaaaagggtacattttaatttaatgtgttaaaaacacaatgtccctaccgtgtaaatagaatccaagtcaattgtgactgcaattccaagttagtatttaaaaatagagaaattgcacttcctggaaaaaattaaaaagtagttagtttaattattctgtaaattatttaattttgtcaagatgtaagtatttatattcacagcctcttatgttaacgtttgctatttatttaacatttttatttattaattttatactatttcaactagaccccacaccagggcaccctaagaggggaaaaaagtgaattcaaagcaaaaataactatttgactataatataggccacaaaaaatcttgatataactcctagttataattttgatgcaaccaagttattttttatatattttgttatttattcttttaataatggaatttttttaaaaagtattttgtaactgaggaattttgataatttggggattttgttttcccttggtctaatggagagaaagacattttggttttctttttccattttgggttccttttgtttcaggcacggataacagcaaatggaattctgtatttattattatttaagtgtagcgcagatgtgtgtgcttgggcgtgtttctcgtgtcgcgtttgcgtgtcggctcttgcggtggagtcctgttgctgtgagggagtgctggccgcaggcagcctcgagtcaccgccaggctcacaggctgtgccacccgtccctccgacagctccaatactgtgaccctccttcctcaggaagcgcgttgaacccacagcactccgtggtgtgtttgcagggtgatttcctaataaaagtccactctgactgtgaaaaaaatgctgtgg

SEQ ID NO: 442609 - DNA, 513 bp, Homo sapiens
gtgactctagcaggatcctcgggatgaggaacgtcactcatgaagagtacatgaagaatcttctcaaagtgggagggatccttgtcatgccactggaagagaaggtcagattcccttcataactgacatttctgcacactgtgtgccaaggtctgttctgggcagtgtacggatacttactcttttaacaatttcctgcatttcacaaatgaggaaacagaggcagggacaggtgagggagatgcagggtcacgcacatgccctagctggggccagaagctgactcaggtgggtgcttcagagcctgcacgtgaaacgcttttctccaccttccttctctgtctctctctttttccttcttctgtcccttccccctcacctccctcttccttccccttctccttccccccagctgttctgagttttaattctaattgttaatctattataattgttctgctgttagaattatatataaaatagagtcattctattctcatcattagtctaatt

SEQ ID NO: 442610 - DNA, 699 bp, Homo sapiens
cccaagggttcatgggtagcgtatttacaaaggagcctcctccgccagcccgtgccaccgctgctaatgagagcagtcattaagtaaatgagacgtcgcctttagctggcttaggagttcgcacactaaggggagaagatatttaattgaaacccgcacgcaggcttccccacatgtgaccgctgtacgggaggcagctgccttccctctcctcccccagtccaccctgcaccccccatgtaaatttcatgattgctttccgtgatgtcattttgaaagaggacagacaatagctgtggggaaagaaaatgagttccgaggtgagctgttaaatcagaggtggacacacggaggcaaggccagcagctgcaggacctccagcaaggatccagctgtgactcagggcatggctcaaggacagtgatggcgtagggtgtaggcaaggagggctatgcagttgtagtgggaacttcatttgggggtgcttgtgttttactctcaaaacccaacctttttcttttgaatctggtggcgagaatgtacattttaatgggtctgttatagacaacttgctgagcacctccgctcatattttggctcccgcaggattatcagtgctctgctgatccatgttggagcctggggcacaaggaagagtcagtaatatggatcctgtctttatttaaggttttggtatct

SEQ ID NO: 442611 - DNA, 3900 bp, Homo sapiens
aggcgcagaggcggcggcggcggcggcggcggcggatgtttacggcggccgaggttggagcggcgctgctcggccgcggacacacgagggacgcgcccgaggagctgcaggtggcagcccaggcggtccgaacccgtcggccggccgagcctggagtattgcctaagtgtaatcttgaacatgggcggtgctgtgagtgctggtgaagacaatgatgagctgatagataatttgaaagaagcacagtatatccggactgagctggtagagcaggctttcagagctatcgatcgtgcagactattatcttgaagaatttaaagaaaatgcttataaagacttggcatggaagcatggaaacattcacctctcagccccgtgcatctactcggaggtgatggaagccctagatctgcagcctggactctcgtttctgaacctgggcagtggcactgggtatctcagctccatggtgggcctcattctaggtccttttggtgtgaaccatggggtggaacttcactcagatgtgatagagtatgcaaagcagaaactggacttcttcatcagaacaagtgatagttttgacaagtttgacttctgtgaaccttcctttgttactgggaattgcctggagatttctccggattgttctcagtatgatcgtgtatactgtggggctggcgtgcagaaagagcatgaagagtacatgaagaatcttctcaaagtgggagggatccttgtcatgccactggaagagaagttgactaagataacacgcacaggtccttcagcttgggaaaccaaaaagattcttgctgtttcttttgctcctctgatccagccctgccattcagagtcaggaaaatcaagacttgtccagttaccaccagtggcagttcgcagcctccaggacttggctcgcatcgccatccggggcaccattaaaaagattattcatcaggaaactgtgagcaaaaacggaaacggactaaagaacacccccaggtttaaacgaaggagagttcgccgccgtcgaatggaaacgattgtctttttggacaaagaagtctttgccagtcggatttccaacccctcagatgacaacagctgtgaagacttggaagaggaacggagggaagaagaagagaagaccccgccggaaacaaagccagaccccccagtgaacttcctacgccagaaggtcctgagcctccctctgccagatcccctgaaatactacttgctttattacagagaaaaataagtctcctgtttgaaagggggaaataggaagagcagattgctgagtgtgaagttcgtgctgcctgtgtgctgttgaagggtcacctggaggcagacgttgtggggaagggaactgctgggctcatccacaccatggttttcttctagttcctgattgacctctaaaattctattcagttgtatgatttgtttacatagttccacaagaccttcattgcatagaagattgttttcccaaagtggagagaatcttcatagagaaaaagagaaggctgtttctttttcggctctgacgaaacactgaagtctgcgtaagagagactgtttgatgaccgtccctcatgcaacatgcacggtactcactaaaaatgaaaactgaagtggaaactaacctgtgttgcttataaagtgtgaaagcacaagcttataaatgtataaaatcttttctgggtgtgacgcacctgcgtccaagtttgaatttttatgatatgtaccacttaattactggcactgagtatcactgaatttcttagttttctagtggggaaacattattgagaagccctcccttattttaagtaagttgattaaatcttatgtgagttgccagttgtaatttttcaaaggaaaaattttgatggggtggaggaatgaattgccagataatctttctggaattccgagagaattccaaagagggtttttttttttttttttaggacatcttttgatacctttaaaagaaccactgtcaagtaatccttaaaagaatatcttggaaaaggaaacagattttttcctgtgtgtaagcaataagtgaagttacatttgccctaaccctagggatgattctttacccagttttaaagcccatcatggtattctaaggtgttgacaccctccatcctcagagcaggtcgaaaatattaaatagactggggactctatgatgggcagcctgtgctttttgacttcagtttgctatttttctgtgatcacattagtactgattcatagattctatcttttataattctggagaaaaagatttgttagttttgtaatttttttgtaagaccaaatgtatgtattttagtagctccattgcatgagaagagtgtaactcacactgacttgtgatatcagccttctctgggccttgtgtgtggagagctttctatcttaccaagtggtagggctaaaagaacaacagcctttttggtagtcacatagcagaatgatcagagttacattgcttattccaaaacattggttctttttaaaacatttttttttacccaaagaaaagaataatagaaattactaacaataaatataaattcagagtgttgatataggattcagtatccagagtttatttttaatcttaatcctcagcttcttgggagttgctgggcttcagtgtctctgtggtttcaccagcttagcttgagctctggttattttggatcttttctgctttttttaagtaactgagtcatttttaccacacagtccagtttgcatgtatagctaggaaacatgtattgctctagattgggcagtttaagtcattttaaagaaagttagttcatagttgttgccttttaactcatagtcaagcttcagtctttcaaagagaaatgtgtgattttcatttacttgctgatattttgtagtttggagatccttgtgggcattattctaactgatacgtagacacttacttggaaatttttggacattatattaaatgagtgctatctgtgaaattggttatattaggtggcttgactaatgttttttctataattgtatatggactgcatttttaaaaaaaccgcatttgcctttatgctagattgtaaaaaattatattagaatgcataagacatgtttttccttcatatgctagacttttcctagcatttcgtatttctgtgttgtcagtgtgtgatttttaaaccggaatttggtttaaaaaaaatctggtggtaatatatgtgagaaatactttggtgtttaccttatgaaaataaaggattgtaagtaaagtttcctgcgcaccttataccagaattcagtataatacactactttctgttttcaaacagataaatcataatatagtctgtattatctgtaagatctgtcttgtaaaccacattcttgacaactatttgcttttgagtagtttgtattttaatatgtgacttttgtcttgaaaagtagtaaagccatagacttgtgcaaaacaagtttcaagtttatagatattaagtttgtaatgtgagcatcaaatgtgtatgtaaaaatactttttaccagtctggaacttgggaaaatccagggaatttgaaacatagattttaatgagctggtaaacacaaatcatgtcaataaaggtagtcaggatattttatccttagcattgcttctgcatcctgtgtaggattccaattcttgaatatgttcttttcaaaatcttaagaaaagaaccttttttctttattaacatcatgtgtttactttcagcaaatatttgtattactgcttgattctgtgacagtcacaatagatgtagagaaggcattatttttcattaataaatgtgaaattggaatggaaaaatgga

SEQ ID NO: 442612 - DNA, 7434 bp, Homo sapiens
gcggagtagcaggagtttgcaagctgcttcattaacttggagccagtggaatgtctgggatcgtctgtgatttggaaaccggtggcagaatgttcccgcgtttctggtcctcatcagtcagaaaatgagttccgaggtgagctgttaaatcagaggtggacacacggaggcaaggccagcagctgcaggacctcaagacacctgggcagacactgcaagatgagcttagaaaatgaagacaagcgagctcgcacccgatccaaggccctgcgaggacccccagagaccacagctgcagacctcagctgccccaccccaggatgcacaggctcagggcacgtccggggcaagtactccaggcaccgaagtttacagagctgccccctggccaagaagaggaagctggagggcgctgaggctgagcacctggtgtccaagaggaagtcacaccccctgaagctggctctggacgagggctatggtgtggacagcgacggcagtgaggacactgaggtgaaggacgcctctgtttcggatgaatcggaaggaactctggagggggccgaggctgagacgtcaggacaggacgagattcatcgccccgagacagctgaaggaaggagccccgtcaagtcccattttggatccaaccccatcggcagcgccactgcctcctccaagggcagctacagcagctaccagggaatcatcgcaacttctctcctgaacttgggtcaaattgctgaagagaccctggtggaagaggacttgggccaggcggccaagccaggtcctggcattgtgcacctgcttcaggaggctgcagagggagctgccagcgaggagggtgaaaagggcctcttcatccagccagaggatgccgaggaggtcgtcgaagtcaccaccgagcgctcccaggacctgtgtccccagtccctggaggatgcagccagtgaggagtccagcaagcagaaaggcatcctgagtcacgaagaggaggacgaggaggaggaggaggaggaagaggaggaggaggaggatgaagaagaggaagaggaagaggaggaggaagaggaagaggaggaggaggaagaggaagaggaggaggaagaggaagaggaagaggaggaggaggaggcagctcctgatgtgatctttcaggaagacacctctcacacctctgcccagaaggcccctgagctccggggcccagaatcacccagtcccaagcctgagtactctgttattgtggaggtccgctcggatgatgacaaggacgaggacacccactcccggaagtcaacagtcactgacgagtcggagatgcaggacatgatgacccggggaaacctgggcctcctggagcaggccatcgccctgaaggctgaacaggtgcgcacagtctgcgagccgggctgcccgcctgccgagcagagccagctgggcctgggagagccagggaaggcagcaaagcccctggacactgtgcggaagagttactacagtaaagatccttcaagagctgagaagcgtgagatcaagtgtccaacaccaggctgtgatggcactggccacgttaccgggttgtaccctcaccaccgcagcctttctggctgtccccacaaggataggatccccccagagatcttagccatgcatgagaacgtgctgaagtgccccactcctggctgcacaggccagggtcacgtgaacagcaaccgcaacacgcacagaagtttgtctgggtgtcccattgctgccgccgaaaaattagccaaatcccatgagaagcagcagccgcagacaggagatccttccaagagtagctccaattccgatcggatcctcaggcccatgtgcttcgtgaagcagctcgaggtccctccatatgggagctaccggcccaacgtggcccccgccacacccagggccaacttggccaaggagctggagaagttctccaaggtcacctttgactacgcaagtttcgatgctcaggtttttggcaaacgcatgcttgccccaaagattcagaccagcgaaacctcacctaaagcctttcaatgctttgactactcgcaggacgccgaggctgcacacatggctgccactgccatcctgaacctctccacgcgctgctgggagatgcctgagaacctcagcacgaagccacaggacctccccagcaagtctgtggatatcgaggtagacgaaaatggaaccctggacttgagcatgcacaaacaccgcaaacgagaaaatgctttccccagcagcagcagctgcagcagcagccccggtgtgaagtctcccgacgcctcccagcgccacagcagcaccagcgcccccagcagctccatgacctctccccagtccagccaggcctcccgccaggacgagtgggaccggcccctggactacaccaagcctagccgcctgagagaggaggaacctgaggagtcagagccagcagcccattcttttgcttcttctgaagcagatgaccaggaagtgtcggaagagaattttgaggagcggaagtatccgggggaagtcaccctgaccaactttaagctgaagtttctctccaaggacataaagaaggagctgctcacctgtcccacccctggctgtgacggcagcggccacatcaccgggaactacgcctcccaccgcagcctctctggttgccctcttgctgacaagagcctcagaaacctcatggctgcccactctgctgacctcaagtgccccacgcccggctgtgacggctctggccacatcacagggaactacgcttcacaccggagcttgtccggctgccctcgtgcaaagaaaagtggagtcaaggtggcacccaccaaggacgacaaggaggaccccgagctgatgaagtgcccagttccaggctgtgtggggctcggtcacatcagcgggaaatacgcctctcacaggagcgcatccggctgcccactggccgcccgcaggcagaaggaagggtccctcaatggctcgtcattctcctggaagtccctgaagaatgaaggaccgacctgccccaccccgggctgtgacggctctggccacgccaatgggagtttcctcacccaccggagtttgtcaggctgtcccagagcaacctttgctggaaagaagggaaaactgtcaggggatgaggtcctcagtccaaagttcaagactagcgacgtgttggagaatgatgaggagatcaagcagctgaaccaggagatccgagacctgaacgagtccaactcggagatggaggctgccatggtgcagctgcagtcccagatctcctccatggagaagaacctgaagaacatcgaggaggagaacaagctcattgaggagcagaatgaagccctgtttctggagctgtccggcctgagccaggccctcatccaaagtctcgccaatatccgccttccgcacatggagccaatatgcgaacagaatttcgatgcctatgtgagcaccctcaccgacatgtactccaaccaggacccggagaacaaggacctcctggagagcatcaagcaggctgtgaggggcatccaggtctaggccgtgtggtacccagaagtgtcccagcccaccacaccgtttacctccctcgccctgccccgcaccgtggggatgcccaactcacagtgacttcccgtttggggcccggtgtggccgcgggcgggtttatccaaagggatggctggaaattggccgctcccacgaggctccctccaggcttggggccgtggtggccctatctgtgtgcataggggcactgaagaattacaaagtgatttatttttgttttctgaaagaaatctgaagagcagctcaaagtctccagtggaagctcatggacaaggttctcagtattgcctaagtgtaatcttgaacatgggcggtgctgtgagtgctggtgaagacaatgatgagctgatagataatttgaaagaagcacagtatatccggactgagctggtagagcaggctttcagagctatcgatcgtgcagactattatcttgaagaatttaaagaaaatgcttataaagacttggcatggaagcatggaaacattcacctctcagccccgtgcatctactcggaggtgatggaagccctagatctgcagcctggactctcgtttctgaacctgggcagtggcactgggtatctcagctccatggtgggcctcattctaggtccttttggtgtgaaccatggggtggaacttcactcagatgtgatagagtatgcaaagcagaaactggacttcttcatcagaacaagtgatagttttgacaagtttgacttctgtgaaccttcctttgttactgggaattgcctggagatttctccggattgttctcagtatgatcgtgtatactgtggggctggcgtgcagaaagagcatgaagagtacatgaagaatcttctcaaagtgggagggatccttgtcatgccactggaagagaagttgactaagataacacgcacaggtccttcagcttgggaaaccaaaaagattcttgctgtttcttttgctcctctgatccagccctgccattcagagtcaggaaaatcaagacttgtccagttaccaccagtggcagttcgcagcctccaggacttggctcgcatcgccatccggggcaccattaaaaagattattcatcaggaaactgtgagcaaaaacggaaacggactaaagaacacccccaggtttaaacgaaggagagttcgccgccgtcgaatggaaacgattgtctttttggacaaagaagtctttgccagtcggatttccaacccctcagatgacaacagctgtgaagacttggaagaggaacggagggaagaagaagagaagaccccgccggaaacaaagccagaccccccagtgaacttcctacgccagaaggtcctgagcctccctctgccagatcccctgaaatactacttgctttattacagagaaaaataagtctcctgtttgaaagggggaaataggaagagcagattgctgagtgtgaagttcgtgctgcctgtgtgctgttgaagggtcacctggaggcagacgttgtggggaagggaactgctgggctcatccacaccatggttttcttctagttcctgattgacctctaaaattctattcagttgtatgatttgtttacatagttccacaagaccttcattgcatagaagattgttttcccaaagtggagagaatcttcatagagaaaaagagaaggctgtttctttttcggctctgacgaaacactgaagtctgcgtaagagagactgtttgatgaccgtccctcatgcaacatgcacggtactcactaaaaatgaaaactgaagtggaaactaacctgtgttgcttataaagtgtgaaagcacaagcttataaatgtataaaatcttttctgggtgtgacgcacctgcgtccaagtttgaatttttatgatatgtaccacttaattactggcactgagtatcactgaatttcttagttttctagtggggaaacattattgagaagccctcccttattttaagtaagttgattaaatcttatgtgagttgccagttgtaatttttcaaaggaaaaattttgatggggtggaggaatgaattgccagataatctttctggaattccgagagaattccaaagagggtttttttttttttttttaggacatcttttgatacctttaaaagaaccactgtcaagtaatccttaaaagaatatcttggaaaaggaaacagattttttcctgtgtgtaagcaataagtgaagttacatttgccctaaccctagggatgattctttacccagttttaaagcccatcatggtattctaaggtgttgacaccctccatcctcagagcaggtcgaaaatattaaatagactggggactctatgatgggcagcctgtgctttttgacttcagtttgctatttttctgtgatcacattagtactgattcatagattctatcttttataattctggagaaaaagatttgttagttttgtaatttttttgtaagaccaaatgtatgtattttagtagctccattgcatgagaagagtgtaactcacactgacttgtgatatcagccttctctgggccttgtgtgtggagagctttctatcttaccaagtggtagggctaaaagaacaacagcctttttggtagtcacatagcagaatgatcagagttacattgcttattccaaaacattggttctttttaaaacatttttttttacccaaagaaaagaataatagaaattactaacaataaatataaattcagagtgttgatataggattcagtatccagagtttatttttaatcttaatcctcagcttcttgggagttgctgggcttcagtgtctctgtggtttcaccagcttagcttgagctctggttattttggatcttttctgctttttttaagtaactgagtcatttttaccacacagtccagtttgcatgtatagctaggaaacatgtattgctctagattgggcagtttaagtcattttaaagaaagttagttcatagttgttgccttttaactcatagtcaagcttcagtctttcaaagagaaatgtgtgattttcatttacttgctgatattttgtagtttggagatccttgtgggcattattctaactgatacgtagacacttacttggaaatttttggacattatattaaatgagtgctatctgtgaaattggttatattaggtggcttgactaatgttttttctataattgtatatggactgcatttttaaaaaaaccgcatttgcctttatgctagattgtaaaaaattatattagaatgcataagacatgtttttccttcatatgctagacttttcctagcatttcgtatttctgtgttgtcagtgtgtgatttttaaaccggaatttggtttaaaaaaaatctggtggtaatatatgtgagaaatactttggtgtttaccttatgaaaataaaggattgtaagtaaagtttcctgcgcaccttataccagaattcagtataatacactactttctgttttcaaacagataaatcataatatagtctgtattatctgtaagatctgtcttgtaaaccacattcttgacaactatttgcttttgagtagtttgtattttaatatgtgacttttgtcttgaaaagtagtaaagccatagacttgtgcaaaacaagtttcaagtttatagatattaagtttgtaatgtgagcatcaaatgtgtatgtaaaaatactttttaccagtctggaacttgggaaaatccagggaatttgaaacatagattttaatgagctggtaaacacaaatcatgtcaataaaggtagtcaggatattttatcctta
